(19) United States
(12) Patent Application Publication
(10) Pub. No.: US 2009/0144849 A1
(43) Pub. Date: Jun. 4, 2009

(54) Nucleic acid molecules and other molecules associated with transcription in plants

(76) Inventor: Linda L. Lutfiyya, St. Louis, MO (US)

Correspondence Address: ARNOLD & PORTER LLP, 555 TWELFTH STREET, N.W., ATTN: IP DOCKETING, WASHINGTON, DC, 20004, US

(21) Appl. No.: 11/978,679

(22) Filed: Oct. 30, 2007

Related U.S. Application Data
(63) Continuation-in-part of application No. 10/361,942, filed on Feb. 10, 2003, now abandoned.
(60) Provisional application No. 60/356,051, filed on Feb. 11, 2002.

(51) Int. Cl. C12N 15/11; A01H 5/00; C07H 21/00; C07K 14/00; C12P 21/06; A01G 1/00

(52) U.S. Cl. 800/278; 800/298; 800/312; 800/320.1; 800/314; 800/320.3; 536/24.5; 536/23.6; 530/300; 435/69.1; 47/58.1 R; 111/200

(57) ABSTRACT

The present invention is in the field of plant molecular biology. More specifically, this invention pertains to nucleic acid fragments encoding transcription factors, transcription factors, antibodies to transcription factors as well as plants and other organisms expressing transcription factors. This invention also relates to methods of using such agents, for example, in plant breeding or biotechnology.

[0001] This application claims the benefit of application No. U.S. 60/356,051 filed Feb. 11, 2002.

### INCORPORATION OF SEQUENCE LISTING

[0002] Two copies of the sequence listing (Seq. Listing Copy 1 and Seq. Listing Copy 2) and a computer-readable form of the sequence listing, all on CD-ROMs, each containing the file named pa_{—}00434.rpt, which is 9,054,161 bytes (measured in MS-DOS) and was created on Feb. 6, 2003, are herein incorporated by reference.

### FIELD OF THE INVENTION

[0003] The present invention is in the field of plant molecular biology. More specifically, this invention pertains to nucleic acid fragments encoding transcription factors, transcription factors, antibodies to transcription factors as well as plants and other organisms expressing transcription factors. This invention also relates to methods of using such agents, for example, in plant breeding or biotechnology.

### BACKGROUND OF THE INVENTION

[0004] Transcription is the essential first step in the conversion of the genetic information in the DNA into protein and the major point at which gene expression is controlled. Transcription of protein-coding genes is accomplished by the multisubunit enzyme RNA polymerase II and an ensemble of ancillary proteins called transcription factors. Basal (or general) transcription factors (a universal set of cellular proteins required for the transcription of all protein-coding genes) assist RNA polymerase II in aligning itself to the core region encompassing the transcription initiation site of genes and accurately initiating transcription. RNA polymerase II, basal transcription factors and an array of other proteins known as transcription co-factors comprise the basal transcription machinery that determines the constitutive level of gene transcription. Other transcription factors, termed gene-specific transcription factors, modulate transcription of a subset of protein-coding genes in response to specific environmental signals through binding to characteristic, cis-acting DNA sequence elements (motifs) and interactions with the basal transcription machinery. Cis-acting DNA sequence elements are often parts of larger regulatory entities called promoters or enhancers that confer a specific expression pattern to linked transcription units, their target genes. Collectively, these regions might bind several different gene-specific transcription factors each of which might contribute positively (activators) or negatively (repressors) to transcription initiation and rate. Protein-protein interactions between DNA-bound gene-specific transcription factors often result in synergistic or inhibitory regulatory effects. It is the sum of these combinatorial interactions that defines the transcriptional identity of a gene, turning genes on and off as appropriate for a specific biological context. In this manner, genes can be regulated, for example, tissue specifically, with a certain temporal or developmental pattern or become responsive to exogenous cues.

[0005] The identification of transcription factors and the subsequent modification of their activity may result in dramatic changes to a plant leading to plants with highly desirable, commercial traits. Root growth, tolerance to salt or cold stress, and flower characteristics are only some examples of plant traits that may be altered by modifying transcription factors.

[0006] Transcription factors may be identified by the presence of conserved functional domains. Typically, they are comprised of two domains that represent discrete functional entities. One of these is responsible for sequence-specific DNA recognition and binding (DNA binding domain); and the other facilitates communication with the basal transcription machinery, resulting in either the activation or repression of transcription initiation (transeffector domain). In addition, transcription factors also may contain oligomerization domains. This domain type may be adjacent to or overlap with DNA binding domains. The domain may also affect the transcription factor's affinity for certain cis elements or other aspects of transcription factor activity. Nuclear localization signals that are characterized by a core peptide enriched in arginine and lysine may be present as well.

[0007] Such functional domains may be identified by examining the primary amino acid sequence of a putative transcription factor. For example, one class of transcription factors, the leucine zipper proteins, derive their name from the repeats they share of four or five leucine residues precisely seven amino acids apart. These domains provide hydrophobic faces through which leucine zipper proteins interact to form dimers. Zinc finger proteins are transcription factors so called because of the presence of repeated motifs of cysteine and histidine that are reported to fold up into a three-dimensional structure coordinated by a zinc ion.

[0008] Protein domains indicative of transcription factors have been described using Profile Hidden Markov Models (e.g. Profile HMM). Profile HMMs are based on position specific sequence information from multiple alignments. Different residues in a functional sequence are subject to different selective pressures. Multiple alignments of a sequence family reveal this in their pattern of conservation. Some positions are more conserved than others, and some regions of a multiple alignment are reported to tolerate insertions and deletions more than other regions.

[0009] An HMM (Hidden Markov Model) is used to statistically describe a protein family's consensus sequence. This statistical description can be used for sensitive and selective database searching. The model consists of a linear sequence of nodes with a “begin” state and an “end” state. A typical model can contain hundreds of nodes. Each node between the beginning and end state corresponds to a column in a multiple alignment. Each node in an HMM has a match state, an insert state, and a delete state with position-specific probabilities for transitioning into each of these states from the previous state. In addition to a transition probability, the match state also has position specific probabilities for emitting a particular residue. Likewise, the insert state has probabilities for inserting a residue at the position given by the node. There is also a chance that no residue is associated with a node. That probability is indicated by the probability of transitioning to the delete state. Both transition and emission probabilities can be generated from a multiple alignment of a family of sequences. An HMM can be aligned with a new sequence to determine the probability that the sequence belongs to the modeled family. The most probable path through the HMM (i.e. which transitions were taken and which residues were emitted at match and insert sites) taken to generate a sequence similar to the new sequence determines the similarity score.

[0010] Several available software packages implement profile HMMs or HMM-like models. These include SAM (The Regents Of The University of California, Santa Cruz, Calif.), HMMER (The Pfam Consortium, Washington University, St. Louis, Mo.) and HMMpro (NetID Inc.). Additionally, two collections of profile HMMs are currently available: the Pfam database (The Pfam Consortium, Washington University, St. Louis, Mo.) and the PROSITE Profiles database (Swiss Institute of Bioinformatics, Geneva, Switzerland)

[0011] Sequence similarity searches against known transcription factors or transcription factor domains resulting in statistically significant similarity between a putative and known transcription factor also provide strong evidence that both code for proteins with similar three dimensional structure and are thus likely to exhibit equivalent biochemical functions. The use of amino acid comparison methods-in particular those such as BLAST (Altschul et al., J. Mol. Biol. 215:403-410 (1990)) and FASTA (Pearson, W. R. and Lipman, D. J. Proc. Natl. Acad. Sci. 85, 2444-2448 (1988)) which are sufficiently fast to search protein sequence databases (such as NCBI's non-redundant amino acid databases (National Center for Biotechnology Information, Bethesda, Md.) or Transfac which contains transcription factor domains (Wingender, E., et al., Nucleic Acids Res. 28, 316-319 (2000)) have been used for such purposes. More rigorous algorithms such as that of the Frame+program (Compugen Ltd., Jamesburg, N.J.) are also used.

### BRIEF SUMMARY OF THE INVENTION

[0012] The present invention provides a transformed plant having a recombinant nucleic acid molecule which comprises: (A) a promoter region which functions in a plant cell to cause the production of a mRNA molecule; (B) a structural nucleic acid molecule encoding a protein or fragment thereof comprising an amino acid sequence selected from the group consisting of SEQ ID NOS: 1-1453 and fragment of any; and (C) a 3′ non-translated sequence that functions in the plant cell to cause termination of transcription and addition of polyadenylated ribonucleotides to a 3′ end of the mRNA molecule.

[0013] The present invention also provides a transformed plant having a recombinant nucleic acid molecule which comprises: (A) a promoter region which functions in a plant cell to cause the production of a mRNA molecule; which is linked to (B) a transcribed nucleic acid molecule with a transcribed strand and a non-transcribed strand, wherein the transcribed strand is complementary to a nucleic acid molecule encoding a protein or fragment thereof comprising an amino acid sequence selected from the group consisting of SEQ ID NOS: 1-1453 and fragment of any; which is linked to (C) a 3′ non-translated sequence that functions in plant cells to cause termination of transcription and addition of polyadenylated ribonucleotides to a 3′ end of the mRNA molecule.

[0014] The present invention also provides a method for determining a level or pattern of a plant transcription factor in a plant cell or plant tissue comprising: (A) incubating, under conditions permitting nucleic acid hybridization, a marker nucleic acid molecule, the marker nucleic acid molecule selected from the group of marker nucleic acid molecules which specifically hybridize to a nucleic acid molecule having the nucleic acid sequence selected from the group consisting of SEQ ID NOS: 1454-2906 and complements thereof or fragments of any, with a complementary nucleic acid molecule obtained from the plant cell or plant tissue, wherein nucleic acid hybridization between the marker nucleic acid molecule and the complementary nucleic acid molecule obtained from the plant cell or plant tissue permits the detection of an mRNA for the transcription factor; (B) permitting hybridization between the marker nucleic acid molecule and the complementary nucleic acid molecule obtained from the plant cell or plant tissue; and (C) detecting the level or pattern of the complementary nucleic acid, wherein the detection of the complementary nucleic acid is predictive of the level or pattern of the plant transcription factor.

[0015] The present invention provides a method of determining a mutation in a plant whose presence is predictive of a mutation affecting a level or pattern of a protein comprising the steps: (A) incubating, under conditions permitting nucleic acid hybridization, a marker nucleic acid, the marker nucleic acid selected from the group of marker nucleic acid molecules which specifically hybridize to a nucleic acid molecule having a nucleic acid sequence selected from the group of SEQ ID NOS: 1454-2906 or complements thereof and a complementary nucleic acid molecule obtained from the plant, wherein nucleic acid hybridization between the marker nucleic acid molecule and the complementary nucleic acid molecule obtained from the plant permits the detection of a polymorphism whose presence is predictive of a mutation affecting the level or pattern of the protein in the plant; (B) permitting hybridization between the marker nucleic acid molecule and the complementary nucleic acid molecule obtained from the plant; and (C) detecting the presence of the polymorphism, wherein the detection of the polymorphism is predictive of the mutation.

[0016] The present invention also provides a method of producing a plant containing an overexpressed protein comprising: (A) transforming the plant with a recombinant nucleic acid molecule, wherein said nucleic acid molecule comprises a promoter region, wherein the promoter region is linked to a structural region, wherein the structural region comprises a nucleic acid sequence encoding a protein having an amino acid sequence selected from the group consisting of SEQ ID NOS: 1-1453 and fragment thereof wherein the structural region is linked to a 3′ non-translated sequence that functions in the plant to cause termination of transcription and addition of polyadenylated ribonucleotides to a 3′ end of a mRNA molecule; and wherein the presence of said nucleic acid molecule results in overexpression of said protein; and (B) growing the transformed plant.

[0017] The present invention also provides a method of producing a plant containing reduced levels of a plant transcription factor comprising: (A) transforming the plant with a recombinant nucleic acid molecule, wherein said nucleic acid molecule comprises a promoter region, wherein the promoter region is linked to a structural region, wherein the structural region comprises a nucleic acid molecule encoding a protein having an amino acid sequence consisting of SEQ ID NOS: 1-1453 and fragment thereof; wherein the structural region is linked to a 3′ non-translated sequence that functions in the plant to cause termination of transcription and addition of polyadenylated ribonucleotides to a 3′ end of a mRNA molecule; and wherein the presence of said nucleic acid molecule results in co-suppression of said plant transcription factor; and (B) growing the transformed plant.

[0018] The present invention also provides a method for preventing expression of a plant transcription factor in a plant cell comprising: (A) transforming the plant cell with a knockout construct, said construct comprising a nucleic acid molecule selected from the group consisting of SEQ ID NOS: 1454-2906 or complements thereof or fragment of either.

[0019] The present invention also provides a method for detecting an insertion event in a genome comprising: (A) preparing a DNA composition enhanced for a plurality of insertion junctions; (B) preparing at least a first detectable array comprising said DNA composition, wherein said preparing comprises directly or indirectly attaching said DNA composition to a solid support; (C) hybridizing a gene specific probe to said array, said gene specific probe detecting said insertion event from said first array and said gene specific probe comprising a nucleic acid sequence selected from SEQ ID NOS: 1454-2906 or complements thereof or fragment of either.

[0020] The present invention also provides a method for selecting a plant having a trait, said method comprising the steps of: (A) obtaining genomic DNA from a plurality of plants; (B) analyzing genomic DNA from each of the plurality of plants to determine the presence or absence of a DNA marker that is genetically linked to a nucleic acid sequence selected from the group consisting of SEQ ID NOS: 1454-2906 or complements thereof or fragment of either and (C) selecting said plant containing said DNA marker.

[0021] The present invention also provides a method for reducing expression of a plant transcription factor in a plant comprising: (A) transforming the plant with a recombinant nucleic acid molecule, the nucleic acid molecule having a promoter region which functions in a plant cell to cause the production of a mRNA molecule, wherein said promoter region is linked to a transcribed nucleic acid molecule having a transcribed strand and a non-transcribed strand, wherein the transcribed strand is complementary to a nucleic acid molecule having a nucleic acid sequence that encodes a plant transcription factor having an amino acid sequence selected from the group consisting of SEQ ID NOS: 1-1453 or fragments thereof and the transcribed strand is complementary to an endogenous mRNA molecule; and wherein the transcribed nucleic acid molecule is linked to a 3′ non-translated sequence that functions in the plant cell to cause termination of transcription and addition of polyadenylated ribonucleotides to a 3′ end of a mRNA molecule; and (B) growing the transformed plant.

[0022] The present invention also provides a method of determining an association between a polymorphism and a plant trait comprising: (A) hybridizing a nucleic acid molecule specific for the polymorphism to genetic material of a plant, wherein the nucleic acid molecule has a nucleic acid sequence selected from the group consisting of SEQ ID NOS: 1454-2906 and complements thereof or fragment of any; and (B) calculating the degree of association between the polymorphism and the plant trait.

[0023] The present invention also provides a method of isolating a nucleic acid that encodes a plant transcription factor or fragment thereof comprising: (A) incubating under conditions permitting nucleic acid hybridization, a first nucleic acid molecule comprising a nucleic acid sequence selected from the group consisting of SEQ ID NOS: 1454-2906 and complements thereof or fragment of any with a complementary second nucleic acid molecule obtained from a plant cell or plant tissue; (B) permitting hybridization between the first nucleic acid molecule and the second nucleic acid molecule obtained from the plant cell or plant tissue; and (C) isolating the second nucleic acid molecule.

[0024] The present invention also provides an array comprising at least 30 different and separated target nucleic acid molecules immobilized on a solid support in a manner that complementary probe nucleic acid molecules can be hybridized thereto, wherein said target nucleic acid molecules have at least 20 consecutive nucleotides in a sequence selected from the group consisting of: (a) SEQ ID NOS: 1454-2906; (b) sequences which are complements of (a); (c) sequences which have at least 60% identity to a sequence of (a) or (b); (d) sequences of molecules which hybridize to a sequence of (a) or (b) or (c).

### DETAILED DESCRIPTION OF THE INVENTION

[0025] One skilled in the art can refer to general reference texts for detailed descriptions of known techniques discussed herein or equivalent techniques. These texts include Current Protocols in Molecular Biology Ausubel et al., eds., John Wiley & Sons, N.Y. (1989), and supplements through September (1998), Molecular Cloning, A Laboratory Manual, Sambrook et al, 2^{nd} Ed., Cold Spring Harbor Press, Cold Spring Harbor, N.Y. (1989), Genome Analysis: A Laboratory Manual 1: Analyzing DNA, Birren et al., Cold Spring Harbor Press, Cold Spring Harbor, N.Y. (1997); Genome Analysis: A Laboratory Manual 2: Detecting Genes, Birren et al., Cold Spring Harbor Press, Cold Spring Harbor, N.Y. (1998); Genome Analysis: A Laboratory Manual 3: Cloning Systems, Birren et al., Cold Spring Harbor Press, Cold Spring Harbor, N.Y. (1999); Genome Analysis: A Laboratory Manual 4: Mapping Genomes, Birren et al., Cold Spring Harbor Press, Cold Spring Harbor, N.Y. (1999); Plant Molecular Biology: A Laboratory Manual, Clark, Springer-Verlag, Berlin, (1997), Methods in Plant Molecular Biology, Maliga et al., Cold Spring Harbor Press, Cold Spring Harbor, N.Y. (1995). These texts can, of course, also be referred to in making or using an aspect of the invention. It is understood that any of the agents of the invention can be substantially purified and/or be biologically active and/or recombinant.

[0026] The agents of the invention will preferably be “biologically active” with respect to either a structural attribute, such as the capacity of a nucleic acid to hybridize to another nucleic acid molecule, or the ability of a protein to be bound by an antibody (or to compete with another molecule for such binding). Alternatively, such an attribute may be catalytic and thus involve the capacity of the agent to mediate a chemical reaction or response. The term “substantially purified”, as used herein, refers to a molecule separated from substantially all other molecules normally associated with it in its native state. More preferably a substantially purified molecule is the predominant species present in a preparation. A substantially purified molecule may be greater than 60% free, preferably 75% free, more preferably 90% free, and most preferably 95% free from the other molecules (exclusive of solvent) present in the natural mixture. The term “substantially purified” is not intended to encompass molecules present in their native state.

[0027] The agents of the present invention may also be recombinant. As used herein the term “recombinant” refers to a) molecules that are constructed outside of living cells by joining natural or synthetic DNA segments to DNA molecules that can replicate in a living cell or b) molecules that result from the replication or expression of those molecules described above.

[0028] It is understood that the agents of the invention may be labeled with reagents that facilitate detection of the agent (e.g. fluorescent labels, Prober et al., Science 238:336-340 (1987)); Albarella et al., EP 144914; chemical labels, Sheldon et al., U.S. Pat. No. 4,582,789; Albarella et al., U.S. Pat. No. 4,563,417; modified bases, Miyoshi et al., EP 119448). It is further understood that the invention provides recombinant bacterial, mammalian, microbial, archaebacterial, insect, fungal, algal, and plant cells as well as viral constructs comprising the agents of the invention.

[0029] As used herein the term “fragment” or “domain” with respect to a polypeptide or polynucleic acid sequence refers to a subsequence of the polypeptide or polynucleic acid sequence, respectively. In some cases, the fragment or domain is a subsequence of the polypeptide or polynucleic acid sequence that performs at least one biological function of the intact polypeptide or polynucleic acid sequence in substantially the same manner, or to a similar extent, as does the polypeptide or polynucleic acid sequence, respectively. For example, a polypeptide fragment can comprise a recognizable structural motif or functional domain such as a DNA binding domain that binds to a DNA promoter region, an activation domain or a domain for protein-protein interactions. Domains can vary in size from as few as 6 amino acids to the full length of the intact polypeptide, but are preferably at least about 30 amino acids in length and more preferably at least 60 amino acids in length. In reference to a polynucleic acid molecule, a “domain” refers to any subsequence of a polynucleotide, typically, or at least about 15 consecutive nucleotides, preferably at least about 30 nucleotides, more preferably at least about 50, of any of the sequences provided herein. Table 1 lists the transcription factor family names as defined by their domains and descriptions. The column headings are defined as:
[0030] 1. Transcription Factor Family: Entries in this column list the transcription factor families as listed in the Pfam database (The Pfam Consortium, Washington University, St. Louis, Mo.), Transfac (Wingender, E., et al., Nucleic Acids Res. 28, 316-319 (2000), or PROSITE (Swiss Institute of Bioinformatics, Geneva, Switzerland).
[0031] 2. Family Description: Entries in this column describe the transcription factor families listed in column 1. These descriptions are from the Pfam database, Transfac or PROSITE.
[0032] 3. Related families: Entries in this column list the transcription factor families related to the families listed in column 1.

TABLE 1

| Transcription | |
|---|---|
| Factor Family | Family Name and Domain Description |
| AP2 | This 60 amino acid residue domain can bind to DNA -- this domain is plant |
| | specific -- members of this family are suggested to be related to pyridoxal |
| | phosphate-binding domains such as found in aminotran 2 - ethylene response |
| | (inducible). |
| | Examples: ethylene-responsive element binding proteins (EREBPs) & |
| | E. coli universal stress protein UspA |
| ANK | Ankyrin repeat. |
| | Some Ankyrin-only proteins will interact with rel-ankyrin proteins to inhibit |
| | DNA binding activity. |
| | Examples: IkB α, γ, β and cactus. |
| ARF | Auxin response factor -- plant specific. Not in Pfam - not to be confused with |
| | similarly named ADP-ribosylation factor (GTP binding protein) which is listed |
| | as ARF in Pfam. |
| ARID | AT-Rich Interaction Domain - DNA-binding. |
| | Examples: Structural homology with T4 RNase H, E. coli endonuclease III & |
| | Bacillus subtilis DNA polymerase I |
| AT-hook | The AT-hook is an AT-rich DNA-binding motif that was first described in |
| | mammalian high-mobility-group non-histone chromosomal protein HMG-I/Y. It |
| | is necessary and sufficient for binding to the narrow minor groove of stretches of |
| | AT-rich DNA via a conserved nine amino acid peptide (KRPRGRPKK). Many |
| | of the AT-hook DNA-binding motif proteins have been shown to have an effect |
| | on the structure and architecture of chromatin at levels beyond the action of the |
| | basic histones. They have been shown to also play a role in transcription |
| | regulation by acting as cofactors. |
| 14-3-3 | The 14-3-3 proteins are a family of closely related acidic homodimeric proteins |
| | of about 30 Kd. The GF14 (G-Box Factor 14-3-3 Homolog) family are a group |
| | of proteins similar to 14-3-3 proteins that bind G-box oligonucleotides in |
| | promoters to regulate transcription. |
| B3 | Similar to ARF - plant specific. Not in Pfam. Binds DNA directly. |
| BAH | Bromo-adjacent homology. |
| | Appears to act as a protein-protein interaction module specialized in gene |
| | silencing. It might play an important role by linking DNA methylation, |
| | replication and transcriptional regulation. |
| | Examples: DNA (cytosine-5) methyltransferases & Origin recognition complex |
| | 1 (Orc1) proteins. |
| basic | This basic domain is found in the MyoD family of muscle specific proteins that |
| | control muscle development. The bHLH region of the MyoD family includes the |
| | basic domain and the Helix-loop-helix (HLH) motif. The bHLH region mediates |
| | specific DNA binding with 12 residues of the basic domain involved in DNA |
| | binding. The basic domain forms an extended alpha helix in the structure. |
| BPF-1 | The parsley BPF-1 protein (Box P-binding factor) was identified as a |
| | transcription factor that bound the promoter of phenylalanine ammonia lyase |
| | (PAL1) in response to a fungal elicitor. An Arabidopsis homolog HPPBF-1 (H- |
| | protein promoter binding factor-1), was found to regulate light-dependent |
| | expression of the H subunit of glycine decarboxylase, a mitochondrial enzyme |
| | complex involved in photorespiration. |
| bromodomain | About 70 amino acids -- Exact function of this domain is not yet known but it is |
| | thought to be involved in protein-protein interactions and it may be important for |
| | the assembly or activity of multicomponent complexes involved in |
| | transcriptional activation. |
| | Examples: Mammalian CREB-binding protein; also found in many chromatin |
| | associated proteins -- bromodomains can interact specifically with acetylated |
| | lysine. |
| BTB | Named for BR-C, ttk and bab -- approximately 115 amino acids. |
| | The POZ or BTB domain is also known as BR-C/Ttk or ZiN |
| | Found primarily in zinc finger proteins -- present near the N-terminus of a |
| | fraction of zinc finger (zf-C2H2) proteins. |
| | The BTB/POZ domain mediates homomeric dimerization and in some instances |
| | heteromeric dimerization -- inhibits the interaction of their associated finger |
| | regions with DNA -- shown to mediate transcriptional repression and to interact |
| | with components of histone deacetylase co-repressor complexes. |
| | Other Examples: Drosophila bric a brac protein plus an estimated 40 members |
| | in Drosophila. |
| BZIP | Basic region mediating sequence-specific DNA-binding followed by a leucine |
| | zipper required for dimerization -- family is quite large. |
| | Examples: Fos, Jun, CRE, & Arabidopsis G-box binding factors GBF. |
| CBFD, NFYB, | Histone-like transcription factors (CBF/NF-Y) and archaeal histones |
| HMF | CCAAT-binding factor (CBF). |
| | Heteromeric transcription factor that consists of two different components, both |
| | needed for DNA-binding. First subunit of CBFD (NF-YB) binds DNA (protein |
| | of 116 to 210 amino-acid residues); the second subunit of CBFD (NF-YA) |
| | contains an N-terminal subunit-association domain and a C-terminal DNA |
| | recognition domain (a protein of 265 to 350 amino-acid residues). |
| | Other Examples: histone-like subunits of transcription factor IID. |
| chromo | CHRromatin Organization MOdifier -- about 60 amino acids |
| | Originally found in proteins that modify the structure of chromatin to the |
| | condensed morphology of heterochromatin (Drosophila modifiers of |
| | variegation). |
| | Examples: Fission yeast swi6 (repression of the silent mating-type loci mat2 and |
| | mat3), Drosophila protein Su(var)3-9 (a suppressor of position-effect |
| | variegation), & mammalian DNA-binding/helicase proteins CHD-1 to CHD-4. |
| chromo shadow | This domain is distantly related to chromo. This domain is always found in |
| | association with a chromo domain although not all chromo domain proteins |
| | contain the chromo shadow. |
| | Examples: Fission yeast swi6 (repression of the silent mating-type loci mat2 and |
| | mat3). |
| Copper-fist | Some fungal transcription factors contain a N-terminal domain which seems to |
| | be involved in copper-dependent DNA-binding -- undergo a conformational |
| | change in presence of copper. |
| | Examples: Yeast ACE1 (or CUP2) and Candida glabrata AMT1 which regulate |
| | the expression of the metallothionein genes -- Yarrowia lipolytica copper |
| | resistance protein CRF1. |
| CSD | Cold shock domain -- about 70 amino acids. |
| | Binds to the CCAAT-containing Y box and the B box. |
| | Binds to cold tolerance gene promoters in bacteria. |
| | Examples: E. coli protein CS7.4 (gene cspA) which is induced in response to |
| | low temperature & Bacillus subtilis cold-shock proteins cspB and cspC. |
| Ctf/nf1 | Nuclear factor I (NF-I) or CCAAT box-binding transcription factor (CTF) (also |
| | known as TGGCA-binding proteins) are a family of vertebrate nuclear proteins |
| | which recognize and bind, as dimers, the palindromic DNA sequence 5′- |
| | TGGCANNNTGCCA-3′. CTF/NF-I binding sites are present in viral and cellular |
| | promoters and in the origin of DNA replication of Adenovirus type 2. |
| Dm-domain | The DM domain is named after dsx and mab-3 -- dsx contains a single amino- |
| | terminal DM domain, whereas mab-3 contains two amino-terminal domains. The |
| | DM domain has a pattern of conserved zinc chelating residues C2H2C4. The |
| | dsx DM domain has been shown to dimerize and bind palindromic DNA. |
| Dof | Dof proteins are a family of TFs that share a unique DNA-binding domain of |
| | ~52 aa. May form a single zinc-finger that is essential for DNA recognition. |
| | Plant specific and have various roles in the cell. Found in both monocots and |
| | dicots. |
| DPB | Described by Mendel as the DNA-binding protein (DBP) family, a collection of |
| | miscellaneous proteins that have been functionally identified by their ability to |
| | physically bind to DNA via a DNA-binding domain. Here, includes the remorin |
| | like DNA-binding proteins. |
| | Also see TEO which describes the PCF 1/2 like TFs. |
| ENBP | ENBP1 (early nodulin gene-binding protein 1), binds to an AT-rich regulatory |
| | element of psENOD12b to regulate its expression upon infection of plant root |
| | hairs by nitrogen-fixing bacteria. ENBP1 and ENBP1-like transcription factors |
| | are probably involved in general cellular processes, others than in a symbiotic |
| | context. |
| Ets | Ets transcription factors are nuclear effectors of the Ras-MAP-kinase signaling |
| | pathway. |
| | Avian leukemia virus E26 is a replication defective retrovirus that induces a |
| | mixed erythroid/myeloid leukemia in chickens. E26 virus carries two distinct |
| | oncogenes, v-myb and v-ets. The ets portion of this oncogene is required for the |
| | induction of erythroblastosis. V-ets and c-ets-1, its cellular progenitor, have been |
| | shown to be nuclear DNA-binding proteins. |
| Fork_head | About 100 amino-acid residues, also known as the “winged helix” - present in |
| | some eukaryotic trasncription factors - involved in DNA-binding. |
| | Examples: Drosophila forkhead (fkh), mammalian transcriptional activators |
| | HNF-3-alpha, -beta, and -gamma, human HTLF, Xenopus XFKH1, yeast |
| | HCM1, yeast FKH1. |
| GATA | GATA family of transcription factors are proteins that bind to DNA sites with |
| | the consensus sequence (A/T)GATA(A/G). |
| | Contain a pair of highly similar ‘zinc finger’ type domains. |
| | Examples: GATA 1-4 are TF found in mammals; they regulate development in |
| | certain cell types by binding to the GATA promoter region of globulin genes, & |
| | others. |
| | Note: A similar single ‘zinc finger’ domain protein is involved in positive and |
| | negative nitrogen metabolism gene regulation in fungus and yeast and also |
| | Neurospora crassa light regulated genes. |
| Gld | A domain with limited amino acid similarity to the TEA DNA binding domain |
| | found in a number of regulatory genes from fungi, insects, and mammals. This |
| | domain is predicted to form two alpha helices with sequence similarity to two |
| | alpha helices of the TEA domain that are implicated in DNA binding. These |
| | proteins are not picked up by Pfam's TEA model. Found in some response_reg |
| | proteins. |
| | Examples: ARR, AT1; both in Arabidopsis. Golden2 in maize. |
| HhH | Helix-hairpin-helix motif - multiple domains found in a protein. |
| | These HhH motifs bind DNA in a non-sequence-specific manner. |
| | Examples: Rat pol beta, endonuclease III, AlkA, & the 5′ nuclease domain of |
| | Taq pol I. |
| Hist_deacetyl | Regulation of transcription is caused in part by reversibly acetylating histones on |
| | several lysine residues. Histone deacetylases catalyze the removal of the acetyl |
| | group. |
| HLH | Helix-loop-helix domain - 40 to 50 amino acid residues. |
| | Two amphipathic helices joined by a variable length linker region that could |
| | form a loop. This ‘helix-loop-helix’ (HLH) domain mediates protein dimerization -- |
| | most of these proteins have an extra basic region of about 15 amino acid |
| | residues adjacent to the HLH domain which specifically binds to DNA - |
| | members of the family are referred to as basic helix-loop-helix proteins (bHLH) -- |
| | bind E boxes -- dimerization is necessary but independent of DNA binding -- |
| | proteins without basic region act as repressors since they are unable to bind DNA |
| | but do dimerize. |
| | Examples: Myc (oncogene), Myo (muscle differentiation), Maize anthocyanin |
| | regulatory proteins, and other cellular differentiation TFs. |
| HMG_box | High mobility group; relatively low molecular weight non-histone components in |
| | chromatin |
| | Known to bind to nucleosomes in active chromatin - thought to be invovled in |
| | chromatin formation. |
| HMG14_17 | High mobility group. |
| | HMG14 and HMG17 are two related proteins of about 100 amino acid residues |
| | that bind to the inner side of the nucleosomal DNA thus altering the interaction |
| | between the DNA and the histone octamer. These two proteins may be involved |
| | in the process that maintains transcribable genes in a unique chromatin |
| | conformation. |
| Homeobox | Master control homeotic genes which determine body plan -- 60-residue motif - |
| | subfamilies named for 3 Drosophila gene families. |
| | Play an important role in development - most are known to be sequence-specific |
| | DNA-binding transcription factors. The domain binds DNA through a helix- |
| | turn-helix (HTH) structure. -- Homeobox is a 3-element fingerprint that provides |
| | a signature for the homeobox domain of homeotic proteins. |
| | Examples: Drosophila hox proteins: antennapedia (Antp), abdominal-A (abd-A), |
| | deformed (Dfd), proboscipedia (pb), sex combs reduced (scr), and ultrabithorax |
| | (ubx) which are collectively known as the ‘antennapedia’ subfamily; the |
| | engrailed subfamily defined by engrailed (en) which specifies the body |
| | segmentation pattern and is required for the development of the CNS; and the |
| | paired gene subfamily. |
| Histone | Histone protein is unique to eukaryotes -- an octamer is assembled to form |
| | chromatin with 146 base pairs of DNA organized into a superhelix around a |
| | histone octomer to create a nucleosome (‘beads on a string’). |
| | Examples: H2A, H2B, H3, & H4. |
| HSF_DNA- | Heat shock factor (HSF) is a DNA-binding protein that specifically binds heat |
| binding | shock promoter elements (HSE). |
| | HSF is expressed at normal temperatures but is activated by heat shock or |
| | chemical stresses. |
| IAA | The Aux/IAA proteins were identified as a class of short-lived, nuclear localized |
| | proteins that are rapidly transcriptionally induced in response to auxin. These |
| | proteins contain four highly conserved domains (boxes I, II, III, IV)- this model |
| | covers boxes III and IV. See ARF family in this document for related proteins. |
| IBR | The IBR (In Between Ring fingers) domain is found to occur between pairs of |
| | ring fingers (Zf-C3HC4). The function of this domain is unknown. |
| irf | This family of transcription factors are important in the regulation of interferons |
| | in response to infection by virus and in the regulation of interferon-inducible |
| | genes. Three of the five conserved tryptophan residues bind to DNA. |
| K-box | K-box region is commonly found associated with SRF-type transcription factors. |
| | The K-box is a possible coiled-coil structure. Possible role in multimer |
| | formation. |
| | Examples: PISTILLATA (PI) gene of Arabidopsis causes homeotic conversion |
| | of petals to sepals and of stamens to carpels & SRF (Serum response factor) |
| | binds the serum response element. |
| KRAB | The KRAB domain (or Kruppel-associated box) is present in about a third of |
| | zinc finger proteins containing C2H2 fingers. The KRAB domain is found to be |
| | involved in protein-protein interactions. |
| LIM | Cysteine-rich domain of about 60 amino-acid residues. |
| | Generally occurs as two tandem copies in proteins - in the LIM domain, there |
| | are seven conserved cysteine residues and a histidine -- the LIM domain binds |
| | two zinc ions -- LIM does not bind DNA, rather it seems to act as interface for |
| | protein-protein interaction. |
| | Examples: Pollen specific protein (SF3), Mammallian zinc absorption protein, |
| | Vertebrate paxillin (cytoskeletal focal adhesion protein), Plaque adhesion |
| | protein, and several homeotic proteins. |
| Linker_histone | Member of histone octamer - see histone. |
| | Examples: H1, H5 |
| MADS | See SRF-TF |
| Myb_DNA- | This family contains the DNA-binding domains from the Myb proteins, as well |
| binding | as the SANT domain family. |
| | Retroviral oncogene v-myb, and its cellular counterpart c-myb, encode nuclear |
| | DNA-binding proteins that specifically recognize the sequence YAAC(G/T)G. |
| | Examples: Maize C1 protein (anthocyanin biosynthesis), Maize P protein |
| | (regulates the biosynthetic pathway of a flavonoid-derived pigment in certain |
| | floral tissues), Arabidopsis GL1 (required for the initiation of differentiation of |
| | leaf hair cells/trichomes), Yeast txn & telomere length proteins. |
| Myc N Term | Myc amino-terminal region. |
| | The myc family belongs to the basic helix-loop-helix leucine zipper class of |
| | transcription factors. |
| | Myc forms a heterodimer with Max, and this complex regulates cell growth |
| | through direct activation of genes involved in cell replication. c-Myc can also |
| | repress the transcription of specific genes. |
| NAM | The NAM (no apical meristem) family is a group of transcription factors that |
| | share a highly conserved N-terminal domain of about 150 amino acids, |
| | designated the NAC domain (NAC stands for Petunia, NAM, and Arabidopsis, |
| | ATAF1, ATAF2 and CUC2). Present in monocots and dicots. Probably have |
| | roles in the regulation of embryo and flower development. Plant specific. |
| NAP_FAMILY | Nucleosome assembly protein (NAP) -- histone chaperone. |
| | May be involved in regulating gene expression as a result of histone |
| | accessibility. |
| | NAP-2 (human NAP clone) can interact with both core and linker histones and |
| | recombinant NAP-2 can transfer histones onto naked DNA templates. |
| P53 | The p53 tumor antigen is a protein found in increased amounts in a wide variety |
| | of transformed cells. p53 is probably involved in cell cycle regulation, and may |
| | be a trans-activator that acts to negatively regulate cellular division by |
| | controlling a set of genes required for this process. |
| Pax | “paired box” domain -- a 124 amino-acid conserved domain -- generally located |
| | in the N-terminal section of the proteins -- function of this conserved domain is |
| | not yet known. In some of the pax proteins, there is a homeobox domain |
| | upstream of the paired box. |
| | Examples: Drosophila segmentation pair-rule class protein paired (prd), |
| | Drosophila proteins Pox-meso and Pox-neuro, the PAX proteins. |
| PHD | Zinc finger-like motif. |
| | Regulate the expression of the homeotic genes through a mechanism thought to |
| | involve some aspect of chromatin structure. |
| | Speculate that the PHD-fingers are protein-protein interaction domains or that |
| | they recognize a family of related targets in the nucleus such as the nucleosomal |
| | histone tails. |
| POU | ‘POU’ (pronounced ‘pow’) domain -- a 70 to 75 amino-acid region found |
| | upstream of a homeobox domain in some eukaryotic transcription factors. It is |
| | thought to confer high-affinity site-specific DNA-binding and to mediate |
| | cooperative protein-protein interaction on DNA. |
| | Examples: Oct genes (bind to immunoglobulim promoter octomer region to |
| | activate genes), Neuronal development genes, & C. elegans development genes |
| Protamine_p2 | Protamine P2 can substitute for histones in the chromatin of sperm. |
| Response_reg | This domain receives the signal from the sensor partner in bacterial two- |
| | component systems. It is usually found N-terminal to a DNA binding effector |
| | domain (e.g. GLD). |
| Rhd | Conserved domain in a family of eukaryotic transcription factors with basic |
| | impact on oncogenesis, embryonic development and differentiation including |
| | immune response and acute phase reaction -- composed of two structural |
| | domains, the N-terminal region is similar to that found in P53, whereas the C |
| | terminal region is an immunoglobulin-like fold. |
| | Examples: NF-kappa-B, RelB, Drosophila Dif. |
| Runt | New family of heteromeric TFs. |
| Scan | The SCAN domain (named after SRE-ZBP, CTfin51, AW-1 and Number 18 |
| | cDNA) is found in several zf-c2h2 proteins. This conserved domain has been |
| | shown to be able to mediate homo- and hetero-oligomerisation. |
| SCR | The Arabidopsis SCARECROW gene regulates an assymetric cell division |
| | essential for proper radial organization of root cell layers. It was tentatively |
| | described as a transcription factor based on the presence of homopolymeric |
| | stretches of several amino acids, the presence of a basic domain similar to that of |
| | the basic-leucine zipper family of transcription factors, and the presence of |
| | leucine heptad repeats. |
| | .Two SCARECROW homologs, RGA and GA1, are involved in the gibberellin |
| | signal transduction pathway. |
| SBPB | A new family of DNA binding proteins (putative transcriptional regulators) |
| | called squamosa promoter binding proteins or SBPs that potentially regulate |
| | floral transition. The SBPs possess a bipartite nuclear localization signal, a |
| | putative acidic activation domain and a so-called SBP-box DNA binding domain |
| | motif that does not show similarity to any known DNA binding motif. |
| SET | SET (Suvar3-9, Enhancer-of-zeste, & Trithorax) domains appear to be protein- |
| | protein interaction domains. |
| | It has been demonstrated that SET domains mediate interactions with a family of |
| | proteins that display similarity with dual-specificity phosphatases (dsPTPases). |
| | Link SET-domain containing components of the epigenetic regulatory machinery |
| | with signalling pathways involved in growth and differentiation. |
| | Examples: ASH1 protein contains a SET domain and a PHD finger (required for |
| | stable patterns of homeotic gene expression in Drosophila). |
| SNF2_N | SNF2 and “others” N-terminal domain. |
| | Examples: This domain is found in proteins involved in a variety of processes |
| | including transcription regulation (e.g., SNF2, STH1, brahma, MOT1), DNA |
| | repair (e.g., ERCC6, RAD16, RAD5), DNA recombination (e.g., RAD54), & |
| | chromatin unwinding (e.g., ISWI) as well as a variety of other proteins with little |
| | functional information (e.g., lodestar, ETL1). |
| SRF-TF | 56 amino-acid residues - function as dimers -- commonly homeotic proteins. |
| (MADS) | Examples: Human serum response factor (SRF), a ubiquitous nuclear protein |
| | important for cell proliferation and differentiation; homeotic proteins involved in |
| | control of floral development; yeast arginine metabolism regulation protein I, & |
| | yeast mating type specific genes. |
| Stat | STAT proteins (Signal Transducers and Activators of Transcription) are a family |
| | of transcription factors that are specifically activated to regulate gene |
| | transcription when cells encounter cytokines and growth factors. STAT proteins |
| | also include an SH2 domain. |
| TBP | Transcription factor TFIID (or TATA-binding protein, TBP). |
| | General factor that plays a major role in the activation of eukaryotic genes |
| | transcribed by RNA polymerase II - binds the TATA box -- C-terminal domain |
| | of about 180 residues contains two conserved repeats of a 77 amino-acid region. |
| | Generates a saddle-shaped structure that sits astride the DNA. |
| t-box | About 170 to 190 amino acids, known as the T-box domain. |
| | First found in mouse T locus (Brachyury) protein, a transcription factor involved |
| | in mesoderm differentiation. |
| | Essential in tissue specification, morphogenesis and organogenesis |
| Tea | A DNA-binding region of about 66 to 68 amino acids which has been found in |
| | the N-terminal section of several regulatory proteins. |
| | Examples: Mammalian enhancer factor TEF-1, Drosophila scalloped protein |
| | (gene sd), Emericella nidulans regulatory protein abaA, yeast trans-acting factor |
| | TEC1, C. elegans hypothetical protein F28B12.2. |
| TEO | The founding members of this gene family are teosinte-branched1 of maize and |
| | cycloidea of Antirrhinum (snapdragon), both of which are involved in the control |
| | of plant form and structure. They have limited similarity to the rice DNA binding |
| | proteins PCF1 and PCF2. All share a predicted basic-helix-loop-helix domain, |
| | TCP, which has been shown to be required for DNA binding of PCF1 and PCF2. |
| TFIIS | Transcription factor S-II (TFIIS). |
| | Necessary for efficient RNA polymerase II transcription elongation, past |
| | template-encoded pause sites. TFIIS shows DNA-binding activity only in the |
| | presence of RNA polymerase II. Contains four cysteines that bind a zinc ion and |
| | fold in a conformation termed a ‘zinc ribbon’. |
| | Examples: also includes the eukaryotic and archebacterial RNA polymerase |
| | subunits of the 15 Kd/M family, African swine fever virus protein I243L, & |
| | Vaccinia virus RNA polymerase. |
| Trihelix | Plant specific domain involved in light response -- plant specific; not in Pfam. |
| Transcript_fac2 | Transcription factor TFIIB repeat. |
| WRKY | ~50-60 aa domain. Often repeated within a WRKY protein, but it may also be |
| | present as a single copy. WRKY proteins contain several general features typical |
| | of transcription factors, like putative nuclear localization signals and |
| | transcription activation domains. Founding members are ABF1 and ABF2 |
| | proteins. May be involved in regulation of sporamin and alpha-amy genes. May |
| | also play a role in the signal transduction pathway that leads to pathogenesis- |
| | related (PR) gene activation in response to pathogens. |
| ZF-B box | B-box zinc finger. |
| ZF-C2H2 | The first zinc finger class to be characterized -- the first pair of zinc coordinating |
| | residues are cysteines, while the second pair are histidines. A number of |
| | experimental reports have demonstrated the zinc-dependent DNA or RNA |
| | binding property of some members of this class. |
| | Examples: Mammalian transcription factors Sp1-4, Xenopus transcription factor |
| | TFIIIA, & Drosophila Hunchback and Kruppel |
| Zf-C3HC4 | Conserved cysteine-rich domain of 40 to 60 residues (called C3HC4 zinc-finger |
| | or ‘RING’ finger) that binds two atoms of zinc, and is probably involved in |
| | mediating protein-protein interactions. |
| ZF-C4 | Conserved cysteine-rich DNA-binding region of some 65 residues. |
| | Almost always the DNA-binding domain of a nuclear hormone receptor. |
| | Receptors for steroid, thyroid, and retinoid hormones belong to a family of |
| | nuclear trans-acting transcriptional regulatory factors. |
| | These proteins regulate diverse biological processes such as pattern formation, |
| | cellular differentiation and homeostasis. |
| ZF-CCCH | Zinc finger |
| ZF-CCHC | A family of CCHC zinc fingers, mostly from retroviral gag proteins |
| | (nucleocapsid). Prototype structure is from HIV. Also contains members |
| | involved in eukaryotic gene regulation, such as C. elegans GLH-1. Structure is |
| | an 18-residue zinc finger. |
| ZF-CHC2 | CHC2 zinc finger |
| ZF- | CONSTANS family zinc finger. |
| CONSTANS | So far only reported in plants. |
| | CONSTANS (CO) gene of Arabidopsis promotes flowering. |
| | Some transgenic plants containing extra copies of CO flowered earlier than wild |
| | type, suggesting that CO activity is limiting on flowering time. Double mutants |
| | were constructed containing CO and mutations affecting gibberellic acid |
| | responses, meristem identity, or phytochrome function, and their phenotypes |
| | suggested a model for the role of CO in promoting flowering. |
| Zf-C2HC | A DNA-binding zinc finger domain. |
| | Examples: human myelin transcription factor (Myt), C. elegans hypothetical |
| | protein F52F12.6, |
| ZF-MYND | DNA-binding domain found in Drosophila DEAF-1 protein which binds to a |
| | 120 bp homeotic response element. |
| ZN_CLUS | A cysteine-rich region that binds DNA in a zinc-dependent fashion. Found in |
| | fungal transcriptional activator proteins. It has been shown that this region |
| | forms a binuclear zinc cluster where six conserved cysteines bind two zinc |
| | cations. |
| ZZ | New putative zinc finger in dystrophin and other proteins. Binds calmodulin. |
| | DNA-binding not yet shown. |
| ZF-NF-X1 | Cysteine-rich sequence-specific DNA-binding protein. |
| | Interacts with the conserved X-box motif of the human major histocompatibility |
| | complex class II genes via a repeated Cys-His domain and functions as a |
| | transcriptional repressor. |

### (a) Nucleic Acid Molecules

[0033] Agents of the present invention include Arabidopsis thaliana nucleic acid molecules. Fragment nucleic acid molecules may comprise significant portion(s) of, or indeed most of, these nucleic acid molecules. For example, a fragment nucleic acid molecule can encode an Arabidopsis thaliana protein or fragment thereof. Alternatively, the fragments may comprise smaller oligonucleotides (having from about 15 to about 400 nucleotide residues, and more preferably, about 15 to about 30 nucleotide residues, or about 50 to about 100 nucleotide residues, or about 100 to about 200 nucleotide residues, or about 200 to about 400 nucleotide residues, or about 275 to about 350 nucleotide residues).

[0034] A fragment of one or more of the nucleic acid molecules of the invention may be a probe and specifically a PCR probe. A PCR probe is a nucleic acid molecule capable of initiating a polymerase activity while in a double-stranded structure with another nucleic acid. Various methods for determining the structure of PCR probes and PCR techniques exist in the art. Computer generated searches using programs such as Primer3 (Whitehead Institute for Biomedical Research, Cambridge, Mass.), STSPipeline (Whitehead Institute for Biomedical Research, Cambridge, Mass.), or GeneUp (Pesole et al., BioTechniques 25:112-123 (1998)), for example, can be used to identify potential PCR primers.

[0035] A particularly preferred embodiment of the nucleic acid molecules of the present invention are plant nucleic acid molecules that comprise a nucleic acid sequence which encodes an Arabidopsis thaliana transcription factor from one of the categories of transcription factors in Table 1 or fragment thereof, more preferably a nucleic acid molecule comprising a nucleic acid selected from the group consisting of SEQ ID NOS: 1454-2906 or a nucleic acid molecule comprising a nucleic acid sequence which encodes a transcription factor from one of the categories of transcription factors in Table 1 or fragment thereof comprising an amino acid selected from the group consisting of SEQ ID NOS: 1-1453.

[0036] Nucleic acid molecules or fragments thereof of the present invention are capable of specifically hybridizing to other nucleic acid molecules under certain circumstances. Nucleic acid molecules of the present invention include those that specifically hybridize to nucleic acid molecules having a nucleic acid sequence selected from the group consisting of SEQ ID NOS: 1454-2906 or complements thereof.

[0037] As used herein, two nucleic acid molecules are said to be capable of specifically hybridizing to one another if the two molecules are capable of forming an anti-parallel, double-stranded nucleic acid structure.

[0038] A nucleic acid molecule is said to be the “complement” of another nucleic acid molecule if they exhibit complete complementarity. As used herein, molecules are said to exhibit “complete complementarity” when every nucleotide of one of the molecules is complementary to a nucleotide of the other. Two molecules are said to be “minimally complementary” if they can hybridize to one another with sufficient stability to permit them to remain annealed to one another under at least conventional “low-stringency” conditions. Similarly, the molecules are said to be “complementary” if they can hybridize to one another with sufficient stability to permit them to remain annealed to one another under conventional “high-stringency” conditions. Conventional stringency conditions are described by Sambrook et al., Molecular Cloning, A Laboratory Manual, 2nd Ed., Cold Spring Harbor Press, Cold Spring Harbor, N.Y. (1989) and by Haymes et al., Nucleic Acid Hybridization, A Practical Approach, IRL Press, Washington, D.C. (1985). Departures from complete complementarity are therefore permissible, as long as such departures do not completely preclude the capacity of the molecules to form a double-stranded structure. Thus, in order for a nucleic acid molecule to serve as a primer or probe it need only be sufficiently complementary in sequence to be able to form a stable double-stranded structure under the particular solvent and salt concentrations employed.

[0039] Appropriate stringency conditions which promote DNA hybridization, for example, 6.0× sodium chloride/sodium citrate (SSC) at about 45° C., followed by a wash of 2.0×SSC at 50° C., are known to those skilled in the art or can be found in Current Protocols in Molecular Biology, John Wiley & Sons, N.Y. (1989), 6.3.1-6.3.6. For example, the salt concentration in the wash step can be selected from a low stringency of about 2.0×SSC at 50° C. to a high stringency of about 0.2×SSC at 50° C. In addition, the temperature in the wash step can be increased from low stringency conditions at room temperature, about 22° C., to high stringency conditions at about 65° C. Both temperature and salt may be varied, or either the temperature or the salt concentration may be held constant while the other variable is changed.

[0040] In a preferred embodiment, a nucleic acid of the present invention will specifically hybridize to one or more of the nucleic acid molecules set forth in SEQ ID NOS: 1454-2906 or complements thereof under moderately stringent conditions, for example at about 2.0×SSC and about 65° C.

[0041] In a particularly preferred embodiment, a nucleic acid of the present invention will include those nucleic acid molecules that specifically hybridize to one or more of the nucleic acid molecules set forth in SEQ ID NOS: 1454-2906 or complements thereof under high stringency conditions such as 0.2×SSC and about 65° C.

[0042] In one aspect of the present invention, the nucleic acid molecules of the present invention have one or more of the nucleic acid sequences set forth in SEQ ID NOS: 1454-2906 or complements thereof. In another aspect of the present invention; one or more of the nucleic acid molecules of the present invention share between 100% and 90% sequence identity with one or more of the nucleic acid sequences set forth in SEQ ID NOS: 1454-2906 or complements thereof. In a further aspect of the present invention, one or more of the nucleic acid molecules of the present invention share between 100% and 95% sequence identity with one or more of the nucleic acid sequences set forth in SEQ ID NOS: 1454-2906 or complements thereof. In a more preferred aspect of the present invention, one or more of the nucleic acid molecules of the present invention share between 100% and 98% sequence identity with one or more of the nucleic acid sequences set forth in SEQ ID NOS: 1454-2906 or complements thereof. In an even more preferred aspect of the present invention, one or more of the nucleic acid molecules of the present invention share between 100% and 99% sequence identity with one or more of the sequences set forth in SEQ ID NOS: 1454-2906 or complements thereof.

[0043] As used herein “sequence identity” refers to the extent to which two optimally aligned polynucleotide or peptide sequences are invariant throughout the alignment of nucleotides or amino acids. An “identity fraction” for aligned segments of a test sequence and a reference sequence is the number of identical nucleotides or amino acid residues, which are shared by the two aligned sequences divided by the length of the alignment. “Percent identity” is the identity fraction ×100.

[0044] Useful methods for determining sequence identity are disclosed in Guide to Huge Computers, Martin J. Bishop, ed., Academic Press, San Diego, (1994). More particularly, preferred computer programs for determining sequence identity include the Basic Local Alignment Search Tool (BLAST) programs which are publicly available from National Center Biotechnology Information (NCBI) at the National Library of Medicine, National Institute of Health, Bethesda, Md. 20894; see BLAST Manual, Altschul et al., NCBI, NLM, NIH; Altschul et al., J. Mol. Biol. 215:403-410 (1990). Version 2.0 or higher of BLAST programs allows the introduction of gaps (deletions and insertions) into alignments.

[0045] Nucleic acid molecules of the present invention also include homologues. Particularly preferred homologues are from maize, soy, and rice. Homologues may also be obtained from other plant sources, particularly crop plants such as alfalfa, barley, Brassica, broccoli, cabbage, citrus, cotton, garlic, oat, oilseed rape, onion, canola, flax, an ornamental plant, peanut, pepper, potato, rye, sorghum, strawberry, sugarcane, sugarbeet, tomato, wheat, poplar, pine, fir, eucalyptus, apple, lettuce, lentils, grape, banana, tea, turf grasses, sunflower, and Phaseolus.

[0046] In a preferred embodiment, nucleic acid molecules having SEQ ID NOS: 1454-2906 or complements thereof and fragments of either can be utilized to obtain such homologues.

### (b) Nucleic Acid Molecules Encoding Proteins or Fragments Thereof

[0047] Nucleic acid molecules of the present invention can comprise sequences that encode a transcription factor or fragment thereof. Such transcription factors or fragments thereof include homologues of known transcription factors in other organisms.

[0048] In a preferred embodiment of the present invention, an Arabidopsis thaliana transcription factor or fragment thereof of the present invention is a homologue of another plant transcription factor.

[0049] In another preferred embodiment of the present invention, an Arabidopsis thaliana transcription factor or fragment thereof of the present invention is a homologue of a Zea mays transcription factor.

[0050] In another preferred embodiment of the present invention, an Arabidopsis thaliana transcription factor homologue or fragment thereof of the present invention is a homologue of a Glycine max transcription factor.

[0051] In another preferred embodiment of the present invention, an Arabidopsis thaliana transcription factor homologue or fragment thereof of the present invention is a homologue of an Oryza sativa transcription factor.

[0052] In a preferred embodiment of the present invention, the nucleic molecule of the present invention encodes an Arabidopsis thaliana transcription factor or fragment thereof where an Arabidopsis thaliana transcription factor exhibits a BLAST E value score of less than 1E-08 using default parameters with BLAST version 2.0, preferably a BLAST E value score of between about 1E-30 and about 1E-08 using default parameters with BLAST version 2.0, even more preferably a BLAST probability E value score of less than 1E-30 with its homologue using default parameters with BLAST version 2.0.

[0053] In another preferred embodiment of the present invention, the nucleic acid molecule encoding an Arabidopsis thaliana transcription factor or fragment thereof exhibits an E value score with a profile HMM using HMMER software version 2.1.1 with default parameters derived from a transcription factor family of less than 1E1.

[0054] In a preferred embodiment of the present invention, the nucleic acid molecule of the present invention encodes an Arabidopsis thaliana transcription factor or fragment thereof where an Arabidopsis thaliana transcription factor exhibits a probability score using a Framealign search using Gencore software version 4.5.4 (Compugen Inc., Richmond Hill, Ontario, Canada) of less than 1E-3 using default parameters.

[0055] In a preferred embodiment, nucleic acid molecules having SEQ ID NOS: 1454-2906 or complements and fragments of either can be utilized to obtain homologues. Such homologues will preferably be obtained from crop plant species, including soy (Glycine max), maize (Zea mays) and rice (Oryza sativa), and will exhibit BLAST, HMMER or Framealign probability scores as defined above.

[0056] In another further aspect of the present invention, nucleic acid molecules of the present invention can comprise sequences, which differ from those encoding a protein or fragment thereof in SEQ ID NOS: 1-1453 due to the fact that the different nucleic acid sequence encodes a protein having one or more conservative amino acid changes. It is understood that codons capable of coding for such conservative amino acid substitutions are known in the art.

[0057] It is well known in the art that one or more amino acids in a native sequence can be substituted with another amino acid(s), the charge and polarity of which are similar to that of the native amino acid, i.e., a conservative amino acid substitution, resulting in a silent change. Conserved substitutes for an amino acid within the native polypeptide sequence can be selected from other members of the class to which the naturally occurring amino acid belongs. Amino acids can be divided into the following four groups: (1) acidic amino acids, (2) basic amino acids, (3) neutral polar amino acids, and (4) neutral nonpolar amino acids. Representative amino acids within these various groups include, but are not limited to, (1) acidic (negatively charged) amino acids such as aspartic acid and glutamic acid; (2) basic (positively charged) amino acids such as arginine, histidine, and lysine; (3) neutral polar amino acids such as glycine, serine, threonine, cysteine, cystine, tyrosine, asparagine, and glutamine; and (4) neutral nonpolar (hydrophobic) amino acids such as alanine, leucine, isoleucine, valine, proline, phenylalanine, tryptophan, and methionine.

[0058] Conservative amino acid changes within the native polypeptide sequence can be made by substituting one amino acid within one of these groups with another amino acid within the same group. Biologically functional equivalents of the proteins or fragments thereof of the present invention can have ten or fewer conservative amino acid changes, more preferably seven or fewer conservative amino acid changes, and most preferably five or fewer conservative amino acid changes. The encoding nucleotide sequence will thus have corresponding base substitutions, permitting it to encode biologically functional equivalent forms of the proteins or fragments of the present invention.

[0059] It is understood that certain amino acids may be substituted for other amino acids in a protein structure without appreciable loss of interactive binding capacity with structures such as, for example, antigen-binding regions of antibodies or binding sites on substrate molecules. Because it is the interactive capacity and nature of a protein that defines that protein's biological functional activity, certain amino acid sequence substitutions can be made in a protein sequence and, of course, its underlying DNA coding sequence and, nevertheless, maintain a protein with like properties. It is thus contemplated by the inventors that various changes may be made in the peptide sequences of the proteins or fragments of the present invention, or corresponding DNA sequences that encode said peptides, without appreciable loss of their biological utility or activity. It is understood that codons capable of coding for such amino acid changes are known in the art.

[0060] In making such changes, the hydropathic index of amino acids may be considered. The importance of the hydropathic amino acid index in conferring interactive biological function on a protein is generally understood in the art (Kyte and Doolittle, J. Mol. Biol. 157, 105-132 (1982)). It is accepted that the relative hydropathic character of the amino acid contributes to the secondary structure of the resultant protein, which in turn defines the interaction of the protein with other molecules, for example, enzymes, substrates, receptors, DNA, antibodies, antigens, and the like.

[0061] Each amino acid has been assigned a hydropathic index on the basis of its hydrophobicity and charge characteristics (Kyte and Doolittle, J. Mol. Biol. 157, 105-132 (1982)); these are isoleucine (+4.5), valine (+4.2), leucine (+3.8), phenylalanine (+2.8), cysteine/cystine (+2.5), methionine (+1.9), alanine (+1.8), glycine (−0.4), threonine (−0.7), serine (−0.8), tryptophan (−0.9), tyrosine (−1.3), proline (−1.6), histidine (−3.2), glutamate (−3.5), glutamine (−3.5), aspartate (−3.5), asparagine (−3.5), lysine (−3.9), and arginine (−4.5).

[0062] In making such changes, the substitution of amino acids whose hydropathic indices are within ±2 is preferred, those that are within ±1 are particularly preferred, and those within ±0.5 are even more particularly preferred.

[0063] It is also understood in the art that the substitution of like amino acids can be made effectively on the basis of hydrophilicity. U.S. Pat. No. 4,554,101 states that the greatest local average hydrophilicity of a protein, as govern by the hydrophilicity of its adjacent amino acids, correlates with a biological property of the protein.

[0064] In a further aspect of the present invention, one or more of the nucleic acid molecules of the present invention differ in nucleic acid sequence from those encoding a protein or fragment thereof set forth in SEQ ID NOS: 1-1453 or fragment thereof due to the fact that one or more codons encoding an amino acid has been substituted for a codon that encodes a nonessential substitution of the amino acid originally encoded.

[0065] Agents of the invention include nucleic acid molecules that encode at least about a contiguous 10 amino acid region of a protein of the present invention, more preferably at least about a contiguous 25, 40, 50, 100, or 125 amino acid region of a protein of the present invention. In a preferred embodiment the protein is selected from the group consisting of a plant protein, more preferably an Arabidopsis thaliana transcription factor from the group consisting of Table 2 of U.S. application Ser. No. 10/361,942.

[0066] Agents of the present invention include nucleic acid molecules that encode an Arabidopsis thaliana transcription factor or fragment thereof and particularly substantially purified nucleic acid molecules selected from the group consisting of a SEQ ID NOS: 1454-2906.

### (c) Protein and Peptide Molecules

[0067] A preferred class of agents includes proteins or fragments thereof or peptide molecules having an amino acid sequence selected from the group consisting of SEQ ID NOS: 1-1453.

[0068] As used herein, the term “protein molecule” or “peptide molecule” includes any molecule that comprises five or more amino acids. It is well known in the art that proteins may undergo modification, including post-translational modifications, such as, but not limited to, disulfide bond formation, glycosylation, phosphorylation, or oligomerization. Thus, as used herein, the term “protein molecule” or “peptide molecule” includes any protein molecule that is modified by any biological or non-biological process. The terms “amino acid” and “amino acids” refer to all naturally occurring L-amino acids. This definition is meant to include norleucine, norvaline, ornithine, homocysteine, and homoserine.

[0069] One or more of the protein or fragment of peptide molecules may be produced via chemical synthesis, or more preferably, by expressing in a suitable bacterial or eukaryotic host. Suitable methods for expression are described by Sambrook et al., In: Molecular Cloning, A Laboratory Manual, 2nd Edition, Cold Spring Harbor Press, Cold Spring Harbor, N.Y. (1989), or similar texts.

[0070] A “protein fragment” is a peptide or polypeptide molecule whose amino acid sequence comprises a subset of the amino acid sequence of that protein. A protein or fragment thereof that comprises one or more additional peptide regions not derived from that protein is a “fusion” protein. Such molecules may be derivatized to contain carbohydrate or other moieties (such as keyhole limpet hemocyanin, etc.). Fusion protein or peptide molecules of the invention are preferably produced via recombinant means.

[0071] Another class of agents comprise protein or peptide molecules or fragments or fusions thereof comprising SEQ ID NOS: 1-1453 in which conservative, non-essential or non-relevant amino acid residues have been added, replaced or deleted. Computerized means for designing modifications in protein structure are known in the art (Dahiyat and Mayo, Science 278:82-87 (1997)).

[0072] Agents of the invention include proteins comprising at least about a contiguous 10 amino acid region more preferably comprising at least a contiguous 25, 40, 50, 75 or 125 amino acid region of a protein or fragment thereof of the present invention. In another preferred embodiment, the proteins of the present invention include a between about 10 and about 25 contiguous amino acid region, more preferably between about 20 and about 50 contiguous amino acid region and even more preferably between about 40 and about 80 contiguous amino acid region.

[0073] In a preferred embodiment the protein is selected from the group consisting of a plant, more preferably an Arabidopsis thaliana transcription factor from the group consisting of Table 2 of U.S. application Ser. No. 10/361,942. In another preferred embodiment, the protein comprises an amino acid sequence selected from the group consisting of SEQ ID NOS: 1-1453.

[0074] Protein molecules of the present invention include homologues of proteins or fragments thereof comprising a protein sequence selected from SEQ ID NOS: 1-1453 or fragment thereof or encoded by SEQ ID NOS: 1454-2906 or fragments thereof. Preferred protein molecules of the invention include homologues of proteins or fragments having an amino acid sequence selected from the group consisting of SEQ ID NOS: 1-1453 or fragment thereof. In a preferred embodiment, nucleic acid molecules having SEQ ID NOS: 1454-2906 or complements and fragments of any can be utilized to obtain such homologues.

[0075] A homologue protein may preferably be derived from corn, soy or rice, although other sources of homolgue proteins are also of interest, including, but not limited to alfalfa, barley, Brassica, broccoli, cabbage, citrus, cotton, garlic, oat, oilseed rape, onion, canola, flax, an ornamental plant, pea, peanut, pepper, potato, rye, sorghum, strawberry, sugarcane, sugarbeet, tomato, wheat, poplar, pine, fir, eucalyptus, apple, lettuce, lentils, grape, banana, tea, turf grasses, sunflower, oil palm, Phaseolus etc. Such a homologue can be obtained by any of a variety of methods. Most preferably, as indicated above, one or more of the disclosed sequences (such as SEQ ID NOS: 1454-2906 or complements thereof) will be used in defining a pair of primers to isolate the homologue-encoding nucleic acid molecules from any desired species. Such molecules can be expressed to yield protein homologues by recombinant means.

### (d) Plant Constructs and Plant Transformants

[0076] One or more of the nucleic acid molecules of the invention may be used in plant transformation or transfection. Exogenous genetic material may be transferred into a plant cell and the plant cell regenerated into a whole, fertile or sterile plant. Exogenous genetic material is any genetic material, whether naturally occurring or otherwise, from any source that is capable of being inserted into any organism. In a preferred embodiment the exogenous genetic material includes a nucleic acid molecule of the present invention, preferably a nucleic acid molecule having at least 20 nucleotides of a sequence selected from the group consisting of SEQ ID NOS: 1454-2906 and complements thereof.

[0077] Such genetic material may be transferred into either monocotyledons and dicotyledons including, but not limited to maize, rice, soy, alfalfa, barley, Brassica, broccoli, cabbage, citrus, cotton, garlic, oat, oilseed rape, onion, canola, flax, an ornamental plant, pea, peanut, pepper, potato, rye, sorghum, strawberry, sugarcane, sugarbeet, tomato, wheat, poplar, pine, fir, eucalyptus, apple, lettuce, lentils, grape, banana, tea, turf grasses, sunflower, oil palm, Phaseolus etc (Christou, In: Particle Bombardment for Genetic Engineering of plants, Biotechnology Intelligence Unit. Academic Press, San Diego, Calif. (1996)).

[0078] Transfer of a nucleic acid that encodes for a protein can result in overexpression of that protein in a transformed cell or transgenic plant. One or more of the proteins or fragments thereof encoded by nucleic acid molecules of the invention may be overexpressed in a transformed cell or transformed plant. Such overexpression may be the result of transient or stable transfer of the exogenous genetic material.

[0079] Exogenous genetic material may be transferred into a host cell by the use of a DNA vector or construct designed for such a purpose. Design of such a vector is generally within the skill of the art (See, Plant Molecular Biology: A Laboratory Manual, Clark (ed.), Springier, N.Y. (1997)).

[0080] A construct or vector may include a plant promoter to express the protein or protein fragment of choice. A number of promoters, which are active in plant cells, have been described in the literature. These include the nopaline synthase (NOS) promoter (Ebert et al., Proc. Natl. Acad. Sci. (U.S.A.) 84:5745-5749 (1987), the octopine synthase (OCS) promoter (which are carried on tumor-inducing plasmids of Agrobacterium tumefaciens), the caulimovirus promoters such as the cauliflower mosaic virus (CaMV) 19S promoter (Lawton et al., Plant Mol. Biol. 9:315-324 (1987)) and the CaMV 35S promoter (Odell et al., Nature 313:810-812 (1985)), the figwort mosaic virus 35S-promoter, the light-inducible promoter from the small subunit of ribulose-1,5-bis-phosphate carboxylase (ssRUBISCO), the Adh promoter (Walker et al., Proc. Natl. Acad. Sci. (U.S.A) 84:6624-6628 (1987)), the sucrose synthase promoter (Yang et al., Proc. Natl. Acad. Sci. (U.S.A.) 87:4144-4148 (1990)), the R gene complex promoter (Chandler et al., The Plant Cell 1:1175-1183 (1989)) and the chlorophyll a/b binding protein gene promoter, etc. These promoters have been used to create DNA constructs that have been expressed in plants; see, e.g., PCT publication WO 84/02913. The CaMV 35S promoters are preferred for use in plants. Promoters known or found to cause transcription of DNA in plant cells can be used in the invention.

[0081] For the purpose of expression in source tissues of the plant, such as the leaf, seed, root or stem, it is preferred that the promoters utilized have relatively high expression in these specific tissues. Tissue-specific expression of a protein of the present invention is a particularly preferred embodiment. For this purpose, one may choose from a number of promoters for genes with tissue- or cell-specific or -enhanced expression. Examples of such promoters reported in the literature include the chloroplast glutamine synthetase GS2 promoter from pea (Edwards et al., Proc. Natl. Acad. Sci. (U.S.A.) 87:3459-3463 (1990)), the chloroplast fructose-1,6-biphosphatase (FBPase) promoter from wheat (Lloyd et al., Mol. Gen. Genet. 225:209-216 (1991)), the nuclear photosynthetic ST-LS1 promoter from potato (Stockhaus et al., EMBO J. 8:2445-2451 (1989)), the serine/threonine kinase (PAL) promoter and the glucoamylase (CHS) promoter from Arabidopsis thaliana. Also reported to be active in photosynthetically active tissues are the ribulose-1,5-bisphosphate carboxylase (RbcS) promoter from eastern larch (Larix laricina), the promoter for the cab gene, cab6, from pine (Yamamoto et al., Plant Cell Physiol. 35:773-778 (1994)), the promoter for the Cab-1 gene from wheat (Fejes et al., Plant Mol. Biol. 15:921-932 (1990)), the promoter for the CAB-1 gene from spinach (Lubberstedt et al., Plant Physiol. 104:997-1006 (1994)), the promoter for the cab1R gene from Oryza sativa (Luan et al., Plant Cell. 4:971-981 (1992)), the pyruvate, orthophosphate dikinase (PPDK) promoter from Zea mays (Matsuoka et al., Proc. Natl. Acad. Sci. (U.S.A.) 90: 9586-9590 (1993)), the promoter for the tobacco Lhcb1*2 gene (Cerdan et al., Plant Mol. Biol. 33:245-255 (1997)), the Arabidopsis thaliana SUC2 sucrose-H+ symporter promoter (Truernit et al., Planta. 196:564-570 (1995)) and the promoter for the thylakoid membrane proteins from spinach (psaD, psaF, psaE, PC, FNR, atpC, atpD, cab, rbcS). Other promoters for the chlorophyll a/b-binding proteins may also be utilized in the invention, such as the promoters for LhcB gene and PsbP gene from white mustard (Sinapis alba; Kretsch et al., Plant Mol. Biol. 28:219-229 (1995)).

[0082] For the purpose of expression in sink tissues of the plant, such as the tuber of the potato plant, the fruit of tomato, or the seed of Zea mays, wheat, Oryza sativa and barley, it is preferred that the promoters utilized in the invention have relatively high expression in these specific tissues. A number of promoters for genes with tuber-specific or -enhanced expression are known, including the class I patatin promoter (Bevan et al., EMBO J. 8:1899-1906 (1986); Jefferson et al., Plant Mol. Biol. 14:995-1006 (1990), the promoter for the potato tuber ADPGPP genes, both the large and small subunits, the sucrose synthase promoter (Salanoubat and Belliard, Gene 60:47-56 (1987)), Salanoubat and Belliard, Gene 84:181-185 (1989), the promoter for the major tuber proteins including the 22 kd protein complexes and proteinase inhibitors (Hannapel, Plant Physiol. 101:703-704 (1993), the promoter for the granule bound starch synthase gene (GBSS) (Visser et al., Plant Mol. Biol. 17:691-699 (1991)) and other class I and II patatins promoters (Koster-Topfer et al., Mol Gen Genet. 219:390-396 (1989); Mignery et al., Gene. 62:27-44 (1988)).

[0083] Other promoters can also be used to express a protein or fragment thereof in specific tissues, such as seeds or fruits. The promoter for β-conglycinin (Chen et al., Dev. Genet. 10: 112-122 (1989)) or other seed-specific promoters such as the napin and phaseolin promoters can be used. The zeins are a group of storage proteins found in Zea mays endosperm. Genomic clones for zein genes have been isolated (Pedersen et al., Cell 29:1015-1026 (1982)) and the promoters from these clones, including the 15 kD, 16 kD, 19 kD, 22 kD, 27 kD and genes, could also be used. Other promoters known to function, for example, in Zea mays include the promoters for the following genes: waxy, Brittle, Shrunken 2, Branching enzymes I and II, starch synthases, debranching enzymes, oleosins, glutelins and sucrose synthases. A particularly preferred promoter for Zea mays endosperm expression is the promoter for the glutelin gene from Oryza sativa, more particularly the Osgt-1 promoter (Zheng et al., Mol. Cell Biol. 13:5829-5842 (1993)). Examples of promoters suitable for expression in wheat include those promoters for the ADPglucose pyrosynthase (ADPGPP) subunits, the granule bound and other starch synthase, the branching and debranching enzymes, the embryogenesis-abundant proteins, the gliadins and the glutenins. Examples of such promoters in Oryza sativa include those promoters for the ADPGPP subunits, the granule bound and other starch synthase, the branching enzymes, the debranching enzymes, sucrose synthases and the glutelins. A particularly preferred promoter is the promoter for Oryza sativa glutelin, Osgt-1. Examples of such promoters for barley include those for the ADPGPP subunits, the granule bound and other starch synthase, the branching enzymes, the debranching enzymes, sucrose synthases, the hordeins, the embryo globulins and the aleurone specific proteins.

[0084] Root specific promoters may also be used. An example of such a promoter is the promoter for the acid chitinase gene (Samac et al., Plant Mol. Biol. 25:587-596 (1994)). Expression in root tissue could also be accomplished by utilizing the root specific subdomains of the CaMV35S promoter that have been identified (Lam et al., Proc. Natl. Acad. Sci. (U.S.A) 86:7890-7894 (1989)). Other root cell specific promoters include those reported by Conkling et al. (Conkling et al., Plant Physiol. 93:1203-1211 (1990)).

[0085] Additional promoters that may be utilized are described, for example, in U.S. Pat. Nos. 5,378,619; 5,391,725; 5,428,147; 5,447,858; 5,608,144; 5,608,144; 5,614,399; 5,633,441; 5,633,435; and 4,633,436. In addition, a tissue specific enhancer may be used (Fromm et al., The Plant Cell 1:977-984 (1989)).

[0086] Constructs or vectors may also include, with the coding region of interest, a nucleic acid sequence that acts, in whole or in part, to terminate transcription of that region. A number of such sequences have been isolated, including the Tr7 3′ sequence and the NOS 3′ sequence (Ingelbrecht et al., The Plant Cell 1:671-680 (1989); Bevan et al., Nucleic Acids Res. 11:369-385 (1983))

[0087] A vector or construct may also include regulatory elements. Examples of such include the Adh intron 1 (Callis et al., Genes and Develop. 1:1183-1200 (1987)), the sucrose synthase intron (Vasil et al., Plant Physiol. 91:1575-1579 (1989)) and the TMV omega element (Gallie et al., The Plant Cell 1:301-311 (1989)). These and other regulatory elements may be included when appropriate.

[0088] A vector or construct may also include a selectable marker. Selectable markers may also be used to select for plants or plant cells that contain the exogenous genetic material. Examples of such include, but are not limited to: a neomycin phosphotransferase gene (U.S. Pat. No. 5,034,322), which codes for kanamycin resistance and can be selected for using kanamycin, G418, etc.; a bar gene which codes for bialaphos resistance; genes which encode glyphosate resistance (U.S. Pat. Nos. 4,940,835; 5,188,642; 4,971,908; 5,627,061); a nitrilase gene which confers resistance to bromoxynil (Stalker et al., J. Biol. Chem. 263:6310-6314 (1988)); a mutant acetolactate synthase gene (ALS) which confers imidazolinone or sulphonylurea resistance (European Patent Application 154,204 (Sep. 11, 1985)); and a methotrexate resistant DHFR gene (Thillet et al., J. Biol. Chem. 263:12500-12508 (1988)).

[0089] A vector or construct may also include DNA sequence that encodes a transit peptide. Incorporation of a suitable chloroplast transit peptide may also be employed (European Patent Application Publication Number 0218571). Translational enhancers may also be incorporated as part of the vector DNA. DNA constructs could contain one or more 5′ non-translated leader sequences that may serve to enhance expression of the gene products from the resulting mRNA transcripts. Such sequences may be derived from the promoter selected to express the gene or can be specifically modified to increase translation of the mRNA. Such regions may also be obtained from viral RNAs, from suitable eukaryotic genes, or from a synthetic gene sequence. For a review of optimizing expression of transgenes, see Koziel et al., Plant Mol. Biol. 32:393-405 (1996).

[0090] A vector or construct may also include a screenable marker. Screenable markers may be used to monitor expression. Exemplary screenable markers include: a β-glucuronidase or uidA gene (GUS) which encodes an enzyme for which various chromogenic substrates are known (Jefferson, Plant Mol. Biol, Rep. 5:387-405 (1987); Jefferson et al., EMBO J. 6:3901-3907 (1987)); an R-locus gene, which encodes a product that regulates the production of anthocyanin pigments (red color) in plant tissues (Dellaporta et al., Stadler Symposium 11:263-282 (1988)); a β-lactamase gene (Sutcliffe et al., Proc. Natl. Acad. Sci. (U.S.A.) 75:3737-3741 (1978)), a gene which encodes an enzyme for which various chromogenic substrates are known (e.g., PADAC, a chromogenic cephalosporin); a luciferase gene (Ow et al., Science 234:856-859 (1986)); a xylE gene (Zukowsky et al., Proc. Natl. Acad. Sci. (U.S.A.) 80:1101-1105 (1983)) which encodes a catechol dioxygenase that can convert chromogenic catechols; an α-amylase gene (Ikatu et al., Bio/Technol. 8:241-242 (1990)); a tyrosinase gene (Katz et al., J. Gen. Microbiol. 129:2703-2714 (1983)) that encodes an enzyme capable of oxidizing tyrosine to DOPA and dopaquinone which in turn condenses to melanin; an α-galactosidase that will turn a chromogenic α-galactose substrate.

[0091] Included within the terms “selectable or screenable marker genes” are also genes that encode a secretable marker whose secretion can be detected as a means of identifying or selecting for transformed cells. Examples include markers that encode a secretable antigen that can be identified by antibody interaction, or even secretable enzymes that can be detected catalytically. Secretable proteins fall into a number of classes, including small, diffusible proteins which are detectable, (e.g., by ELISA), small active enzymes which are detectable in extracellular solution (e.g., α-amylase, β-lactamase, phosphinothricin transferase), or proteins which are inserted or trapped in the cell wall (such as proteins which include a leader sequence such as that found in the expression unit of extension or tobacco PR-S). Other possible selectable and/or screenable marker genes will be apparent to those of skill in the art.

[0092] There are many methods for introducing transforming nucleic acid molecules into plant cells. Suitable methods are believed to include virtually any method by which nucleic acid molecules may be introduced into a cell, such as by Agrobacterium infection or direct delivery of nucleic acid molecules such as, for example, by PEG-mediated transformation, by electroporation or by acceleration of DNA coated particles, etc (Potrykus, Ann. Rev. Plant Physiol. Plant Mol. Biol. 42:205-225 (1991); Vasil, Plant Mol. Biol. 25:925-937 (1994)). For example, electroporation has been used to transform Zea mays protoplasts (Fromm et al., Nature 312:791-793 (1986)).

[0093] Other vector systems suitable for introducing transforming DNA into a host plant cell include but are not limited to binary artificial chromosome (BIBAC) vectors (Hamilton et al., Gene 200:107-116 (1997)); and transfection with RNA viral vectors (Della-Cioppa et al., Ann. N.Y. Acad. Sci. (1996), 792 (Engineering Plants for Commercial Products and Applications), 57-61). Additional vector systems also include plant selectable YAC vectors such as those described in Mullen et al., Molecular Breeding 4:449-457 (1988)).

[0094] Technology lor introduction of DNA into cells is well known to those of skill in the art. Four general methods for delivering a gene into cells have been described: (1) chemical methods (Graham and van der Eb, Virology 54:536-539 (1973)); (2) physical methods such as microinjection (Capecchi, Cell 22:479-488 (1980)), electroporation (Wong and Neumann, Biochem. Biophys. Res. Commun. 107:584-587 (1982); Fromm et al., Proc. Natl. Acad. Sci. (U.S.A.) 82:5824-5828 (1985); U.S. Pat. No. 5,384,253); and the gene gun (Johnston and Tang, Methods Cell Biol. 43:353-365 (1994)); (3) viral vectors (Clapp, Clin. Perinatol. 20:155-168 (1993); Lu et al., J. Exp. Med. 178:2089-2096 (1993); Eglitis and Anderson, Biotechniques 6:608-614 (1988)); and (4) receptor-mediated mechanisms (Curiel et al., Hum. Gen. Ther. 3:147-154 (1992), Wagner et al., Proc. Natl. Acad. Sci. (USA) 89:6099-6103 (1992)).

[0095] Acceleration methods that may be used include, for example, microprojectile bombardment and the like. One example of a method for delivering transforming nucleic acid molecules to plant cells is microprojectile bombardment. This method has been reviewed by Yang and Christou (eds.), Particle Bombardment Technology for Gene Transfer, Oxford Press, Oxford, England (1994)). Non-biological particles (microprojectiles) may be coated with nucleic acids and delivered into cells by a propelling force. Exemplary particles include those comprised of tungsten, gold, platinum and the like.

[0096] A particular advantage of microprojectile bombardment, in addition to it being an effective means of reproducibly transforming monocots, is that neither the isolation of protoplasts (Cristou et al., Plant Physiol. 87:671-674 (1988)) nor the susceptibility of Agrobacterium infection are required. An illustrative embodiment of a method for delivering DNA into Zea mays cells by acceleration is a biolistics α-particle delivery system, which can be used to propel particles coated with DNA through a screen, such as a stainless steel or Nytex screen, onto a filter surface covered with corn cells cultured in suspension. Gordon-Kamm et al., describes the basic procedure for coating tungsten particles with DNA (Gordon-Kamm et al., Plant Cell 2:603-618 (1990)). The screen disperses the tungsten nucleic acid particles so that they are not delivered to the recipient cells in large aggregates. A particle delivery system suitable for use with the invention is the helium acceleration PDS-1000/He gun is available from Bio-Rad Laboratories (Bio-Rad, Hercules, Calif.)(Sanford et al., Technique 3:3-16 (1991)).

[0097] For the bombardment, cells in suspension may be concentrated on filters. Filters containing the cells to be bombarded are positioned at an appropriate distance below the microprojectile stopping plate. If desired, one or more screens are also positioned between the gun and the cells to be bombarded.

[0098] Alternatively, immature embryos or other target cells may be arranged on solid culture medium. The cells to be bombarded are positioned at an appropriate distance below the microprojectile stopping plate. If desired, one or more screens are also positioned between the acceleration device and the cells to be bombarded. Through the use of techniques set forth herein one may obtain up to 1000 or more foci of cells transiently expressing a screenable or selectable marker gene. The numbers of cells in a focus that express the exogenous gene product 48 hours post-bombardment often ranges from one to ten and average one to three.

[0099] In bombardment transformation, one may optimize the pre-bombardment culturing conditions and the bombardment parameters to yield the maximum numbers of stable transformants. Both the physical and biological parameters for bombardment are important in this technology. Physical factors are those that involve manipulating the DNA/microprojectile precipitate or those that affect the flight and velocity of either the macro- or microprojectiles. Biological factors include all steps involved in manipulation of cells before and immediately after bombardment, the osmotic adjustment of target cells to help alleviate the trauma associated with bombardment and also the nature of the transforming DNA, such as linearized DNA or intact supercoiled plasmids. It is believed that pre-bombardment manipulations are especially important for successful transformation of immature embryos.

[0100] In another alternative embodiment, plastids can be stably transformed. Methods disclosed for plastid transformation in higher plants include the particle gun delivery of DNA containing a selectable marker and targeting of the DNA to the plastid genome through homologous recombination (Svab et al., Proc. Natl. Acad. Sci. (U.S.A.) 87:8526-8530 (1990); Svab and Maliga, Proc. Natl. Acad. Sci. (U.S.A.) 90:913-917 (1993); Staub and Maliga, EMBO J. 12:601-606 (1993); U.S. Pat. Nos. 5,451,513 and 5,545,818).

[0101] Accordingly, it is contemplated that one may wish to adjust various aspects of the bombardment parameters in small-scale studies to fully optimize the conditions. One may particularly wish to adjust physical parameters such as gap distance, flight distance, tissue distance and helium pressure. One may also minimize the trauma reduction factors by modifying conditions which influence the physiological state of the recipient cells and which may therefore influence transformation and integration efficiencies. For example, the osmotic state, tissue hydration and the subculture stage or cell cycle of the recipient cells may be adjusted for optimum transformation. The execution of other routine adjustments will be known to those of skill in the art in light of the present disclosure.

[0102] Agrobacterium-mediated transfer is a widely applicable system for introducing genes into plant cells because the DNA can be introduced into whole plant tissues, thereby bypassing the need for regeneration of an intact plant from a protoplast. The use of Agrobacterium-mediated plant integrating vectors to introduce DNA into plant cells is well known in the art. See, for example the methods described by Fraley et al., Bio/Technology 3:629-635 (1985) and Rogers et al., Methods Enzymol. 153:253-277 (1987). Further, the integration of the Ti-DNA is a relatively precise process resulting in few rearrangements. The region of DNA to be transferred is defined by the border sequences and intervening DNA is usually inserted into the plant genome as described (Spielmann et al., Mol. Gen. Genet. 205:34 (1986)).

[0103] Modern Agrobacterium transformation vectors are capable of replication in E. coli as well as Agrobacterium, allowing for convenient manipulations as described (Klee et al., In: Plant DNA Infectious Agents, Hohn and Schell (eds.), Springer-Verlag, New York, pp. 179-203 (1985)). Moreover, technological advances in vectors for Agrobacterium-mediated gene transfer have improved the arrangement of genes and restriction sites in the vectors to facilitate construction of vectors capable of expressing various polypeptide-coding genes. The vectors described have convenient multi-linker regions flanked by a promoter and a polyadenylation site for direct expression of inserted polypeptide coding genes and are suitable for present purposes (Rogers et al., Methods Enzymol. 153:253-277 (1987)). In addition, Agrobacterium containing both armed and disarmed Ti genes can be used for the transformations. In those plant strains where Agrobacterium-mediated transformation is efficient, it is the method of choice because of the facile and defined nature of the gene transfer.

[0104] A transgenic plant formed using Agrobacterium transformation methods typically contains a single gene on one chromosome. Such transgenic plants can be referred to as being heterozygous for the added gene. More preferred is a transgenic plant that is homozygous for the added structural gene; i.e., a transgenic plant that contains two added genes, one gene at the same locus on each chromosome of a chromosome pair. A homozygous transgenic plant can be obtained by sexually mating (selfing) an independent segregant transgenic plant that contains a single added gene, germinating some of the seed produced and analyzing the resulting plants produced for the gene of interest.

[0105] It is also to be understood that two different transgenic plants can also be mated to produce offspring that contain two independently segregating, exogenous genes. Selfing of appropriate progeny can produce plants that are homozygous for both added, exogenous genes that encode a polypeptide of interest. Backcrossing to a parental plant and out-crossing with a non-transgenic plant are also contemplated, as is vegetative propagation.

[0106] Transformation of plant protoplasts can be achieved using methods based on calcium phosphate precipitation, polyethylene glycol treatment, electroporation and combinations of these treatments (See, for example, Potrykus et al., Mol. Gen. Genet. 205:193-200 (1986); Lorz et al., Mol. Gen. Genet. 199:178 (1985); Fromm et al., Nature 319:791 (1986); Uchimiya et al., Mol. Gen. Genet. 204:204 (1986); Marcotte et al., Nature 335:454-457 (1988)).

[0107] Application of these systems to different plant strains depends upon the ability to regenerate that particular plant strain from protoplasts. Illustrative methods for the regeneration of cereals from protoplasts are described (Fujimura et al., Plant Tissue Culture Letters 2:74 (1985); Toriyama et al., Theor Appl. Genet. 205:34 (1986); Yamada et al., Plant Cell Rep. 4:85 (1986); Abdullah et al., Biotechnology 4:1087 (1986)).

[0108] To transform plant strains that cannot be successfully regenerated from protoplasts, other ways to introduce DNA into intact cells or tissues can be utilized. For example, regeneration of cereals from immature embryos or explants can be effected as described (Vasil, Biotechnology 6:397 (1988)). In addition, “particle gun” or high-velocity microprojectile technology can be utilized (Vasil et al., Bio/Technology 10:667 (1992)).

[0109] Using the latter technology, DNA is carried through the cell wall and into the cytoplasm on the surface of small metal particles as described (Klein et al., Nature 328:70 (1987); Klein et al., Proc. Natl. Acad. Sci. (U.S.A.) 85:8502-8505 (1988); McCabe et al., Bio/Technology 6:923 (1988)). The metal particles penetrate through several layers of cells and thus allow the transformation of cells within tissue explants.

[0110] The regeneration, development and cultivation of plants from single plant protoplast transformants or from various transformed explants are well known in the art (Weissbach and Weissbach, In: Methods for Plant Molecular Biology, Academic Press, San Diego, Calif., (1988)). This regeneration and growth process typically includes the steps of selection of transformed cells, culturing those individualized cells through the usual stages of embryonic development through the rooted plantlet stage. Transgenic embryos and seeds are similarly regenerated. The resulting transgenic rooted shoots are thereafter planted in an appropriate plant growth medium such as soil.

[0111] The development or regeneration of plants containing the foreign, exogenous gene that encodes a protein of interest is well known in the art. Preferably, the regenerated plants are self-pollinated to provide homozygous transgenic plants. Otherwise, pollen obtained from the regenerated plants is crossed to seed-grown plants of agronomically important lines. Conversely, pollen from plants of these important lines is used to pollinate regenerated plants. A transgenic plant of the invention containing a desired polypeptide is cultivated using methods well known to one skilled in the art.

[0112] There are a variety of methods for the regeneration of plants from plant tissue. The particular method of regeneration will depend on the starting plant tissue and the particular plant species to be regenerated.

[0113] Methods for transforming dicots, primarily by use of Agrobacterium tumefaciens and obtaining transgenic plants have been published for cotton (U.S. Pat. No. 5,004,863; U.S. Pat. No. 5,159,135; U.S. Pat. No. 5,518,908); Glycine max (U.S. Pat. No. 5,569,834; U.S. Pat. No. 5,416,011; McCabe et. al., Biotechnology 6:923 (1988); Christou et al., Plant Physiol. 87:671-674 (1988)); Brassica (U.S. Pat. No. 5,463,174); peanut (Cheng et al., Plant Cell Rep. 15:653-657 (1996), McKently et al., Plant Cell Rep. 14:699-703 (1995)); papaya; and pea (Grant et al., Plant Cell Rep. 15:254-258 (1995)).

[0114] Transformation of monocotyledons using electroporation, particle bombardment and Agrobacterium have also been reported. Transformation and plant regeneration have been achieved in asparagus (Bytebier et al., Proc. Natl. Acad. Sci. (USA) 84:5354 (1987)); barley (Wan and Lemaux, Plant Physiol 104:37 (1994)); Zea mays (Rhodes et al., Science 240:204 (1988); Gordon-Kamm et al., Plant Cell 2:603-618 (1990); Fromm et al., Bio/Technology 8:833 (1990); Koziel et al., Bio/Technology 11:194 (1993); Armstrong et al., Crop Science 35:550-557 (1995)); oat (Somers et al., Bio/Technology 10:1589 (1992)); orchard grass (Horn et al., Plant Cell Rep. 7:469 (1988)); Oryza sativa (Toriyama et al., Theor Appl. Genet. 205:34 (1986); Part et al., Plant Mol. Biol. 32:1135-1148 (1996); Abedinia et al., Aust. J. Plant Physiol. 24:133-141 (1997); Zhang and Wu, Theor. Appl. Genet. 76:835 (1988); Zhang et al., Plant Cell Rep. 7:379 (1988); Battraw and Hall, Plant Sci. 86:191-202 (1992); Christou et al., Bio/Technology 9:957 (1991); rye (De la Pena et al., Nature 325:274 (1987)); sugarcane (Bower and Birch, Plant J. 2:409 (1992); tall fescue (Wang et al., Bio/Technology 10:691 (1992) and wheat (Vasil et al., Bio/Technology 10:667 (1992); U.S. Pat. No. 5,631,152)).

[0115] Assays for gene expression based on the transient expression of cloned nucleic acid constructs have been developed by introducing the nucleic acid molecules into plant cells by polyethylene glycol treatment, electroporation, or particle bombardment (Marcotte et al., Nature 335:454-457 (1988); Marcotte et al., Plant Cell 1:523-532 (1989); McCarty et al., Cell 66:895-905 (1991); Hattori et al., Genes Dev. 6:609-618 (1992); Goff et al., EMBO J. 9:2517-2522 (1990)). Transient expression systems may be used to functionally dissect gene constructs (see generally, Mailga et al., Methods in Plant Molecular Biology, Cold Spring Harbor Press (1995)).

[0116] Any of the nucleic acid molecules of the invention may be introduced into a plant cell in a permanent or transient manner in combination with other genetic elements such as vectors, promoters, enhancers, etc. Further, any of the nucleic acid molecules of the invention may be introduced into a plant cell in a manner that allows for overexpression of the protein or fragment thereof encoded by the nucleic acid molecule.

[0117] Cosuppression is the reduction in expression levels, usually at the level of RNA, of a particular endogenous gene or gene family by the expression of a homologous sense construct that is capable of transcribing mRNA of the same strandedness as the transcript of the endogenous gene (Napoli et al., Plant Cell 2:279-289 (1990); van der Krol et al., Plant Cell 2:291-299 (1990)). Cosuppression may result from stable transformation with a single copy nucleic acid molecule that is homologous to a nucleic acid sequence found within the cell (Prolls and Meyer, Plant J. 2:465-475 (1992)) or with multiple copies of a nucleic acid molecule that is homologous to a nucleic acid sequence found within the cell (Mittlesten et al., Mol. Gen. Genet. 244:325-330 (1994)). Genes, even though different, linked to homologous promoters may result in the cosuppression of the linked genes (Vaucheret, C. R. Acad. Sci. III 316:1471-1483 (1993); Flavell, Proc. Natl. Acad. Sci. (U.S.A.) 91:3490-3496 (1994)); van Blokland et al., Plant J. 6:861-877 (1994); Jorgensen, Trends Biotechnol. 8:340-344 (1990); Meins and Kunz, In: Gene Inactivation and Homologous Recombination in Plants, Paszkowski (ed.), pp. 335-348, Kluwer Academic, Netherlands (1994)).

[0118] It is understood that one or more of the nucleic acids of the invention may be introduced into a plant cell and transcribed using an appropriate promoter with such transcription resulting in the cosuppression of an endogenous protein.

[0119] Antisense approaches are a way of preventing or reducing gene function by targeting the genetic material (U.S. Pat. Nos. 4,801,540 and 5,107,065 Mol et al., FEBS Lett. 268:427-430 (1990)). The objective of the antisense approach is to use a sequence complementary to the target gene to block its expression and create a mutant cell line or organism in which the level of a single chosen protein is selectively reduced or abolished. Antisense techniques have several advantages over other ‘reverse genetic’ approaches. The site of inactivation and its developmental effect can be manipulated by the choice of promoter for antisense genes or by the timing of external application or microinjection. Antisense can manipulate its specificity by selecting either unique regions of the target gene or regions where it shares homology to other related genes (Hiatt et al., In: Genetic Engineering, Setlow (ed.), Vol. 11, New York: Plenum 49-63 (1989)).

[0120] The principle of regulation by antisense RNA is that RNA that is complementary to the target mRNA is introduced into cells, resulting in specific RNA:RNA duplexes being formed by base pairing between the antisense substrate and the target mRNA (Green et al., Annu. Rev. Biochem. 55:569-597 (1986)). Under one embodiment, the process involves the introduction and expression of an antisense gene sequence. Such a sequence is one in which part or all of the normal gene sequences are placed under a promoter in inverted orientation so that the ‘wrong’ or complementary strand is transcribed into a noncoding antisense RNA that hybridizes with the target mRNA and interferes with its expression (Takayama and Inouye, Crit. Rev. Biochem. Mol. Biol. 25:155-184 (1990)). An antisense vector is constructed by standard procedures and introduced into cells by transformation, transfection, electroporation, microinjection, infection, etc. The type of transformation and choice of vector will determine whether expression is transient or stable. The promoter used for the antisense gene may influence the level, timing, tissue, specificity, or inducibility of the antisense inhibition.

[0121] It is understood that the activity of a protein in a plant cell may be reduced or depressed by growing a transformed plant cell containing a nucleic acid molecule whose non-transcribed strand encodes a protein or fragment thereof.

[0122] Posttranscriptional gene silencing (PTGS) can result in virus immunity or gene silencing in plants. PTGS is induced by dsRNA and is mediated by an RNA-dependent RNA polymerase, present in the cytoplasm that requires a dsRNA template. The dsRNA is formed by hybridization of complementary transgene mRNAs or complementary regions of the same transcript. Duplex formation can be accomplished by using transcripts from one sense gene and one antisense gene co-located in the plant genome, a single transcript that has self-complementarity, or sense and antisense transcripts from genes brought together by crossing. The dsRNA-dependent RNA polymerase makes a complementary strand from the transgene mRNA and RNAse molecules attach to this complementary strand (cRNA). These cRNA-RNAse molecules hybridize to the endogene mRNA and cleave the single-stranded RNA adjacent to the hybrid. The cleaved single-stranded RNAs are further degraded by other host RNAses because one will lack a capped 5′ end and the other will lack a poly(A) tail (Waterhouse et al., PNAS 95: 13959-13964 (1998)).

[0123] It is understood that one or more of the nucleic acids of the invention may be introduced into a plant cell and transcribed using an appropriate promoter with such transcription resulting in the postranscriptional gene silencing of an endogenous transcript.

[0124] Homologous recombination may be used to prevent gene function (Capecchi, M. R. Science, 244:1288-1292 (1989)). In one example, a gene to be knocked out may be interrupted with a selectable marker gene that lacks its own promoter. After transformation, selection for the marker is applied. Few heterologous insertions result in the incorporation of the marker gene into a genomic sequence encoding an mRNA, so the marker is rarely expressed. Homologous recombination results in the incorporation of the marker into the transcription unit of the target gene, allowing marker expression and the survival of the cell during the selection.

[0125] Gene targeting can also be performed without the use of selection (Capecchi, M. R. Science, 244:1288-1292 (1989), Bollag et. al. Ann. Rev. Gen. 23:199-224 (1989)). For example, a gene can be knocked out with a copy of the gene containing an insertion disrupting the reading frame and the transformed cells can then be analyzed by the PCR reaction. The PCR uses two primers, one that anneals to the inserted sequence and one that anneals to the native DNA beyond the end of the transformed fragment. In the event of homologous recombination, only, will the PCR yield a fragment of the expected size.

[0126] It is understood that one or more of the nucleic acids of the invention may be included in a “Knockout construct” meaning that a DNA sequence has been altered via any known means, for example, deletion, insertion, point mutation or rearrangement, so as to eliminate the function of the naturally occurring nucleic acid sequence, but not so as to alter the ability of the DNA sequence to recombine with the naturally-occurring sequence U.S. Pat. No. 5,952,548.

[0127] Insertion mutations created by insertion elements may also prevent gene function (U.S. Pat. No. 6,013,486). For example, in many dicot plants, transformation with the T-DNA of Agrobacterium may be readily achieved and large numbers of transformants can be rapidly obtained. Also, some species have lines with active transposable elements that can efficiently be used for the generation of large numbers of insertion mutations, while some other species lack such options.

[0128] Transposable-elements are a versatile class of insertional mutagen in that a variety of transposable elements have been identified, with representative elements having been found in all eukaryotic genomes examined. As used herein, the term “transposable element” will mean any mobile genetic element that is capable of replicative or non-replicative transposition within a genome, causing insertional mutagenesis at the site of insertion. One example of a transposable element of Zea mays contemplated to have particular utility in the generation of insertion mutations is the Mutator element (Bennetzen, J. Mol. Appl. Genet., 2:519-524 (1984); Talbert et al. J. Mol. Evol., 29:28-39 (1989)), see Genbank Accession Numbers: x14224, x14225, g22495, g22466, g22373, m76978 and x97569). Other examples of transposable elements that are deemed particularly useful insertional mutagens are the Ac element (Geiser et al. The EMBO Journal, 1:1455-1460 (1982), 1982; U.S. Pat. No. 4,732,856, and the tobacco element slide-124 (Genbank Accession Number x97569)).

[0129] One preferred method that may be used for the selection and identification of insertional mutants obtained by transformation or transposable elements is described in U.S. Pat. No. 6,013,486. Briefly, an insertion event in a genome is identified by first preparing a “DNA Composition Enhanced for a Plurality of Insertion Junctions”. This phrase is defined as a DNA composition in which a non-locus specific selection of insertion junctions (the segment of DNA encompassing the end of an insertional mutagen and particularly, the flanking genomic DNA into which the insertional mutagen has inserted) has been enhanced relative to the starting DNA from which the DNA composition is derived. Such non-locus specific selections are prepared without the need for use of probes or primers that are specific to the locus or loci for which an insertion mutation is desired. The selection procedure will typically, instead, use probes or primers that are specific to the insertional mutagen. Examples of such procedures include inverse PCR (U.S. Pat. No. 4,994,370), primer adapted PCR (Mueller et al., Science, 246:78-786 (1989)), and vectorette PCR (European Patent No. 0 439 330), AIMS (Souer et al., The Plant Journal, 7(4): 677-685, 1995)), or any other amplification or isolation procedure which is capable of being used to enhance a DNA composition for a diverse class of insertion junctions. Secondly, sequences from this DNA composition are arranged on a “detectable array”. A detectable array is an arrangement of nucleic acid sequences from which specific sequences or subsets of sequences can be identified. The array can comprise DNA sequences bound to a solid support and can also include DNA compositions arranged in solution in suitable containers. The sequences will be ones that may be used to identify one or more specific insertion junctions. These sequences can, therefore, represent DNA of insertion junctions or, alternatively, sequences representing a particular locus for which an insertion mutation is desired. The insertion event can be identified by hybridizing gene-specific probes or using the PCR with gene-specific primers.

[0130] It is understood that one or more of the nucleic acid sequences of this invention may be used as probes or primers to detect insertion events according to the method described in U.S. Pat. No. 6,013,486

[0131] Other methods to detect insertion events may also use the PCR. Further PCR-related examples of insertion detection can be found in, but are not limited to: Ballinger et al., Proc. Natl. Acad. Sci. USA, 86:9402-9406 (1989), Rushforth, A. M., et al., Mol. Cell. Biol., 13:029-910 (1993), Zwaal, R. R., et al., Proc. Natl. Acad. Sci. USA, 90:7431-7435 (1993), Koes, R. et al, Proc. Natl. Acad. Sci. USA 92 8149-8153 (1995), Krysan et al., Proc. Natl. Acad. Sci. USA 93, 8145-8150 (1996) and McKinney et al. Plant J. 8, 613-622. (1995).

[0132] It is understood that one or more of the nucleic acid sequences of this invention may be used as primers to detect insertion events.

[0133] The present invention also provides for parts of the plants of the present invention. Plant parts, without limitation, include seed, endosperm, ovule and pollen. In a particularly preferred embodiment of the present invention, the plant part is a seed.

### EXEMPLARY USES

[0134] Nucleic acid molecules and fragments thereof of the invention may be employed to obtain other nucleic acid molecules from the same species (nucleic acid molecules from Arabidopsis thaliana may be utilized to obtain other nucleic acid molecules from Arabidopsis thaliana). Such nucleic acid molecules include the nucleic acid molecules that encode the complete coding sequence of a protein and promoters and flanking sequences of such molecules. In addition, such nucleic acid molecules include nucleic acid molecules that encode for other isozymes or gene family members. Such molecules can be readily obtained by using the above-described nucleic acid molecules or fragments thereof to screen cDNA or genomic libraries. Methods for forming such libraries are well known in the art.

[0135] Nucleic acid molecules and fragments thereof of the invention may also be employed to obtain nucleic acid homologues. Such homologues include the nucleic acid molecule of other plants or other organisms (e.g., maize, soy, rice, alfalfa, barley, Brassica, broccoli, cabbage, citrus, cotton, garlic, oat, oilseed rape, onion, canola, flax, an ornamental plant, pea, peanut, pepper, potato, rye, sorghum, strawberry, sugarcane, sugarbeet, tomato, wheat, poplar, pine, fir, eucalyptus, apple, lettuce, lentils, grape, banana, tea, turf grasses, sunflower, oil palm, Phaseolus, etc.) including the nucleic acid molecules that encode, in whole or in part, protein homologues of other plant species or other organisms, sequences of genetic elements, such as promoters and transcriptional regulatory elements. Such molecules can be readily obtained by using the above-described nucleic acid molecules or fragments thereof to screen cDNA or genomic libraries obtained from such plant species. Methods for forming such libraries are well known in the art. Such homologue molecules may differ in their nucleotide sequences from those found in one or more of SEQ ID NOS: 1454-2906 and complements thereof.

[0136] Any of a variety of methods may be used to obtain one or more of the above-described nucleic acid molecules (Zamechik et al., Proc. Natl. Acad. Sci. (U.S.A.) 83:4143-4146 (1986); Goodchild et al., Proc. Natl. Acad. Sci. (U.S.A.) 85:5507-5511 (1988); Wickstrom et al., Proc. Natl. Acad. Sci. (U.S.A.) 85:1028-1032 (1988); Holt et al., Molec. Cell. Biol. 8:963-973 (1988); Gerwirtz et al., Science 242:1303-1306 (1988); Anfossi et al., Proc. Natl. Acad. Sci. (U.S.A) 86:3379-3383 (1989); Becker et al., EMBO J. 8:3685-3691 (1989)). Automated nucleic acid synthesizers may be employed for this purpose. In lieu of such synthesis, the disclosed nucleic acid molecules may be used to define a pair of primers that can be used with the polymerase chain reaction (Mullis et al., Cold Spring Harbor Symp. Quant. Biol. 51:263-273 (1986)); Erlich et al., European Patent 50,424; European Patent 84,796; European Patent 258,017; European Patent 237,362; Mullis, European Patent 201,184; Mullis et al., U.S. Pat. No. 4,683,202; Erlich, U.S. Pat. No. 4,582,788; and Saiki et al., U.S. Pat. No. 4,683,194) to amplify and obtain any desired nucleic acid molecule or fragment.

[0137] Promoter sequences and other genetic elements, including but not limited to transcriptional regulatory flanking sequences, associated with one or more of the disclosed nucleic acid sequences can also be obtained using the disclosed nucleic acid sequence provided herein. In one embodiment, such sequences are obtained by incubating nucleic acid molecules of the present invention with members of genomic libraries and recovering clones that hybridize to such nucleic acid molecules thereof. In a second embodiment, methods of “chromosome walking,” or inverse PCR may be used to obtain such sequences (Frohman et al., Proc. Natl. Acad. Sci. (U.S.A.) 85:8998-9002 (1988); Ohara et al., Proc. Natl. Acad. Sci. (U.S.A.) 86:5673-5677 (1989); Pang et al., Biotechniques 22:1046-1048 (1977); Huang et al., Methods Mol. Biol. 69:89-96 (1997); Huang et al., Method Mol. Biol. 67:287-294 (1997); Benkel et al., Genet. Anal. 13:123-127 (1996); Hartl et al., Methods Mol. Biol. 58:293-301 (1996)). The term “chromosome walking” means a process of extending a genetic map by successive hybridization steps.

[0138] The nucleic acid molecules of the invention may be used to isolate promoters of cell enhanced, cell specific, tissue enhanced, tissue specific, developmentally or environmentally regulated expression profiles. Isolation and functional analysis of the 5′ flanking promoter sequences of these genes from genomic libraries, for example, using genomic screening methods and PCR techniques would result in the isolation of useful promoters and transcriptional regulatory elements. These methods are known to those of skill in the art and have been described (See, for example, Birren et al., Genome Analysis: Analyzing DNA, 1, (1997), Cold Spring Harbor Laboratory Press, Cold Spring Harbor, N.Y.). Promoters obtained utilizing the nucleic acid molecules of the invention could also be modified to affect their control characteristics. Examples of such modifications would include but are not limited to enhancer sequences. Such genetic elements could be used to enhance gene expression of new and existing traits for crop improvement. In an aspect of the present invention, one or more of the nucleic molecules of the present invention are used to determine the level (i.e., the concentration of mRNA in a sample, etc.) in a plant (preferably Zea mays, Glycine max, Arabidopsis thaliana or Oryza sativa) or pattern (i.e., the kinetics of expression, rate of decomposition, stability profile, etc.) of the expression of a protein encoded in part or whole by one or more of the nucleic acid molecule of the present invention (collectively, the “Expression Response” of a cell or tissue).

[0139] As used herein, the Expression Response manifested by a cell or tissue is said to be “altered” if it differs from the Expression Response of cells or tissues of plants not exhibiting the phenotype. To determine whether an Expression Response is altered, the Expression Response manifested by the cell or tissue of the plant exhibiting the phenotype is compared with that of a similar cell or tissue sample of a plant not exhibiting the phenotype. As will be appreciated, it is not necessary to re-determine the Expression Response of the cell or tissue sample of plants not exhibiting the phenotype each time such a comparison is made; rather, the Expression Response of a particular plant may be compared with previously obtained values of normal plants. As used herein, the phenotype of the organism is any of one or more characteristics of an organism (e.g. disease resistance, pest tolerance, environmental tolerance such as tolerance to abiotic stress, male sterility, quality improvement or yield etc.). A change in genotype or phenotype may be transient or permanent. Also as used herein, a tissue sample is any sample that comprises more than one cell. In a preferred aspect, a tissue sample comprises cells that share a common characteristic (e.g. derived from root, seed, flower, leaf, stem or pollen etc.).

[0140] In one aspect of the present invention, an evaluation can be conducted to determine whether a particular mRNA molecule is present. One or more of the nucleic acid molecules of the present invention are utilized to detect the presence or quantity of the mRNA species. Such molecules are then incubated with cell or tissue extracts of a plant under conditions sufficient to permit nucleic acid hybridization. The detection of double-stranded probe-mRNA hybrid molecules is indicative of the presence of the mRNA; the amount of such hybrid formed is proportional to the amount of mRNA. Thus, such probes may be used to ascertain the level and extent of the mRNA production in a plant's cells or tissues. Such nucleic acid hybridization may be conducted under quantitative conditions (thereby providing a numerical value of the amount of the mRNA present). Alternatively, the assay may be conducted as a qualitative assay that indicates either that the mRNA is present, or that its level exceeds a user set, predefined value.

[0141] A number of methods can be used to compare the expression response between two or more samples of cells or tissue. These methods include hybridization assays, such as Northerns, RNAse protection assays, and in situ hybridization. Alternatively, the methods include PCR-type assays. In a preferred method, the expression response is compared by hybridizing nucleic acids from the two or more samples to an array of nucleic acids. The array contains a plurality of suspected sequences known or suspected of being present in the cells or tissue of the samples.

[0142] An advantage of in situ hybridization over more conventional techniques for the detection of nucleic acids is that it allows an investigator to determine the precise spatial population (Angerer et al., Dev. Biol. 101:477-484 (1984); Angerer et al., Dev. Biol. 112:157-166 (1985); Dixon et al., EMBO J. 10:1317-1324 (1991)). In situ hybridization may be used to measure the steady-state level of RNA accumulation (Hardin et al., J. Mol. Biol. 202:417-431 (1989)). A number of protocols have been devised for in situ hybridization, each with tissue preparation, hybridization and washing conditions (Meyerowitz, Plant Mol. Biol. Rep. 5:242-250 (1987); Cox and Goldberg, In: Plant Molecular Biology: A Practical Approach, Shaw (ed.), pp. 1-35, IRL Press, Oxford (1988); Raikhel et al., In situ RNA hybridization in plant tissues, In: Plant Molecular Biology Manual, vol. B9: 1-32, Kluwer Academic Publisher, Dordrecht, Belgium (1989)).

[0143] In situ hybridization also allows for the localization of proteins within a tissue or cell (Wilkinson, In Situ Hybridization, Oxford University Press, Oxford (1992); Langdale, In Situ Hybridization In: The Zea mays Handbook, Freeling and Walbot (eds.), pp. 165-179, Springer-Verlag, New York (1994)). It is understood that one or more of the molecules of the invention, preferably one or more of the nucleic acid molecules or fragments thereof of the invention or one or more of the antibodies of the invention may be utilized to detect the level or pattern of a protein or mRNA thereof by in situ hybridization.

[0144] Fluorescent in situ hybridization allows the localization of a particular DNA sequence along a chromosome that is useful, among other uses, for gene mapping, following chromosomes in hybrid lines or detecting chromosomes with translocations, transversions or deletions. In situ hybridization has been used to identify chromosomes in several plant species (Griffor et al., Plant Mol. Biol. 17:101-109 (1991); Gustafson et al., Proc. Natl. Acad. Sci. (U.S.A) 87:1899-1902 (1990); Mukai and Gill, Genome 34:448-452 (1991); Schwarzacher and Heslop-Harrison, Genome 34:317-323 (1991); Wang et al., Jpn. J. Genet. 66:313-316 (1991); Parra and Windle, Nature Genetics 5:17-21 (1993)). It is understood that the nucleic acid molecules of the invention may be used as probes or markers to localize sequences along a chromosome.

[0145] Another method to localize the expression of a molecule is tissue printing. Tissue printing provides a way to screen, at the same time on the same membrane many tissue sections from different plants or different developmental stages (Yomo and Taylor, Planta 112:35-43 (1973); Harris and Chrispeels, Plant Physiol. 56:292-299 (1975); Cassab and Varner, J. Cell. Biol. 105:2581-2588 (1987); Spruce et al., Phytochemistry 26:2901-2903 (1987); Barres et al., Neuron 5:527-544 (1990); Reid and Pont-Lezica, Tissue Printing: Tools for the Study of Anatomy, Histochemistry and Gene Expression, Academic Press, New York, N.Y. (1992); Reid et al., Plant Physiol. 93: 160-165 (1990); Ye et al., Plant J. 1:175-183 (1991)).

[0146] It is understood that one or more of the molecules of the invention, preferably one or more of the nucleic acid molecules of the present invention or one or more of the antibodies of the invention may be utilized to detect the presence or quantity of a protein or fragment of the invention by tissue printing.

[0147] Further it is also understood that any of the nucleic acid molecules of the invention may be used as marker nucleic acids and or probes in connection with methods that require probes or marker nucleic acids. As used herein, a probe is an agent that is utilized to determine an attribute or feature (e.g. presence or absence, location, correlation, etc.) of a molecule, cell, tissue or plant. As used herein, a marker nucleic acid is a nucleic acid molecule that is utilized to determine an attribute or feature (e.g., presence or absence, location, correlation, etc.) or a molecule, cell, tissue or plant.

[0148] This invention provides arrays of polynucleotide or peptide target molecules arranged on a surface of a substrate. The target molecules are preferably known molecules, e.g. polynucleotides (including oligonucleotides) or peptides, which are capable of hybridizing to complementary probes. The target molecules are preferably immobilized, e.g. by covalent or non-covalent bonding, to the surface in small amounts of substantially purified and isolated molecules in a grid pattern. By immobilized is meant that the target molecules maintain their position relative to the solid support under hybridization and washing conditions. Target molecules are deposited in small footprint, isolated quantities of “spotted elements” of preferably single-stranded polynucleotide preferably arranged in rectangular grids in a density of about 30 to 1000 or more spotted elements per square centimeter. The economics of arrays favors a high density design criteria providing microarrays for detection of transcription events for a large number of genes provided that the target molecules are sufficiently separated so that the intensity of the indicia of a binding event associated with highly expressed probe molecules does not overwhelm and mask the indicia of neighboring binding events. For high-density microarrays each spotted element may contain up to about 50 or more copies of the target molecule, e.g. as few as about 4 to 10 strands of single-stranded cDNA on glass substrates or more cDNA on nylon substrates. Probe molecules are typically unknown molecules, often a mixture of unknown molecules, which are labeled, e.g. with a fluorescent, radioactive or enzymatic label. Preferably each copy of a probe molecule contains a label so that a measurement of label intensity is proportional to detected probe concentration. Mixtures of probes from different sources can be differentially labeled, e.g. with different colored dyes or with different types of labels. For many applications a preferred label is a radioactive isotope nucleotide, e.g. a nucleotide such as dUTP, dCTP, dGTP or dATP with an isotope such as ³²P. An array “substrate” is typically a solid material for supporting target molecules; substrates can be flexible such as nylon membranes or rigid such as glass sheet or silicon wafer; nylon membranes are common, porous supports for microarrays.

[0149] Arrays of this invention can be prepared for use with classes or organisms, e.g. animals, plants or microorganisms. The arrays can be prepared from target molecules from a single species or multiple species. Exemplary single species arrays include animals such as human, mouse and Drosophila, plants such as Zea mays, Glycine max, Oryza sativa and Arabidopsis thaliana, microorganisms such as Aspergillus nidulans, E. coli, Agrobacterium tumefaciens and viruses. Useful arrays can also comprise target molecules from multiple species. Arrays with target molecules from single species can be used with probe molecules from the same species or a different species or a mixture or species, e.g. due to the ability of cross species homologous genes to hybridize. It is generally preferred for high stringency hybridization that the target and probe molecules are from the same species or even from a common tissue in an organism under study. However, because of homology, cross-species hybridization can be effective. In preferred aspects of this invention the organism of interest is a plant and the target molecules are selected from the nucleic acid molecules having at least 60 percent sequence identity to sequences in the group consisting of SEQ ID NOS: 1454-2906 or complements thereof. In other preferred aspects of the invention at least 10% of the target molecules on an array have at least 20 consecutive nucleotides of sequence which is at least 60%, more preferably up to 100%, identical with a sequence of the group consisting of SEQ ID NOS: 1454-2906 or complements thereof.

[0150] Although the shape of the substrates can vary, it is common for the array to be disposed in a rectangular area on a planar surface of the substrate to facilitate registration of target molecules in an addressable array. Generally, the overall dimensions of an array are in the range of 1 to 40 cm. Target molecules can be immobilized on an array substrate by covalent or non-covalent binding. Examples of non-covalent binding include non-specific adsorption, non-specific binding through a specific binding pair member covalently attached to the support surface, and entrapment in a matrix material, e.g. a hydrated or dried separation medium, which presents the target in a manner sufficient for binding, e.g. hybridization, to occur. Examples of covalent binding include covalent bonds formed between the target and a functional group present on the surface of the solid support, e.g. —OH, where the functional group may be naturally occurring or present as a member of an introduced linking group.

[0151] Spotted elements can be placed on arrays by depositing target molecules in a grid pattern onto a substrate or fabricating oligonucleotide or peptide sequences in situ on a substrate. Array design and fabrication methods are well known in the art and disclosed for instance in U.S. Pat. Nos. 4,923,901; 5,079,600; 5,143,854; 5,202,231; 5,242,974; 5,384,261; 5,405,783; 5,412,087; 5,424,186; 5,429,807; 5,436,327; 5,445,934; 5,472,672; 5,525,464; 5,527,681; 5,529,756; 5,532,128; 5,545,531; 5,554,501; 5,556,752; 5,561,071; 5,571,639; 5,593,839; 5,599,695; 5,624,711; 5,658,734; 5,700,637; 5,744,305; 5,800,992; 6,004,755 and 6,087,102.

[0152] Protocols for isolating nucleic acids, proteins and their fractions from cells, tissues, organs and whole organisms are described in: Maniatis et al., Molecular Cloning: A Laboratory Manual (Cold Spring Harbor Press)(1989); Scope R., Protein Purification. Principle and Practice (Springer-Verlag)(1994); and Deutscher, Guide to Protein Purification (Academic Press) (1990)). Such methods typically involve subjection of the original biological source to one or more of tissue/cell homogenization, nucleic acid/protein extraction, chromatography, centrifugation, affinity binding and the like.

[0153] The subject arrays or devices into which they are incorporated may conveniently be stored following fabrication for use at a later time. Under appropriate conditions, the subject arrays are capable of being stored for at least about 6 months and may be stored for up to one year or longer. The subject arrays are generally stored at temperatures between about −20° C. to room temperature, where the arrays are preferably sealed in a plastic container, e.g. bag, and shielded from light.

[0154] Such arrays are useful in a variety of applications, including gene discovery, genomic research and bioactive compound screening. One important use of arrays is in the analysis of differential gene expression, e.g. transcription profiling where the expression of genes in different cells, normally a cell of interest and a control, is compared and any discrepancies in expression are identified. In such assays, the presence of discrepancies indicates a difference in genes expressed in the cells being compared. Such information is useful for the identification of the types of genes expressed in a particular cell or tissue type in a known environment. Such gene expression analysis applications including differential expression analysis of diseased and normal tissue; different tissues or subtypes; tissues and cells under different condition states, like predisposition to disease, age, exposure to pathogens or toxic agents, etc.; and the like. Such applications generally involve the following steps: (a) preparation of probe, e.g. attaching a label to a plurality of expressed molecules; (b) contact of probe with the array under conditions sufficient for probe to bind with corresponding target, e.g. by hybridization or specific binding; (c) removal of unbound probe from the array; and (d) detection of bound probe. Each of these steps will be described in greater detail below.

[0155] Probe preparation depends on the specific nature of the probe, e.g. whether the probe is a polynucleotide or peptide. Polynucleotide probes may be RNA or DNA, as well as hybridizing analogues or mimetics thereof, e.g. nucleic acids in which the phosphodiester linkage has been replaced with a substitute linkage, such as a phosphorothioate, methylimino, methylphosphonate, phosphoramidite, guanidine and the like; and nucleic acids in which the ribose subunit has been substituted, e.g. hexose phosphodiester, peptide nucleic acids; and the like. The probe will have sufficient complementarity to its target to provide for the desired level of sequence specific hybridization. Polynucleotide probes can range from about 10 to 2000 nucleotides where short probes in the range of about 15 to 100 nucleotides are commonly called oligonucleotide probes. Although polynucleotide probes may be double stranded, single stranded probes are preferred.

[0156] Peptide probes that find use in the subject invention include: antibodies, e.g. polyclonal, monoclonal, and binding fragments thereof; peptides with high affinity to the target, as well as analogues and mimetics thereof; ligands, receptors, and the like.

[0157] Generally, the probe molecule will be labeled to provide for detection in the detection step. By labeled is meant that the probe comprises a member of a signal producing system and is thus detectable, either directly or through combined action with one or more additional members of a signal producing system. Examples of directly detectable labels include isotopic and fluorescent materials incorporated into or covalently bonded to the probe molecule. More particularly the label can comprise a nucleotide monomeric unit, e.g. dNTP of a primer, or a photoactive or chemically active derivative of a detectable label that can be bound to a functional part of the probe molecule. Isotopic label elements include ³²P, ³³P, ³⁵S, ¹²⁵I, and the like. Fluorescent label elements include coumarin and its derivatives, e.g. 7-amino-4-methylcoumarin, aminocoumarin, bodipy dyes, such as Bodipy FL, cascade blue, fluorescein and its derivatives, e.g. fluorescein isothiocyanate, Oregon green, rhodamine dyes, e.g. Texas red, tetramethylrhodamine, eosins and erythrosins, cyanine dyes, e.g. Cy3 and Cy5, macrocyclic chelates of lanthanide ions, fluorescent energy transfer dyes, such as thiazole orange-ethidium heterodimer, TOTAB, etc. Labels may also be members of a signal producing system that act in concert with one or more additional members of the same system to provide a detectable signal. Illustrative of such labels are members of a specific binding pair, such as ligands, e.g. biotin, fluorescein, digoxigenin, antigen, polyvalent cations, chelator groups and the like, where the members specifically bind to additional members of the signal producing system, where the additional members provide a detectable signal either directly or indirectly, e.g. antibody conjugated to a fluorescent moiety or an enzymatic moiety capable of converting a substrate to a chromogenic product, e.g. alkaline phosphatase conjugate antibody; and the like. Additional labels of interest include those that provide for signal only when the probe with which they are associated is specifically bound to a target molecule, where such labels include: “molecular beacons” as described in Tyagi & Kramer, Nature Biotechnology (1996) 14:303 and EP 0 070 685 B1. Other labels of interest include those described in U.S. Pat. No. 5,563,037, WO 97/17471, and WO 97/17076. A preferred label for polynucleotide probes is ³²P that is incorporated into copies of RNA via a radiolabeled dNTP, e.g. ³²P-dUTP.

[0158] Arrays of this invention preferably comprise at least 30 different and separated target nucleic acid molecules immobilized on a solid support in a manner that complementary probe nucleic acid molecules can be hybridized thereto, wherein said target nucleic acid molecules have at least 20 consecutive nucleotides in a sequence selected from the group consisting of:

[0159] (a) SEQ ID NOS: 1454-2906;

[0160] (b) sequences which are complements of (a);

[0161] (c) sequences which have at least 60% identity to a sequence of (a) or (b);

[0162] (d) sequences of molecules of which hybridize to a sequence of (a) or (b) or (c);

[0163] Such arrays are useful in methods of this invention for determining a level or pattern of gene transcription in a plant cell or plant tissue under evaluation. Such methods comprise assaying the concentration of an mRNA molecule, whose concentration is dependent upon the transcription of said gene, by hybridizing the mRNA molecule to a second nucleic acid molecule according to this invention, e.g. molecules having a nucleic acid sequence selected from the group consisting of SEQ ID NOS: 1454-2906 and complements thereof. In a preferred method differences in Oryza sativa, wheat, Arabidopsis thaliana or Glycine max plant gene expression in at least two different plant tissues are analyzed by (a) obtaining a sample of ribonucleic acid molecules from each of the plant tissues; (b) generating from each sample of ribonucleic acid molecules a population of labeled nucleic acid molecules; (c) contacting each of populations of labeled nucleic acid molecules with a separate array of this invention; and (d) comparing the hybridization patterns thereof.

[0164] In such methods the array is contacted with probe molecules under conditions sufficient for binding between the probe and the target of the array. For example, where the probe and target are nucleic acids, the probe will be contacted with the array under conditions sufficient for hybridization to occur between the probe and target, where the hybridization conditions will be selected in order to provide for the desired level of hybridization specificity. For peptide probes, conditions will be selected to provide for specific binding between the probe and its target.

[0165] Contact of the array and probe involves contacting the array with an aqueous medium comprising the probe. Contact may be achieved in a variety of different ways depending on specific configuration of the array. For example, contact may be accomplished by simply placing the array in a container comprising the probe solution, such as a vial, plastic bag and the like. In other embodiments where the array is entrapped in a separation media bounded by two rigid plates, the opportunity exists to deliver the probe via electrophoretic means. Alternatively, where the array is incorporated into a biochip device having fluid entry and exit ports, the probe solution can be introduced into the chamber in which the pattern of target molecules is presented through the entry port, where fluid introduction could be performed manually or with an automated device. In multiwell embodiments, the probe solution will be introduced in the reaction chamber comprising the array, either manually, e.g. with a pipette, or with an automated fluid handling device. For flexible nylon substrate microarrays it is convenient to roll the nylon substrate into a roll for insertion into a vial where a small volume of probe solution can efficiently contact target through shaking.

[0166] Contact of the probe solution and the targets will be maintained for a sufficient period of time for binding between the probe and the target to occur. Although dependent on the nature of the probe and target, contact will generally be maintained for a period of time ranging from about 10 min to 24 hrs, usually from about 30 min to 12 hrs and more usually from about 1 hr to 6 hrs.

[0167] Following binding of probe and target, the resultant hybridization patterns of labeled probe may be visualized or detected in a variety of ways, with the particular manner of detection being chosen based on the particular label of the nucleic acid, where representative detection means include scintillation counting, autoradiography, fluorescence measurement, calorimetric measurement, light emission measurement and the like. The method may or may not further comprise a non-bound label removal step prior to the detection step, depending on the particular label employed on the probe. For example, in homogenous assay formats a detectable signal is only generated upon specific binding of probe to target. As such, in homogenous assay formats, the hybridization pattern may be detected without a non-bound label removal step. In other embodiments, the label employed will generate a signal whether or not the probe is specifically bound to its is target. In such embodiments, the non-bound labeled probe is removed from the support surface. One means of removing the non-bound labeled probe is to perform the well known technique of washing, where a variety of wash solutions and protocols for their use in removing non-bound label are known to those of skill in the art and may be used. Alternatively, in those situations where the targets are entrapped in a separation medium in a format suitable for application of an electric field to the medium, the opportunity arises to remove non-bound labeled probe from the target by electrophoretic means. With radioactive labeled probes it is important to remove the unbound probe. The hybridization binding events can be read by exposure of a radioactive-labeled hybridized array to photographic film or preferably a digitizer for simultaneously reading and storing the intensity of the hybridization events.

[0168] The target expression level in the particular tissue being analyzed can be derived from the intensity of the detected signal. To ensure that an accurate level of expression is derived, it is useful to provide the array with standard spotted elements of blanks and fixed quantity of label to calibrate the detected probe signals.

[0169] Any of the nucleic acid molecules of the invention may either be modified by site directed mutagenesis or used as, for example, nucleic acid molecules that are used to target other nucleic acid molecules for modification.

[0170] It is understood that mutants with more than one altered nucleotide can be constructed using techniques that practitioners are familiar with, such as isolating restriction fragments and ligating such fragments into an expression vector (see, for example, Sambrook et al., Molecular Cloning: A Laboratory Manual, Cold Spring Harbor Press (1989)).

[0171] Two steps may be employed to characterize DNA-protein interactions. The first is to identify sequence fragments that interact with DNA-binding proteins, to titrate binding activity, to determine the specificity of binding and to determine whether a given DNA-binding activity can interact with related DNA sequences (Sambrook et al., Molecular Cloning: A Laboratory Manual, 2^{nd} edition, Cold Spring Harbor Laboratory Press, Cold Spring Harbor, N.Y. (1989)). Electrophoretic mobility-shift assay is a widely used assay. The assay provides a rapid and sensitive method for detecting DNA-binding proteins based on the observation that the mobility of a DNA fragment through a nondenaturing, low-ionic strength polyacrylamide gel is retarded upon association with a DNA-binding protein (Fried and Crother, Nucleic Acids Res. 9:6505-6525 (1981)). When one or more specific binding activities have been identified, the exact sequence of the DNA bound by the protein may be determined.

[0172] Several procedures for characterizing protein/DNA-binding sites are used (Maxam and Gilbert, Methods Enzymol. 65:499-560 (1980); Wissman and Hillen, Methods Enzymol. 208:365-379 (1991); Galas and Schmitz, Nucleic Acids Res. 5:3157-3170 (1978); Sigman et al., Methods Enzymol. 208:414-433 (1991); Dixon et al., Methods Enzymol. 208:414-433 (1991)). It is understood that one or more of the nucleic acid molecules of the invention may be utilized to identify a protein or fragment thereof that specifically binds to a nucleic acid molecule of the invention. It is also understood that one or more of the protein molecules or fragments thereof of the invention may be utilized to identify a nucleic acid molecule that specifically binds to it.

[0173] A two-hybrid system is based on the fact that proteins, such as transcription factors that interact (physically) with one another carry out many cellular functions. Two-hybrid systems have been used to probe the function of new proteins (Chien et al., Proc. Natl. Acad. Sci. (U.S.A.) 88:9578-9582 (1991); Durfee et al., Genes Dev. 7:555-569 (1993), Choi et al., Cell 78:499-512 (1994); Kranz et al., Genes Dev. 8:313-327 (1994)).

[0174] Interaction mating techniques have facilitated a number of two-hybrid studies of protein-protein interaction. Interaction mating has been used to examine interactions between small sets of tens of proteins (Finley and Brent, Proc. Natl. Acad. Sci. (U.S.A.) 91:12098-12984 (1994)), larger sets of hundreds of proteins (Bendixen et al., Nuc. Acids Res. 22:1778-1779 (1994)) and to comprehensively map proteins encoded by a small genome (Bartel et al., Nature Genetics 12:72-77 (1996)). This technique utilizes proteins fused to the DNA-binding domain and proteins fused to the activation domain. They are expressed in two different haploid yeast strains of opposite mating type and the strains are mated to determine if the two proteins interact. Mating occurs when haploid yeast strains come into contact and result in the fusion of the two haploids into a diploid yeast strain. An interaction can be determined by the activation of a two-hybrid reporter gene in the diploid strain.

[0175] It is understood that the protein-protein interactions of protein or fragments thereof of the invention may be investigated using the two-hybrid system and that any of the nucleic acid molecules of the invention that encode such proteins or fragments thereof may be used to transform yeast in the two-hybrid system.

### (e) Computer Readable Media

[0176] The nucleotide sequence provided in SEQ ID NOS: 1454-2906 or fragment thereof, or complement thereof, or a nucleotide sequence at least 70% identical, preferably 90% identical even more preferably 99% or about 100% identical to one or more of the nucleic acid sequences provided in SEQ ID NOS: 1454-2906 or complement thereof or fragments of either or amino acid sequences provided in SEQ ID NOS: 1-1453 or homologues thereof, can be “provided” in a variety of mediums to facilitate use.

[0177] In one application, a nucleotide or amino acid sequence of the invention can be recorded on computer readable media so that a computer-readable medium comprises one or more of the nucleotide or amino acid sequences of the invention. As used herein, “computer readable media” refers to any medium that can be read and accessed directly by a computer. Such media include, but are not limited to: magnetic storage media, such as floppy discs, hard disc, storage medium and magnetic tape; optical storage media such as CD-ROM; electrical storage media such as RAM and ROM; and hybrids of these categories such as magnetic/optical storage media.

[0178] Any number of the sequences, or sequence fragments, of the nucleic acid molecules or proteins of the invention, or fragments of either, can be included, in any number of combinations, on a computer-readable medium.

[0179] The present invention further provides systems, particularly computer-based systems, which contain the sequence information described herein. Such systems are designed to identify commercially important fragments of the nucleic acid molecules or amino acid molecules of the present invention. As used herein, “a computer-based system” refers to the hardware means, software means, and data storage means used to analyze the nucleotide sequence information of the present invention. The minimum hardware means of the computer-based systems of the present invention comprises a central processing unit (CPU), input means, output means, and data storage means. A skilled artisan can readily appreciate that any one of the currently available computer-based system are suitable for use in the present invention.

[0180] As indicated above, the computer-based systems of the present invention comprise a data storage means having stored therein a nucleotide or amino acid sequence of the present invention and the necessary hardware means and software means for supporting and implementing a search means. As used herein, “data storage means” refers to memory that can store nucleotide or amino acid sequence information of the present invention, or a memory access means which can access manufactures having recorded thereon the nucleotide or amino acid sequence information of the present invention. As used herein, “search means” refers to one or more programs that are implemented on the computer-based system to compare a target sequence or target structural motif with the sequence information stored within the data storage means. Search means are used to identify fragments or regions of the sequence of the present invention that match a particular target sequence or target motif. A variety of known algorithms are disclosed publicly and a variety of commercially available software for conducting search means are available can be used in the computer-based systems of the present invention. Examples of such software include, but are not limited to, MacPattern (EMBL), BLASTN and BLASTX (NCBI). One of the available algorithms or implementing software packages for conducting homology searches can be adapted for use in the present computer-based systems.

[0181] The most preferred sequence length of a target sequence is from about 30 to 300 nucleotide residues or from about 10 to 100 of the corresponding amino acids. However, it is well recognized that during searches for commercially important fragments of the nucleic acid or amino acid molecules of the present invention may be of shorter length.

[0182] As used herein, “a target structural motif,” or “target motif,” refers to any rationally selected sequence or combination of sequences in which the sequence(s) are chosen based on a three-dimensional configuration that is formed upon the folding of the target motif. There are a variety of target motifs known in the art. Protein target motifs include, but are not limited to, enzymatic active sites and signal sequences. Nucleic acid target motifs include, but are not limited to, promoter sequences, cis elements, hairpin structures and inducible expression elements (protein binding sequences).

[0183] Thus, the present invention further provides an input means for receiving a target sequence, a data storage means for storing the target sequences of the present invention sequence identified using a search means as described above, and an output means for outputting the identified homologous sequences. A variety of structural formats for the input and output means can be used to input and output information in the computer-based systems of the present invention. A preferred format for an output means ranks fragments of the sequence of the present invention by varying degrees of homology to the target sequence or target motif. Such presentation provides a skilled artisan with a ranking of sequences that contain various amounts of the target sequence or target motif and identifies the degree of homology contained in the identified fragment.

[0184] Computer media of the nucleic acid or amino acid sequences of this invention can comprise as few as 1000 distinct nucleic acid or amino acid sequences including complements and homologs, preferably at least 2,000 or 3,000, more preferably at least 5,000 or 10,000 or more, e.g. 15,000 or 20,000 and in certain embodiments as much as 30,00 or 40,000 distinct nucleic acid or amino acid sequences.

[0185] Having now described the invention, the following examples are provided by way of illustration and are not intended to limit the scope of the invention, unless specified.

### Example 1

[0186] This example illustrates the generation of the EST libraries from cDNA prepared from a variety of Arabidopsis thaliana tissue. Wild type Arabidopsis thaliana seeds are planted in commonly used planting pots and grown in an environmental chamber. Tissue is harvested as follows:
[0187] (a) For leaf tissue-based cDNA, leaf blades are cut with sharp scissors at seven weeks after planting;
[0188] (b) For root tissue-based cDNA, roots of seven-week old plants are rinsed intensively with tap water to wash away dirt, and briefly blotted by paper towel to take away free water;
[0189] (c) For stem tissue-based cDNA, stems are collected seven to eight weeks after planting by cutting the stems from the base and cutting the top of the plant to remove the floral tissue;
[0190] (d) For flower bud tissue-based cDNA, green and unopened flower buds are harvested about seven weeks after planting;
[0191] (e) For open flower tissue-based cDNA, completely opened flowers with all parts of floral structure observable, but no siliques are appearing, and are harvested about seven weeks after planting;
[0192] (f) For immature seed tissue-based cDNA, seeds are harvested at approximately 7-8 weeks of age. The seeds range in maturity from the smallest seeds that could be dissected from siliques to just before starting to turn yellow in color.

[0193] All tissue is immediately frozen in liquid nitrogen and stored at −80° C. until total RNA extraction. The stored RNA is purified using Trizol reagent from Life Technologies (Gibco BRL, Life Technologies, Gaithersburg, Md. U.S.A.), essentially as recommended by the manufacturer. Poly A+ RNA (mRNA) is purified using magnetic oligo dT beads essentially as recommended by the manufacturer (Dynabeads, Dynal Corporation, Lake Success, N.Y. U.S.A.).

[0194] Construction of plant cDNA libraries is well known in the art and a number of cloning strategies exist. A number of cDNA library construction kits are commercially available. The Superscript™ Plasmid System for cDNA synthesis and Plasmid Cloning (Gibco BRL, Life Technologies, Gaithersburg, Md. U.S.A.) is used, following the conditions suggested by the manufacturer.

[0195] The cDNA libraries are plated on LB agar containing the appropriate antibiotics for selection and incubated at 37° for a sufficient time to allow the growth of individual colonies. Single colonies are individually placed in each well of a 96-well microtiter plates containing LB liquid including the selective antibiotics. The plates are incubated overnight at approximately 37° C. with gentle shaking to promote growth of the cultures. The plasmid DNA is isolated from each clone using Qiaprep plasmid isolation kits, using the conditions recommended by the manufacturer (Qiagen Inc., Santa Clara, Calif. U.S.A.).

[0196] The template plasmid DNA clones are used for subsequent sequencing. For sequencing the cDNA libraries, a commercially available sequencing kit, such as the ABI PRISM dRhodamine Terminator Cycle Sequencing Ready Reaction Kit with AmpliTaq® DNA Polymerase, FS, is used under the conditions recommended by the manufacturer (PE Applied Biosystems, Foster City, Calif.). The ESTs of the present invention are generated by sequencing initiated from the 5′ end of each cDNA clone.

[0197] A number of sequencing techniques are known in the art, including fluorescence-based sequencing methodologies. These methods have the detection, automation and instrumentation capability necessary for the analysis of large volumes of sequence data. Currently, the 377 DNA Sequencer (Perkin-Elmer Corp., Applied Biosystems Div., Foster City, Calif.) allows the most rapid electrophoresis and data collection. With these types of automated systems, fluorescent dye-labeled sequence reaction products are detected and data entered directly into the computer, producing a chromatogram that is subsequently viewed, stored, and analyzed using the corresponding software programs. These methods are known to those of skill in the art and have been described and reviewed (Birren et al., Genome Analysis: Analyzing DNA, 1, Cold Spring Harbor, N.Y.).

[0198] The generated ESTs (including any full length cDNA sequences) are combined with ESTs and full-length cDNA sequences in public databases such as GenBank. Duplicate sequences are removed; and duplicate sequence identification numbers are replaced. The combined dataset is then clustered and assembled using Pangea Systems tool identified as CAT v.3.2. First, the EST sequences are screened and filtered, e.g. high frequency words are masked to prevent spurious clustering; sequence common to known contaminants such as cloning bacteria are masked; high frequency repeated sequences and simple sequences are masked; unmasked sequences of less than 100 bp are eliminated. The thus-screened and filtered ESTs are combined and subjected to a word-based clustering algorithm which calculates sequence pair distances based on word frequencies and uses a single linkage method to group like sequences into clusters of more than one sequence, as appropriate. Clustered sequence files are assembled individually using an iterative method based on PHRAP/CRAW/MAP providing one or more self-consistent consensus sequences and inconsistent singleton sequences. The assembled clustered sequence files are checked for completeness and parsed to create data representing each consensus contiguous sequence (contig), the initial EST sequences, and the relative position of each EST in a respective contig. The sequence of the 5′-most clone is identified from each contig. The initial sequences that are not included in a contig are separated out. A FASTA file is created consisting of sequences comprising the sequence of each contig and all original sequences which were not included in a contig.

### Example 2

[0199] cDNA sequences are assembled as above and are translated into all six reading frames. Translations of genes or gene fragments from genomic DNA whose coordinates are determined by Genscan or AAT/NAP are searched against standard or fragment Pfam (version 5.3) profile Hidden Markov Models for transcription factor families as are the cDNA translations (A. Bateman, E. Birney, R. Durbin, S. R. Eddy, K. L. Howe, and E. L. L. Sonnhammer Nucleic Acids Research, 28:263-266, 2000). HMMs for transcription factor families in Pfam were rebuilt using HMMER software based on the full alignment provided in Pfam. The E value cutoff is set at 10.

[0200] Hidden Markov Models are constructed for transcription factor families not included in the Pfam database by aligning known domains manually. Hidden Markov Models are built using hmmbuild (with and without the −f option) using the HMMER software with the alignments as input. HMM models are calibrated using the HMMER software (hmmcalibrate) with the HMM model as input. Protein data sets are searched with the HMM models using hmmsearch in the HMMER software package version 2.1.1 using default parameters.

[0201] Table 2 of U.S. application Ser. No. 10/361,942 lists the Arabidopsis thaliana amino acid sequences determined to belong to transcription factor families as analyzed in Example 2.

[0202] Column Headings:
[0203] 1. Sequence Name: The Sequence Name is the name of the sequence as given in the TIGR Arabidopsis thaliana database (The Institute for Genomic Research, Rockville, Md.).
[0204] 2. Family (Method: E value): Entries in this column list the transcription factor family to which the sequence belongs. The families are described in Table 1. The entries also list the method used to determine transcription factor family. “HMM” refers to the Hidden Markov Model method as described in Example 2.
[0205] 3. TIGR Annotation: Entries in this column list the public annotation for this sequence as given in the TIGR Arabidopsis thaliana database (The Institute for Genomic Research, Rockville, Md.).

The application's sequence listing, which the Patent Office published only in electronic form, follows.

SEQUENCE LISTING (2906 sequences)

SEQ ID NO: 1 - protein, 196 aa, Arabidopsis thaliana
  Clone ID: AT_T16E15.C1.p12.tg
MENEQSTHVHFASLSSSSERYNETFEEIKKAMKKSVQLKAELSAKERNLVSVGYKNVISARRASLEILSSIVQKEESKGNEENVKKLKNYRNKVEDELAKICNDILSVINKQLIPSSTTVDSSVLFYNMLADFSSNAESKEATDQSLDAYKRLVWYQQFQLYMTLNWTSVFLNSPESAYQLAKQAFDDAINEFDSK

SEQ ID NO: 2 - protein, 241 aa, Arabidopsis thaliana
  Clone ID: AT_F21H2.C1.p3.tg
MENERAKQVYLAKLNEQAERYDEMVEAMKKVAALDVELTIEERNLLSVGYKNVIGARRASWRILSSIEQKEESKGNEQNAKRIKDYRTKVEEELSKICYDILAVIDKHLVPFATSGESTVFYYKMKGDYFRYLAEFKSGADREEAADLSLKAYEAATSSASTELSTTHPIRLGLALNFSVFYYEILNSPERACHLAKRAFDEAIAELDSLNEDSYKDSTLIMQLLRDNLTLWTSDLEEGGK

SEQ ID NO: 3 - protein, 259 aa, Arabidopsis thaliana
  Clone ID: AT_F3F9.C1.p16.tg
MASGREEFVYMAKLAEQAERYEEMVEFMEKVSAAVDGDELTVEERNLLSVAYKNVIGARRASWRIISSIEQKEESRGNDDHVTAIREYRSKIETELSGICDGILKLLDSRLIPAAASGDSKVFYLKMKGDYHRYLAEFKTGQERKDAAEHTLAAYKSAQDIANAELAPTHPIRLGLALNFSVFYYEILNSPDRACNLAKQAFDEAIAELDTLGEESYKDSTLIMQLLRDNLTLWTSDMQDDAADEIKEAAAPKPTEEQQ

SEQ ID NO: 4 - protein, 614 aa, Arabidopsis thaliana
  Clone ID: AT_MUJ8.C1.p12.tg
MENVDVSKYIHSSVHKAVASKDYVGLRAILSSLPKPKDPCEIQTEAASLSEEAKSDTISAVIDRRDVPSRDTPLHLAVKLCDSTSVEMLMVAGADWTLQNEDGWNALQEAVCSRQEAIAMIIVRHYQPLAWAKWCRRLPRLIATMSKMKDFYLEMSFHFESSVVPFVSKVAPSDTYKVWKVGSNLRADMTMAGFDGFKIQRSDQSILFLGDGSEDGEVARGSLYMVNHKDKEVMNALDGACGVPSEEEVRKEVAAMCKSNIFRPGIDVTQAVLSPQTNWRRQEKSEMVGPWKAKVYEMNNVVVSVKSRKVPGSLAVEGGDDDICDVLTDEEQKQLEDALKLDLPDFPNVNGENGFIVHHQEDHVEANKKAEKKGWLGGWRKKETKQEKQIQYAPPRSSLCVNEKVSNLLGESNQIKPGRHSVDNEHYRKPKALVSDKTRHESEYKKGLRPVLWLSPNFPLQTEELLPLLDILANKVKAIRRLRELLTTKLPSGTFPVKVAIPVVPTIKVLVTFTKFEEIEPVDEFKTPLSSPTSSGYESPAAATTDFTNSSSSSSWFRRSRSNKDGGSISSHLLHSSLDLILNTIKYRINFQQKSGIHQSFILIAKSTRRKSFL

SEQ ID NO: 5 - protein, 640 aa, Arabidopsis thaliana
  Clone ID: AT_T27C4.C1.p12.tg
MEDYSKYTHSPAHLAVVLRDHAALRRIVSDLPRLAKAGEVTTEAESMESESRADSVSAVIDRRDVPGRETPLHLAVRLRDPVSAEILMSAGADWSLQNENGWSALQEAVCTREEAIAMIIARHYQPLAWAKWCRRLPRIIASASRIRDFYMEITFHFESSVIPFIGRIAPSDTYRIWKRGSNLRADMTLAGFDGFKIQRSDQTFLFLGDGYSSEDGKMSLSPGSLIVLSHKEKEMTNALEGAGAQPTDAEVAHEVALMSQTNMYRPGIDVTQAELVSHLNWRRQERTEMVGNWKAKVYDMLHVMVSVKSRRVPGAMTDEELFAVDEERTAVTNGAETDGFEDVLTPEERLQLNSALQTGNSDAIEDEECEVTDQQENGALKDKKGWFGWNKKGSNTEDTKLKKGSKSAPEDGNQKGKSQKSSMVSDHANEDHGDAKKGKEKKKKKKGVAGDEVKRESEYKKGLRPVLWLTPDFPLTTDELLPLLDILANKVKAVRRLRELLTTKLPLGTFPVKLAIPIIPTVRVVVTFTKFEELQAAEEEFSTPPSSPVFHDAKSSSSENSSPSWISWMRSGKSSDNDSNRYKDEADPFLIPSDYKWIDSAEKKRRMKAKKAKSRRKKQAATKAAGASDSGTRSNHVAEE

SEQ ID NO: 6 - protein, 1203 aa, Arabidopsis thaliana
  Clone ID: AT_F25I24.C1.p200.tg
MPHVTSGGNNLNLQDLSQDQIQHLISQFNAQVRVQEPAATSIYTSSPTATITEHGLMAQTSTSGTIPFPSTSLKYENNNLTFQNHTLSSLQNVLSSDAWIIDSGASSHVCSDLTMFRELIHVSGVTVTLPNGTRVAITHTGTICITSTLILHNVLLVPDFKFNLISVCCLVKTLSYSAHFFADCCYIQELTRGLMIGRGKTYNNLYILETQRTSFSPSLPAASSFTGTVQDDCLLWHQRLGIRHYLHYRNLYFLTLVDDCTRTTWVYMMKNKSEVSNIFPVFVKLIFTQYNAKIKAIRSDNVKELAFTKFVKEQGMIHQFSCAYTPQQNSVVERYPSGYKGYKVLDLESHSISITRNVVFHETKFPFKTSKFLKESVDMFPNSILPLPAPLHFVESMPLDDDLRADDNNASTSNSASSASSIPPLPSTVNTQNTDALDIDTNSVPIARPKRNAKAPAYLSEYHCNSVPFLSSLSPTTSTSIETPSSSIPPKKITTPYPMSTAISYDKLTPLFHSYICAYNVETEPKAFTQAMKSEKWTRAANEELHALEQNKTWIVESLTEGKNVVGCKWVFTIKYNPDGSIERYKARLVAQGFTQQEGIDYMETFSPVAKFGSVKLLLGLAAATGWSLTQMDVSNAFLHGELDEEIYMSLPQGYTPPTGISLPSKPVCRLLKSLYGLKQASRQWYKRLSSVFLGANFIQSPADNTMFVKVSCTSIIVVLVYVDDLMIASNDSSAVENLKELLRSEFKIKDLGPARFFLGLEIARSSEGISVCQRKYAQNLLEDVGLSGCKPSSIPMDPNLHLTKEMGTLLPNATSYRELVGRLLYLCITRPDITFAVHTLSQFLSAPTDIHMQAAHKVLRYLKGNPGQGLMYSASSELCLNGFSDADWGTCKDSRRSVTGFCIYLGTSLITWKSKKQSVVSRSSTESEYRSLAQATCEIIWLQQLLKDLHVTMTCPAKLFCDNKSALHLATNPVFHERTKHIEIDCHTVRDQIKAGKLKTLHVPTGNQLADILTKPLHPVQSPIFSLLFRFTGTSPVLIVEAAEAWMPSVAMSIVVDISRVSDSVAQNANLSRSWLNVLGFSPLHLALQNNHIRTVRGLVAINSSLVSIKGRGMITPLHHVARIGDAELLSEFLFACPSSINDLTKVFDSINISWLLNDVFPRSQEVERKFRLEIVSLSLFYEVMLPLHAPEEREEEATNHK

SEQ ID NO: 7 - protein, 605 aa, Arabidopsis thaliana
  Clone ID: AT_F8K4.C1.p28.tg
ISAVLDRRDVPSRETPLHLAVRLDDLFAARAISSAGGDISLQNASGWNPLQEAFCRRNSEVMKVLLRHHHRLAWCKWRRRLPRLIAVLRRMRDFYMEISFHFESSVIPFVGKIAPSDTYKIWKRDGNLRADTTLAGFDGLKIQRADQSFLFLGDGDESLDISPGSLLVLNRDDRKILDAFESAGAPISDSDIAGFCSQSSLYRPGMDVTKAELVGRTNWRRQEKMENVGEWKARVYEIQKVTFSFRSRKIVTGDGSEQVLPLELDEDDEGFLVAENPSFLAPPPRSQRRHSSFVKEDRDWISVGRKSVDVYPSAAPPPPRQSQSPRRSVSQFQPPRRSMAQVQPPRRSVAQAQPPRRSVALPSTVSPVNPPPSPQIKEKEFVKSLHPSVWLTEQFPLKTEELLPLLDILANKVKAVARMRDLLTTKFPPGTFPVKLSIPVVPTVKVVITFTKFVELPPAETFYTPLSSPRFLYSATAGEEDHSDGEKPDARNSISRPSTWLRLATGKGSHRRVEEEEQQTPDPFAIPIGYKWTSMSSSNSKSAPSWADQWGTGGIGEMPEEDNTKSKKDAGGKNSGQTKSAKIVDFVSFKWMKNLVHKKKKDSDS

SEQ ID NO: 8 - protein, 625 aa, Arabidopsis thaliana
  Clone ID: AT_T1E3.C1.p50.tg
MSSNQLGEALEETSERIPFKFAKTKFFHGVLQVSSEESSSPIKEVPEEEAPCDQFNLQIRTASQLHGRVTNEYYEYIQLNQGISQGRVEAVKDFLNRRPDAVDKYINPYETPLLKACAYGNPEIVKLLLRRMTPEQMLPKMSQNNFYNTPLTVVAVSGNMEIAEALVAKNPKLLEIPGNNGEIPVVVAVENTQMEMARYLYNRTPVQVLLEKDGFHGILLFLNAIYYKKLDMALDLFNKSRRLAVTKHLRIESVPIIVLASKPDLFPDTLMGKVLKCLSKCIGIDEVYRLKVMHLQAKKLLKGISEETLALGLKERSESVDEALLFAVRYGNVDFLVEMIKNNSELLWSTGTSTLFNTAVQVRQEKVFSLLYGLGDRKYLFLADKDSDGNSVLHLAGYPPPNYKLATVVSATLQMQRELQWFKEMERIVPAIENERVNTENLTPIEIFRKEHEAMRLEAEKWMKDTAMSCSLVAALIVTVTFAAIFTVPGGTDDNSGGRPFHRHERIFVIFIVSDLISCFAACTSVLIFLGILTARYAFDDFLFSLPANMIAGLSTLFVSIAAMLVAFSSALFTIFNDPWIVAPTIFFACFPALLFVMIQYPLLKELIFSTYGKRIFDRNMKSLF

SEQ ID NO: 9 - protein, 383 aa, Arabidopsis thaliana
  Clone ID: AT_F14M4.C1.p9.tg
MSLYLFYRLLCSVEGKYLIQETTHDSTTREDDDFKDNSEIVECVNFSCDMPILSGRGFMEIEDQGLSSSFFPFLVVEDDDVCSEIRILETTLEFTGTDSAKQAMDFIHEIGWLLHRSKLGESDPNPGVFPLIRFQWLIEFSMDREWCAVIRKLLNMFFDGAVGEFSSSSNATLSELCLLHRAVRKNSKPMVEMLLRYIPKQQRNSLFRPDAAGPAGLTPLHIAAGKDGSEDVLDALTEDPAMVGIEAWKTCRDSTGFTPEDYARLRGHFSYIHLIQRKINKKSTTEDHVVVNIPVSFSDREQKEPKSGPMASALEITQIPCKLCDHKLVYGTTRRSVAYRPAMLSMVAIAAVCVCVALLFKSCPEVLYVFQPFRWELLDYGTS

SEQ ID NO: 10 - protein, 576 aa, Arabidopsis thaliana
  Clone ID: AT_F22M8.C1.p5.tg
MATTGAAATTEIGNPEYKQPRSIFDLTADFFDSCRLSNPSETQSAFGPPKTFDPEEAEEDKSSKDGVILDRWTCNTCKIEFLSLQDQRYHFKSDIHRLNIKLSVAGKAILKEEDVDELTSESVQDYDVSSISGSEDEAETRPPSFHFDAQKGIDKKKLFFRLQSGDKVSIWKCLIMDDAESVSFENDRGVSVDCCGSLVENEVTERLRNLIRENKDDRQMRVVLLASGGHFAGTVFNGKSVVAHKTFHRAKAGKKQSTKDASGRSIHSAGASLRRYNELALKKDIQELLASWKPYFDGAACVFVHAPSSSRQLLFNGGKPYFSSQNCAVRNVPFTIRRPTFKESQRIYNQLTQIAHVTEEIFVNRPEVTKANTVVQTHNEDSGKTSRKEEPDETSSSNIILEEPNRIEEDIEDGVTGTSTALHEAAKSGDCERVMEFLEEGMDPCAKDERGRTPYMLANEKEVRNTFRRFMALNLEKWNWHDAKVPSPLTKEMEESQAAKQAEKDAKQKARTKELKKLRKAREKKAQAEAAQAEKEKPISKVEEVRRAMAAQREKRAAAAERRMASLNIQSSSSTS

SEQ ID NO: 11 - protein, 669 aa, Arabidopsis thaliana
  Clone ID: AT_MUK11.C1.p2.tg
MAMSSNYLDATLKETFRRSPFKFANTKVPHAGLGDSVSPIKEVPEEEEVPNDPVNIQIPFIESALSTSRLRGKNTNVYYEYIQLSQGISQGRVEIVKDFLNHHPDSVDEWINLYETPLLKACACGKPEIVKELLRRMTPEQMLPKMSQNASYHTPLTVVAVSGNMEIAEALVAKNPKLLEIPGINGQIPVVVAVENTQMEMARYLYTRTPVQVLLDQDGYHGSLLFLNAIFYKMLDIALDLFNMSRRLAVTKHSQIESIPIIVLASKPDLFPGGCYLGPLTRFIYSWIQVKLPTLPQPSRSNRDQQNTLMRKLLKGLSKWTGIDEVYRLKVMHLQAKKLLLGISEETLALGLKERSETVDEALLFAVRYGNVDFLVEMIRNNSELLWSTRTSSSSTLFLLAVEFRQEKVFSLLYGLDDRKYLLLADKDCDGNGVLHLAGFPSPPSKLSSVVGAPLQLQRELQWFKEVERIAPEIEKERVNTEEQTPIEIFTKEHQGLRQEAEKWMKDTAMSCSLVAALIVTVTFAAVFTVPGGTDDNSKGKPFHLRDRRFIIFIVSDLISCFASCTSVLIFLGILTARYSFDDFLVFLPTKMIAGLSILFVSIAAMLIAFSSALFTMMGKEGKWIVAPTILFACLPALLFVLLQYPLLKEMIFSTYGKGIFDRNMKCWA

SEQ ID NO: 12 - protein, 1576 aa, Arabidopsis thaliana
  Clone ID: AT_F12K11.C1.p27.tg
MAKKKKDTKHTRLCEATGAWATKVLEDFRASGNDSYVFEQQLTNSERGIIHQMCRTMGLRSKSNGSGEERRLSLFKGDGISKSDKRRMYEARNQKEKEGDGISKSYSKHRYETRFQKAGGIRKTRISPKKLKCVSFPPEAKAVLHDLFTRYPPCDGDTTGTSLGIYTTGNVNSNWKDDFFKKPHMTKHDIENNVVSLSSRLKKERHFREIFEARSKLPIASFRDAIISAVESNQVVLIAGETGCGKTTQVPQYLLDHMWHSKKEACKIICTQPRRISAISVSDRISWERGETIGRTVGYKVRLQSEGGRESSVVFCTNGILLRVLIGKGVNSSVPDITHIIVDEIHERDSYSDFMLMILRDLLPSNPHLRLILMSATLDAERFSEYFGGCPVVRVPGFTYPVRTFFLDDALSVLNSDKNSHLLSAVKRDFKDEDKVSLDEAIDLAWTNDEFDCLVDLVSSEGSHEAYNYQNSTTGLTPLMVFAGKGRVSDVCKLLSVGADCTLKSKEGITALELAEKENQFETAQIIREHAGNIQSNSQQAQDLLDKYMATIKPEEVDVGLIVKLMKKICSDSKDGAILVFLPGWEEISKTKEKLLDDRFFAHSAKFIILCLHSRVPAEEQKKVFNRPPRGCRKIVLATNIAESAVTIDDVVYVIDSGRMKEKSYDPYNDVSTLQSSWVSKANAKQRAGRAGRCQAGICYHLYSKLRAASLPEYRVPEVMRMPVDELCLQVKMLDPNCNVNDFLQKLMDPPVAQSIENALIILKDIGALTPEEELTELGQKFGQLPVHPRISKMIYFAILVNCLDPALILACAADEKDPFTMPLSPGDRKKAAAAKHELASLYGDHSDHLATVAAFQCWKNAKASGQAKEFCSKYFISQVVMKRLDDLCRKLQGELNRHGVIPSSSSNCSLNAHDPGILRAVIAVGLYPMLGRMCPLSKNRTRSVIETIAGAKVRVPSLSNNVDMSSTKFDEALIVFDEITRGDWGVVIRSCTVLPTIPVLLFSREIAVSTTESYDAVKSDDEEDHKVGNVGDAMDIDKEVGRPGEKIMLGPENSVKVVVDRWLPFKVTAFEIAQMYILRERLMASILFKVKHPKENLPPHLGASMYAIASVLSYDSLAQSSVQTVAVQPITSVVDATSPRDDIPSTNPNELREHDPNTTPMGSKLELANKLGLGNMEESLPSNFADGNEQPDPNTSPVEDVSAATKQKKMQSESKRCKSLNNVDLGNIEENFGNMEENPPSDLAIGNEQTLPKLASNLDMGNMEENTPSDLANGNEKTEPNSANSMDLGNMEENTPSDLANGNKKKEPKSVSKLDLGSEKVSIPSNLVNGNEQHDLNIAPGEDASAAKQPEKKRSRSKKRKSGNNLDLGKMEKSKPSDLANENEQTEPKSANNLDLGNMKENTPSDLANENEQTELRLPNNSDYGNMEESLPLNLANGDEQPDPTTAPMEAAKQPKKKRSRSKKCKSVNNLDLGNMEENKPSDLANGNEQKDPESVNRLDPGKEKESIPSNLVSGNEQPDSNTAPAKKPKKKKRKLANNFDSVNNMEEKMPSTNVLSQGNKSGLIEEKPSIPSDQ

SEQ ID NO: 13 - protein, 705 aa, Arabidopsis thaliana
  Clone ID: AT_T1E3.C1.p40.tg
MAISSNYLHATLMATLRRSPFKFANTKVPHADLGDSVSPTKKNPEEEVPSDPVNIQLRGKNTNVYYEYIQLSQGISQGRVEVVKDFLNDHPDAVDEWINLYETPLLKACACGKPEIVKELLWRMTPEQMLPKMSQNVSYHTALTVVAVSGNMEIAEALVAKNPKLLEIPGINGQIPVVVAVENTQMEMARYLYTRTPVQVLLAEDGYHGTLLFLNAIFYRMLGKGFLGIQATHIFGGFDLYLFFFIQLDIALDLFNMSRRLAVTKHLQIESIPIIVLASKPDLFPGIQVKLPTLPKPSHANKDHKSKFFRIHKVYKKSIYIPLKKVRKSFDLFPDTLMRKLLKGLSKWTGIDEVYRLKVMHLQAKKLLLGISEETLTLGLKERSETVDEALLFAVRYGNVDFLVEMIRNNSELLWSTRTSSSSTLFLLAVEFRQEKVFNLLYGLDDRKYLLLADKDSDGNGVLHLAGFPSPPSKLASVICAPLRMQRELQWFKEVERIAPEIEKERVNTEEQTPIEIFAKEHQGLRQEAEKWMKDTAMSCSLVAALIVMVTFAALIITVIFAAVFTVSGGSDDNSEGNPFHLYEQRFIIFIVSDLISCFAACTAVPIFLGILTARYSFDDFLVALPTKMITGLSILFVSIAAMLIAFSLVLITMMNKGKWIVAPTILCACLPALLFVLLQYPLLKEMIFSTYGKGIFDRNMTCWA

SEQ ID NO: 14 - protein, 617 aa, Arabidopsis thaliana
  Clone ID: AT_F9H3.C1.p11.tg
MVRSHLLRATPEASPLKPASSPSNCRLSLSPVELRLYFIRDDDFKVKVDIFKTSYQNSLFELPCCDKSEFLTSLRFSDLFNLPGEYVPMNPEIFSAMRAGNIELLEKLKSYETPMACLKSDGGDSVLHLAAASGHLELVKNIITECPCLLLEPNSKYQIPLHVAARAGRSAVVKALVASVLYFSPRVPEEDRDRLNIYVLKDIDGDTPLHAALKDLHEKAEERIRKLSLSHLIMHWRRSRCISFSDASTRQMETAACLVNADQHASFLANKDGTSPLYLAVEAGNVSLVRAMLNRPGNKIQGKTSTLASQLEGRKSLLHAALKAKNTDVLNVILNDDPSLVNERDEEGRTCLSVGASMGYYKGICKLLDRSTKSVYECDKDGSFPIHMAVEKGHLKVVKEILKRCPDSKELVNKQGQNMLHIAAKSAKVGSFLLGYIRRLDTENHLIEEQDVDGNAPLHLATINWRCRTVDKLAAFASTETKILNIQNKDGLRPLDIAELNLQPDYVLRERLTLMVLLCVYAPKSVGWLPTSGMTLRSRSEPLDAKKYKDHINALLLVATLVATVTFAAGFTIPGGFNSSAPNMGMATLADDSTLFFFLVLDTLAMQSSIVAIVALI

SEQ ID NO: 15 - protein, 532 aa, Arabidopsis thaliana
  Clone ID: AT_T8O11.C1.p15.tg
MEMKQMKFLTHQAFFSSVRSGDLSQLQQLVDNLTGDELIDESSPCSAVAELMSVQNDAGETAVYISAAENLEDIFRYLIRFSSLETVKIRSKSDMNAFHVAAKRGHLGIVKELLRLWPELCRICDASNTSPLYAAAVQDHLEIVNAMLDVDPSCAMIVRKNGKTSLHTAGRYGLLRIVKALIEKDAAIVGVKDKKGQTALHMAVKGRSLEVVEEILQADYTILNERDRKGNTALHIATRKARPQITSLLLTFTAIEVNAINNQKETAMDLADKLQYSESALEINEALVEAGAKHGRFIGREDEARALKRAVSDIKHEVQSQLLQNEKTNRRVSGIAKELRKLHREAVQNTTNSITVVAVLFASIAFLAIFNLPGQYFTEGSHVGQANIAGRTGFRVFCLLNATSLFISLAVVVVQITLVAWDTRAQKKVVSVVNKLMWAACACTFGAFLAIAFAVVGKGNSWMAITITLLGAPILVGTLASMCYFVFRQRFRSGNDSQRRIRRGSSKSFSWSYSHHVSDFEDESDFEKIIAL

SEQ ID NO: 16 - protein, 519 aa, Arabidopsis thaliana
  Clone ID: AT_T28J14.C1.p210.tg
MGNSFGCSASGERLVSAARDGDFVEAKMLLDCNPCLAKYSTFGGLNSPLHFAAAKGHNEIVGLLLENGADVNSRNYCGQTALMQACRYGHWEVVQTLLLFRCNVTRADYLAGRTALHFAAVNGHARCIRLVLADFLPSDKLNSLPETGVVTAKNKSEQSALSKFVNKAADGGITALHMAALNGLFDCVQLLLDLEANVSADSFYTAPKMTILFFVNVAGAGSTPLHYAACGGNLKCCQILLARGARKMTLNCNGWLPIDIARMWSRHWLEPLLSPNSDVVIPAFPHSNYLSLPLLSILNIAREFGLQSATIGDEVDICAVCLERTCTVAAEGCEHQLCVRCALYLCSSSNVPSVTVGPPGSIPCPLCRHGITAFKRLPSSLTREMKLPMSLGFCAPCMLHTGDTTDQSSPTCPPTEQRSSKTRAASVSSDIFCPVTCSPFPSVNIPMCTCNEGTCPNFETHGTERHSEEHVESSPSRTTTEQEKIEEGQRLGKTTTCSSMFWGRRSCSRENQCNSEINA

SEQ ID NO: 17 - protein, 406 aa, Arabidopsis thaliana
  Clone ID: AT_F25I24.C1.p210.tg
MPSEAMSIVVDVSRVSDSVAQDANLSRSSGMSTQDENIYARLKTVAQVGDIERLYELIAEDPNILDHFDKVSFCETPLHIAAEKGQTHFAMELMTLKPSLALKLNVSGFSPLHLALQNNHIQTVLLGWIKRANRKEILDWKDEDGNTVFHIAALINQTEVMKLLRKTVKVKAKNLDGKTAMDILQTHQSPCFPVAKKLLRSAKERPFCGSTTTLAGYLSRNLSFIEKRNSLLGLSNLSMTKDRSINASDPRNAILVVAILIVTATYQAGLSPPGGFWQDTNDGRYGHMAGQMTMPFIYAFFFIGLNGFAFVSSLYVIIIITIGLPKWKLLYGSVAALSIAALASYSTIFPSSYDANSYLSVLTFLCAYISIICIMMFATFMAFIVDKHRRYQVDFPASCFSSSQEP

SEQ ID NO: 18 - protein, 598 aa, Arabidopsis thaliana
  Clone ID: AT_MVE11.C1.p3.tg
MDTEKGYPRGFRAESLRPETGPRSFRFDSMQIDEAADLQKDEIRQENSTYLVLFKNIDSGELEATKDFLDRNPEALTAILTSNGDTPIHKAVLSGHIKIVEEIIRRIHDPEQVLKIKNDNGYTALTYAATGGIVRIAECLVNKCPGLVSVRNAKEHIPIVVASLYGHKHLVQYLYSHTPLSDLDPCDDSDEHKGKNGAMLVTNCIVDGLYCIALDLIQRYPKLAYTRDSDNDTAIMALAQTPYAFPSVPRIIRRVYKLKLGHAQAKEILDCICQEIPKFDAAQQKNAGLNQALFKAVENGIVEYIEEMMRHYPDIVWSKNSSGLNIFFYAVSQRQEKIFSLIYNIGAKKNILATNWDIFHNNMLHHAAYRAPASRLNLIPGAALQMQRELQWFKEVEKLVQPKHRKMVNLKQKKTPKALFTDQHKDLVEQGEKWMKETATSCTVVAALITTMMFSSAFTVPGGYRSDGMPLYIHQHRFKIFLISDAISLFTSCMSLLMFLGILKSRYREEDFLRSLPTKLIVGLLALFLSMATMIVTFVVTLMTLVGEKISWVSAQFMFLAVIPLGMFVVLQFPVLLEIFRATYCPNVFDKPRRVFKL

SEQ ID NO: 19 - protein, 476 aa, Arabidopsis thaliana
  Clone ID: AT_F24G16.C1.p100.tg
MDNIAAQLKRGISRQFSTGSMRRTLSRQFTRQNSLDPRRNNMRFSFGRQSSLDPIRRSPESLSCEPHMSVPENLDSTMQLLFMASKGDVNGVEELLNEGIDVNSIDLDGRTALHIASCEGHYDVVKVLLSRRANIDARDRWGSTAAVDAKYYGNVEVYNLLKARGAKAPKTRKTPMTVGNPKEVPEYELNPLELQVRKVDGISKGTYQVAKWNGTRVSVKIFDKDSYSDPERVNAFTNELTLLAKARHPNIVQFVGAVTQNLPMMIVVECNPKGDLSVYLQKKGRLSPSKALRFALDIARGMNYLHECKPDPIIHCELMPKNILLDRGGQLKISGFGLIKLSKIGEDSAKVVNHEAQIDKSNYYIAPEIYKDEVFDKRADVHSFGVILYELTEGVSLFHPKPPEEVAESICIEGKRPTIRTKSKSYPPELKELIEECWHPEISVRPIFSEIIIRLDKIVTNCSKQGWWKDTFKFPW

SEQ ID NO: 20 - protein, 366 aa, Arabidopsis thaliana
  Clone ID: AT_T30B22.C1.p25.tg
MDTCALVIHQSLSRIKLSPPKSSSSSSSAFSPESLPIRRIELCFRGAICAAVQRNYEETTSSVEEAEEDDESSSSYGEVNKIIGSRTAGEGAMEYLIEWKDGHSPSWVPSSYIAADVVSEYETPWWTAARKADEQALSQLLEDRDVDAVDENGRTALLFVAGLGSDKCVRLLAEAGADLDHRDMRGGLTALHMAAGYVRPEVVEALVELGADIEVEDERGLTALELAREILKTTPKGNPMQFGRRIGLEKVINVLEGQVFEYAEVDEIVEKRGKGKDVEYLVRWKDGGDCEWVKGVHVAEDVAKDYEDGLEYAVAESVIGKRVGDDGKTIEYLVKWTDMSDATWEPQDNVDSTLVLLYQQQQPMNE

SEQ ID NO: 21 - protein, 578 aa, Arabidopsis thaliana
  Clone ID: AT_F14N23.C1.p22.tg
MQPIFHAILKNDLPAFLELVEDSESSLEERNEEEHLNNTVLHMAAKFGHRELVSKIIELRPSLVSSRNAYRNTPLHLAAILGDVNIVMQMLETGLEVCSARNINNHTPLHLACRSNSIEAARLIAEKTQSIGLGELILAISSGSTSIVGTILERFPDLAREEAWVVEDGSQSTLLHHACDKGDFELTTILLGLDQGLEEALNPNGLSPLHLAVLRGSVVILEEFLDKVPLSFSSITPSKETVFHLAARNKNMDAFVFMAESLGINSQILLQQTDESGNTVLHIAASVSFDAPLIRYIVGKNIVDITSKNKMGFEAFQLLPREAQDFELLSRWLRFGTETSQELDSENNVEQHEGSQEVEVIRLLRIIGINTSEIAERKRSKEQEVERGRQNLEYQMHIEALQNARNTIAIVAVLIASVAYAGGINPPGGVYQDGPWRGKSLVGKTTAFKVFAICNNIALFTSLGIVILLVSIIPYKRKPLKRLLVATHRMMWVSVGFMATAYIAASWVTIPHYHGTQWLFPAIVAVAGGALTVLFFYLGVETIGHWFKKMNRVGDNIPSFARTSSDLAVSGKSGYFTY

SEQ ID NO: 22 - protein, 185 aa, Arabidopsis thaliana
  Clone ID: AT_F8A24.C1.p6.tg
MAVPRGGNGLNEEEDVDGENAIFEENGVDYDTDSELPSHLRDLAAAAQAGDVAALRTAIDNLNGRVDEPLEDNDSALHLACLYGHLPCVQLLLERGADMEVKDEDEAIPLHDACAGGYLEIVQLLFSRASSPECVKRMIETADIEGDTPLHHAARGEHVDVVRFLLGSGASPTTQNSYGKVKKNI

SEQ ID NO: 23 - protein, 442 aa, Arabidopsis thaliana
  Clone ID: AT_MWD22.C1.p10.tg
MDAFETHLPKEIVSDPLYNSFNPRSEEYVVAGKILRQRSVFDLDKNGFSPLHAAAAAGQVETVRATLGVEKKLCRLKDRDGKTPLHVATMRGKIDVIREIVASCVDCLEDETVQGQTALHLAVLHLEIEAVIAIVELITETNRFDVLNKKDEQGNTALHLATWRKNRQVIEVLVQAIPEESRSFEVNAMNKMGLSAMDLLVMFPSEAGDREIYEKLIEAGAQRGRDIGTTNVERTTSTSTCQERTMKSQSHKELVKYFTFKKHRDSPSEARSALLVVASLVATATFQASLTPPGGTWQDSSIPAVSQNTTNVNTTNQQAHTAGQSIMGTFNGVAFTLFVFFNTIGFSVSLSMLNILTLGFPLRFQLQICMIAMYFSHNTTMASIAPDHVKLYCILITSILAATTPGLMRLLENPIGMLAHFLDSRSQKICSMISLSCKRFVT

SEQ ID NO: 24 - protein, 456 aa, Arabidopsis thaliana
  Clone ID: AT_T20N10.C1.p110.tg
MTIKPKSPARFKLGRQSSLAPESRTPIDTLTEDEDDDLAAAATAGIGDPTIRLMYLANEGDIDGINKMLDSGTNVDYRDIDARTALHVAACQGRTDVVELLLSRGAKVDTKDRWGSTPLADAVYYKNHDVIKLLEKHGAKPTIAPMHVLTDKEVPEYEIHPTELDFSNSVKISKGTFNKASWRGIDVAVKTFGEEMFTDEDKVNAFRDELALLQKIRHPNVVQFLGAVTQSTPMMIVTEYLPKGDLRQYLDRKGPLMPAHAVKFALEIARLSGYFLNILRDDSGHLKVADFGVSKLLVVKKTVKKDRPVVTCLDSSWRYMAPEVYRNEEYDTKVDVFSFALILQEMIEGCEPFHEIEDREVPKAYIEDERPPFNAPTKSYPFGLQELIQDCWDKEASKRPTFRVIISTLELISDRIARKRSWKVMLGRCLPRFRLFTKRDYVNPGGSNRSSGSFNR

SEQ ID NO: 25 - protein, 620 aa, Arabidopsis thaliana
  Clone ID: AT_F25P17.C1.p10.tg
MHNRLTTGDRMSLWNVNVQVEPINGIRKLCSSCSLIVTRSNLGEDSFVEKKMHPIFDAILQNDLPAFLGLVEARESSLEERSEEQNTNNTVLHVAAKLGHRELVAKIIELRPSLLSSRNAYGDTPLHLAALLGDVNIVMQMLDTGLELYSARNNKNQTPLHLAFVSIFMEAAKFIVEKTNSVDLDELNFALSSGSTCIVGIILERFPELARKNAWEVEDGSRSTLLHYACDKGDLELTSILLGLNQGLEEALNSKGLSPLHLAVQRGSVIILEEFMDKSPLSFCVRTPSKETVFHLAARNKNTDAFVFMAENLGTSSPILLKKKDQQGNTVLHIAASVSCGSPLIRYIVGKKIIDIRDRNNMGYRAYHLLPRQAQDYEFISSYLRCDTKTSEEVDSKKAERNEPHIGHSEHHTLPEETLEEIIGGHSQDDVGFCRVYGNGLCCGIFGDHTAFSRNSMVISGYYLCSWWIIDGVETISHWFKKMNRVGRGLPIYFIKNNRVEDIPAIAKNEGEMPSLARTNSDLAASEGVLNQSIIRRGGSQKAFNKDRMILESNMMKLKPMSRKISRLKISPCTKRDETKGMTIADGDKCLSKCPPQTKQRRSTYSKLFYTVRQVSSKPA

SEQ ID NO: 26 - protein, 607 aa, Arabidopsis thaliana
  Clone ID: AT_mzn1.C1.p70.tg
MGVDELSHLKFSLLLESSACNDLSGFKSLVEEEGLESIDGSGLWYGRRLGSKKMGFEERTPLMIAALFGSKEVVDYIISTGLVDVNRSCGSDGATALHCAVSGLSANSLEIVTLLLKGSANPDSCDAYGNKPGDVIFPCLSPVFSARMKVLERLLKGNDDLNEVNGQEESEPEVEVEVEVSPPRGSERKEYPVDPTLPDIKNGVYGTDEFRMYAFKIKPCSRAYSHDWTECPFVHPGENARRRDPRKYHYSCVPCPEFRKGSCSRGDTCEYAHGIFECWLHPAQYRTRLCKDETNCSRRVCFFAHKPEELRPLYPSTGSGVPSPRSSFSSCNSSTAFDMGPISPLPIGATTTPPLSPNGVSSPIGGGKTWMNWPNITPPALQLPGSRLKSALNAREIDFSEEMQSLTSPTTWNNTPMSSPFSGKGMNRLAGGAMSPVNSLSDMFGTEDNTSGLQIRRSVINPQLHSNSLSSSPVGANSLFSMDSSAVLASRAAEFAKQRSQSFIERNNGLNHHPAISSMTTTCLNDWGSLDGKLDWSVQGDELQKLRKSTSFRLRAGGMESRLPNEGTGLEEPDVSWVEPLVKEPQETRLAPVWMEQSYMETEQTVA

SEQ ID NO: 27 - protein, 641 aa, Arabidopsis thaliana
  Clone ID: AT_F9H3.C1.p7.tg
MTRAFHLIIDCITGDTGSIQMLVTNLYDLPGEYVSMNPEIFSAMRAGNVKFLDKMKTNNNTPLACFRNETGDFTLHLAAAWGRLELVKRIVSECPCLLLETNSKDQIPLHAAAAAGRLAVVEAFVARVNEISDGLSEEERERVNLYAMKDIDGNTALHLALKGGHLKTAACLVKANHLASFLANNHGVSPLFTAIIAGSLTLVEAMMYVPGQTCNLASKLEGRKSLVHAALKAKNSDILDVILSEDPSLVNERDEEGRTCLSVAAYVGYYKGVVNLLHRSTSNVFECDDDGSYPIHMAVEKGRVKIFLKLLKCCPDSQYLLNKQGQNILHIAAKSGKTGTYLLQVIKAYDLIKNDLIMEQDVDGNTPLHLATLTWRPRTVNILNKFTLGNHLHIRNKDGLSALDIAESNLQSNYVFRERMTLMVLLCTCSPRGFKMIPTSGITLKSRSEKVAGNKYKDSINVLLLVATLVATVAFAAGIAIPGGFSSSTPKRGIAILDDDDFLSIFLVFNTLAMQSSVLAIVALIWAQLGDPVLVHKTFHLALPALFVSLVSMSSAFFCGVVATTKHNPWLFDSIIFISIIFLFVVAYLLAPYAIPQFPGTPFLQRITKCYLDFMLLFVNEDDVDIVCEKKQETVHLYVAN

SEQ ID NO: 28 - protein, 683 aa, Arabidopsis thaliana
  Clone ID: AT_F9H3.C1.p10.tg
MDVSEARLSRIESQSSIDSSHDQRRQGYFSMNKINNGLRSLSSRGFLRNRGKAIPLPMKDTEKTVPEFLVNLKFSDLFDLPGEYVLMNAEMLSTLGNEEWLEKLRSHGTPLTCLKNDRGDSVLHLAATWSHLELVKNIVSECSCLLMESNSKDQLPLHVAARMGHLAVVEDLVASVTFFSARLAEEDREILNPYLLKDINGDTALNLALKGHYTEVALCLVNANRQASFLACKDGISPLYLAVEAKDASLVKAMLGNDGPQRKNLNLEGRKYLAHAALNSLSTDILDVILNEYPSLVDERDEEGRTCLSFGASIGYHKGVCNLLNRSRKGVFVCDDDGSYPIHLAVEKGRIKVVKEICKRCPYSKLLLNKKGQNLLHIAAESGKFRILRHLTAHEQINHLANEKDVDGNTPLHLATIYWRPRAVRELGGKKNLLIQNNNGLVALDIAESKLQPHYIFRERLTLLALVQLHFQNDPRCAHTMIQTRPIMPQGGNKDYINALLVVAALITTVTFTSGFTIPGGFKDSTPNVGMANLITNPRLILFLIFDILALETSFLAVVSLILAQLGDPTLYQSSVRVAMISLYFAMYFMTLAFFFVMVIAAGNVRWLVYVIFCLIFSILTLAFSRFMPHLLLHYCGSSYKLMMPFVSFANSCDDDGHESPQFSAHKSEKISNNDQVEMSDTT

SEQ ID NO: 29 - protein, 477 aa, Arabidopsis thaliana
  Clone ID: AT_F18O19.C1.p4.tg
MENITAQLKRGISRQFSTGSIRRTLSRQFTRQSSLDPRRTNMRFSFGRQSSLDPIRRSPDSSKSDDEPHMSVPENLDSTMQLLFMASKGDVRGIEELLDEGIDVNSIDLDGRTALHIAACEGHLGVVKALLSRRANIDARDRWGSTAAADAKYYGNLDVYNLLKARGAKVPKTRKTPMTVSNPREVPEYELNPLEGAYQVAKWNGTRVSVKILDKDSYSDPERINAFRHELTLLEKVRHPNVIQFVGAVTQNIPMMIVVEYNPKGDLSVYLQKKGRLSPSKALRFALDIARGMNYLHECKPDPIIHCDLKPKGGQLKISGFGMIRLSKISQDKAKVANHKAHIDLSSKENASFTCMKTESLDYYIAPEVYKDEIFDLRVDAHSFGVILYEITEGVPVFHPRPPEEVARMMCLEGKRPVFKTKSRSYPPDIKELIEKCWHPEAGIRPTFSEIIIRLDKIVANCSKQGWWKDTFKFPWK

SEQ ID NO: 30 - protein, 354 aa, Arabidopsis thaliana
  Clone ID: AT_T27E11.C1.p20.tg
MGDWAQLAQSVILGLIFSYLLAKLISIVVTFKEDNLSLTRHPEESQLEIKPEGVDSRRLDSSCGGFGGEADSLVAEQGSSRSDSVAGDDSEEDDDWEGVESTELDEAFSAATLFVTTAAADRLSQKVPSDVQQQLYGLYKIATEGPCTAPQPSALKMTARAKWQAWQKLGAMPPEEAMEKYIEIVTQLYPTWLDGGVKAGSRGGDDAASNSRGTMGPVFSSLVYDEESENELKIDAIHGFAREGEVENLLKSIESGIPVNARDSEGRTPLHWAIDRGHLNIAKVLVDKNADVNAKDNEGQTPLHYAVVCDREAIAEFLVKQNANTAAKDEDGNSPLDLCESDWPWIRDSAKQAD

SEQ ID NO: 31 - protein, 627 aa, Arabidopsis thaliana
  Clone ID: AT_F3F20.C1.p9.tg
MSSLVPVMEKQESVRGNSVEEQQSLRCVGAENQVRKGRALDKQVSFLAVNVVEKHGIKGRAMEKQERAMERQRSFRGFVEKQKSFRVVMERQLSFMNVGGERKKKTDSPGKRGDSPLHLAARTGNLGKVMELIRACNGIEELKELSSKQNLEGETPLYSAAENGHSLVVEEMLKHMDLDTASVKARNGFDPFHVAAKQGHIEALKKLLETFPNLAMTVDLSCTTALHTAASQGHTDVVNLLLKTDSHLAKIAKNNGKTALHSAARMGHREVVKSLIGNDASIGFRTDKKGQTALHMAVKGQNEGIVLELVKPDPAILSVEDSKGNTPLHTATNKGRIKIVRCLVSFDGINLNAMNKAGDTALDIAEKIGNPELVSVLKEAGAATAKDLGKPRNPAKQLNQTVSDIKHEVQSQLQQSRQTGVRVRRIAKRLKKLHINGLNNAINSATVVAVLIATVAFAAIFTIPGQYEEDRTKGLLLLGEARIAGKAPFLVFFIFDSLALFISLAVVVVQTSVVVIEQKAKKNLVFVINKLMWLACLFISVAFVSLSFIVVGKEDIWLAICATIIGGTIMLTTIGAMCYCVVMHRIEESKLKSLRKERSKSKSFSLSHMPSESEILNGEFNKRMYAL

SEQ ID NO: 32 - protein, 467 aa, Arabidopsis thaliana
  Clone ID: AT_F24I3.C1.p210.tg
MSNTFEESLKSMSLDYLNLLINGQAFSDVTFSVEGRLVHAHRCILAARSLFFRKFFCESDPSQPGAEPANQTGSGARAAAVGGVIPVNSVGYEVFLLLLQFLYSGQVSIVPHKHEPRSNCGDRGCWHTHCTAAVDLSLDILAAARYFGVEQLALLTQKHLTSMVEKASIEDVMKVLIASRKQDMHQLWTTCSYLIAKSGLPQEILAKHLPIELVAKIEELRLKSSMPLRSLMPHHHDLTSTLDLEDQKIRRMRRALDSSDVELVKLMVMGEGLNLDESLALIYAVENCSREVVKALLELGAADVNYPAGPTGKTALHIAAEMVSPDMVAVLLDHHADPNVQTVDGITPLDILRTLTSDFLFKGAIPGLTHIEPNKLRLCLELVQSAALVISREEGNNNSNDNNTMIYPRMKDEHTSGSSLDSRLVYLNLGATNRDIGDDNSNQREGMNLHHHHHDPSTMYHHHHHHF

SEQ ID NO: 33 - protein, 857 aa, Arabidopsis thaliana
  Clone ID: AT_F18A8.C1.p2.tg
MRGGALLCGQVQDEIEQLSRESSHFSLSTGILPSLGARSNRRVKLRRFVVSPYDHKYRIWEAFLVVLVVYTAWVSPFEFGFLRKPRPPLSITDNIVNAFFAIDIIMTFFVGYLDKSTYLIVDDRKQIAFKYLRSWFLLDLVSTIPSEAAMRISSQSYGLFNMLRLWRLRRVGALFARLEKDRNFNYFWVRCAKLVCVTLFAVHCAACFYYLIAARNSNPAKTWIGANVANFLEESLWMRYVTSMYWSITTLTTVGYGDLHPVNTKEMIFDIFYMLFNLGLTAYLIGNMTNLVVHGTSRTRNFRDTIQAASNFAHRNHLPPRLQDQMLAHLCLKYRTDSEGLQQQETLDALPKAIRSSISHFLFYSLMDKVYLFRGVSNDLLFQLVSEMKAEYFPPKEDVILQNEAPTDFYILVNGTADLVDVDTGTESIVREVKAGDIIGEIGVLCYRPQLFTVRTKRLCQLLRMNRTTFLNIIQANVGDGTIIMNNLLQHLKEMNDPVMTNVLLEIENMLARGKMDLPLNLCFAAIREDDLLLHQLLKRGLDPNESDNNGRTPLHIAASKGTLNCVLLLLEYHADPNCRDAEGSVPLWEAMVEGHEKVVKVLLEHGSTIDAGDVGHFACTAAEQGNLKLLKEIVLHGGDVTRPRATGTSALHTAVCEENIEMVKYLLEQGADVNKQDMHGWTPRDLAEQQGHEDIKALFREKLHERRVHIETSSSVPILKTGIRFLGRFTSEPNIRPASREVSFRIRETRARRKTNNFDNSLFGILANQSVPKNGLATVDEGRTGNPVRVTISCAEKDDIAGKLVLLPGSFKELLELGSNKFGIVATKVMNKDNNAEIDDVDVIRDGDHLIFATDS

SEQ ID NO: 34 - protein, 601 aa, Arabidopsis thaliana
  Clone ID: AT_T16H5.C1.p20.tg
MAATAIEPSSSISFTSSHLSNPSPVVTTYHSAANLEELSSNLEQLLTNPDCDYTDAEIIIEEEANPVSVHRCVLAARSKFFLDLFKKDKDSSEKKPKYQMKDLLPYGNVGREAFLHFLSYIYTGRLKPFPIEVSTCVDSVCAHDSCKPAIDFAVELMYASFVFQIPDLVSSFQRKLRNYVEKSLVENVLPILLVAFHCDLTQLLDQCIERVARSDLDRFCIEKELPLEVLEKIKQLRVKSVNIPEVEDKSIERTGKVLKALDSDDVELVKLLLTESDITLDQANGLHYAVAYSDPKVVTQVLDLDMADVNFRNSRGYTVLHIAAMRREPTIIIPLIQKGANASDFTFDGRSAVNICRRLTRPKDYHTKTSRKEPSKYRLCIDILEREIRRNPLVSGDTPTCSHSMPEDLQMRLLYLEKRVGLAQLFFPAEANVAMDVANVEGTSECTGLLTPPPSNDTTENLGKVDLNETPYVQTKRMLTRMKALMKTGKSLRKCTFKFYSLTTRLTDSKPFNNAVETGRRYFPSCYEVLDKYMDQYMDEEIPDMSYPEKGTVKERRQKRMRYNELKNDVKKAYSKDKVARSCLSSSSPASSLREALENPT

SEQ ID NO: 35 - protein, 643 aa, Arabidopsis thaliana
  Clone ID: AT_F21B7.C1.p8.tg
MKCDSKSETVSSSSTSGSLSDPDQWTIFKDKDESEIMNPAILCAVRAGDKVSLLKRINDDVKVTQRLVDNQGNSILHIAAALGHVHIVEFIISTFPNLLQNVNLMGETTLHVAARAGSLNIVEILVRFITESSSYDAFIAAKSKNGDTALHAALKGKHVEVAFCLVSVKHDVSFDKNNDEASPLYMAVEAGYHELVLKMLESSSSPSILASMFSGKSVIHAAMKANRRGLFLCLFNLVRQVFFICFNYFLVIALTDILGIVLRQDPGLIELRNEEGRTCLSYGASMGCYEGIRYILAEFDKAASSLCYVADDDGFTPIHMAAKEGHVRIIKEFLKHCPDSRELLNNQCQNIFHVAAIAGKSKVVKYLLKLDEGKRMMNEQDINGNTPLHLATKHRYPIVVNMLTWNDGINLRALNNEGFTALDIAETMKDNNAYVLYKRLIWMALVSAGAPHGPNLIPLTVSQSSKQSPERYKDSVNTLMVTATLVATVTFAAGLTLPGGYMSSAPHLGMAALVNKLNFKVFLLLNNIAMCTSVVTVMALIWAQLGDALLTKKAFRLALPLLLTAVVSMMMASVAGLTLVVSDLPWLSHLVLAIDSAFLVFLMLLIIPYAFSSTRHGFLRHIFYFPYFLMLLVVSEGSNNMDG

SEQ ID NO: 36 - protein, 1016 aa, Arabidopsis thaliana
  Clone ID: AT_F1N21.C1.p13.tg
MSSVAEDNSFTCDIATIFVAICRNPPANPSDSLFQYEISTLYQEAHSRWLKPPEVLFILQNHESLTLTNTAPQRPTSGSLLLFNKRVLKFFRKDGHQWRRKRDGRAIAEAHERLKVGNAEALNCYYAHGEQDPTFRRRIYWMLDPEYEHIVLVHYRDVSEREEGQQTGGQVYQFAPILSTQNVSYNQYIGDSSDIYQQSSTSPGVAEVNSNLEGSASSSEFGQALKMLKEQLSIGDEHVNSVDPHYIQPESLDSLQFLEYSDIDHLAQPTTVYQRPENNKLERCYGGNFGAQYSAKNDSNKLERCYGGYVGGAEYHSSNLMLVKNGSGPSGGTGGSGDQGSESWKDVLEACEASIPLNSEGSTPSSAKGLLAGLQEDSNWSYSNQVDQSTFLLPQDLGSFQLPASYSALVAPENNGEYCGMMEDGMKIGLPFEQEMRVTGAHNQKFTIQDISPDWGYANETTKVIIIGSFLCDPTESTWSCMFGNAQVPFEIIKEGVIRCEAPQCGPGKVNLCITSGDGLLCSEIREFEYREKPDTCCPKCSEPQTSDMSTSPNELILLVRFVQTLLSDRSSERKSNLESGNDKLLTKLKADDDQWRHVIGTIIDGSASSTSTVDWLLQELLKDKLDTWLSSRSCDEDYITCSLSKQEQGIIHMVAGLGFEWAFYPILAHGVNVDFRDIKGWSALHWAAQFGSEKMVAALIASGASAGAVTDPSRQDPNGKTAASIAASNGHKGLAGYLSEVALTNHLSSLTLEETENSKDTAQVQTEKTLNSISEQSPSGNEDQVSLKDTLAAVRNAAQAAARIQAAFRAHSFRKRKQREAALVACLQEYGMYCEDIEGISAMSKLTFGKGRNYNSAALSIQKNFRGYKDRKCFLELRQKVVKIQAHVRGYQIRKNYKVICWAVRILDKVVLRWRRKGVGLRGFRQDVESTEDSEDEDILKVFRKQKVDVAVNEAFSRVLSMSNSPEARQQYHRVLKRYCQTKAELGKTETLVGEDDDGLFDIADMEYDTLFSLP

SEQ ID NO: 37 - protein, 468 aa, Arabidopsis thaliana
  Clone ID: AT_MRI1.C1.p10.tg
MRFLSLVGNSFGCSASGERLVSAARDGDLQEAKALLDYNPRLARYSTFGVRNSPLHYSAAQGHHEIVSLLVESGVDINLRNYRGQIHRSDYLNGGTALHLAALNGHPRCIRILLSEYIPSVPNCWSLLKNKKTSVAGFDSSVLHEVINRAADGGITPLHVAALNGHIETVQLLLDLGASVTQVLGVQLSIMLHVVETRSVASKGACLAAVNSNGWTPMMVARSWHRNWLEEILNPTTEQPQLHLPNVPSPFLCLPLMSIVNIAQECGWRENDCLTPCRDPCAVCLERKCTVAADGCAHEFCTNCALYLSTTSITSSKTSNVTPGSVPCPLCRNGIVSFTKLPHTTATTRTSTSSRTSISLSFCTCSSDVLDTALLTNPHYSCKPVVSRTGSRTPQSARSSAFRSLSCRRFPPSLCLGGSDVDEPRSRLIGGSYSRSGVGFRRSTSQVEGKRSWFSALNHCVTTGGSAC

SEQ ID NO: 38 - protein, 412 aa, Arabidopsis thaliana
  Clone ID: AT_F14L17.C1.p30.tg
MDLRLQQAAESGSINELYALIDENPYILENIDAVPFVSTPLHVAAVFGNIEFAMEMLNLKPSFARKLNTSGYSPLHLAVEKEQSDFVSHMLWHDGGLSRVKGRNDVNVDRQNALHLAVMNDRFEVLQVLTGWIQRMSQKDAYYIENRVLNKRDFDFNTALHLAAYKNDQQALKLLLKCRLVEPNLVNIDDLTFVDILRTQGENAGGGNLDLEQAVIKTGCVEAASMPKFKEESDLLKSPINFMTYYSTSMKRMKSSTSDQDRGAFLIVCTLIITATYQMALQPPGGVHQSENANANAGSVVMKQTFFILLWISNTVGFCCAVFYTFCLIPLGQLFTIWFFYIGTCLCISYALAMAVISPHPLVFLSATFALFLVFALYLLLEAFVDTWRKHRTVVPKSRFSWFWKVLQYYYI

SEQ ID NO: 39 - protein, 344 aa, Arabidopsis thaliana
  Clone ID: AT_F5J6.C1.p15.tg
MASSSEKTPLIPSDEKNDTKEESKSTTKPESGSGAPPSPSPTDPGLDFNAFDFSGMAGILNDPSIKELAEQIAKDPSFNQLAEQLQRSVPTGSHEGGLPNFDPQQYMQTMQQVMENPEFRTMAERLGNALVQDPQMSPFLEALGNPAASEQFAERMAQMKEDPELKPILAEIDAGGPSAMMKYWNDKDVLAKLGEAMGIAVGADQTVAAEPEEAEEGEEEESIVHQTASLGDVEGLKAALASGGNKDEEDSEGRTALHFACGYGEVRCAQVLLDAGANANAIDKNKNTPLHYAAGYGRKECVSLLLENGAAVTQQNMDNKNPIDVARLNNQLDVVKLLEKDAFL

SEQ ID NO: 40 - protein, 852 aa, Arabidopsis thaliana
  Clone ID: AT_K14A17.C1.p6.tg
MDGDGLGRLIGSEIHGFHTLQDLDVQTMLEEAKSRWLRPNEIHAILYNPKYFTINVKPVNLPNSGRIILFDRKMLRNFRKDGHNWKKKKDGRTVKEAHEHLKVGNEERIHVYYAHGEDNTTFVRRCYWLLDKARENIVLVHYRDTQEAATTSGDSISSPISVSEQTFPNRVAAEDIDTVVRNHDISLHDINTLDWDELLVPTDLNNQSAPTVDNLSYFTEPLQNAANGTAEHGNATVADGSLDALLNDGPQSRESFGRWMNSFISESNGSLEDPSFEPMVMPRQDPLAPQAVFHSHSNIPEQVFNITDVSPAWAYSSEKTKILVTGFLHDSYQHLERSNLYCVCGDFCVPAEYLQAGVYRCIIPPHSPGMVNLYLSADGHKPISQCFRFEHRAVPVLDKTVPEDNQDSKWEEFEFQVRLSHLLFTSSNKLNVLSSKISPHNLRDAKKLASKTNHLLNSWAYLVKSIQGNKVSFDQAKDHLFELSLKNRLKEWLMEKVLEGRNTLDYDSKGLGVIHLCASLGYTWSVQLFSLSGLSLNFRDKQGWTALHWAAYYGREKMVAALLSAGARPNLVTDSTKDNLGGCMAADLAQQNGYDGLAAYLAEKCLVAQFRDMKIAGNITGDLEACKAEMLNQGTLPEDEQSLKDALAAYRTAAEAAARIQGAFREKALKAARSSVIQFANKEEEAKSIIAAMKIQNAFRKYDTRRKIEAAYRIQCRFQTWKIRREYLNMRRQAIRIQAAFRGLQARRQYKKILWSVGVLEKAVLRWRQKRKGFRGLQVAAEEDSPGEAQEDFYKTSQRQAEERLERSVVRVQAMFRSKKAQQDYRRMKLTHEEAQSCYGVTQLEYGCLEDI

SEQ ID NO: 41 - protein, 436 aa, Arabidopsis thaliana
  Clone ID: AT_F14L17.C1.p24.tg
MDPRLQHAAETGSINDFYALIEENPYILDNINAVPFVNTPLHVAAASDNIPFAMEMLNLKPSFARKLNTSGYSPLHLAVEKDHREFITWLLWRDPGLVRVKGREGITPFHLLAIRGDVNLVAECLKYCPVCIQDVSVNGHNALHLAVMNDRFEILQVLTGWLQRMSQKDSASTESDFLNRKDLAHNTPLHLAAYKEDHQAVKLLLQCQLVKLNEVNADGLTFLDILRNNGQSRDLDKDLEQVVVKTGCKEAASLPQLEKPSDQFKSPVTFLAHCSIGIRRLRSDTSEEGRAVFLIICTLILTSTYQTALQPPGGVHQSEGGGTAVMKQTFFIVLWVSNTIGFCCALLYTFCLLPIGSLFTTWFFWIGASLGVSYALAMAIISPNPLLFLCAAFTLYLLFPMYLFMEIFIALRLSHLKAAVNRMFVTFVKQRGTLRI

SEQ ID NO: 42 - protein, 574 aa, Arabidopsis thaliana
  Clone ID: AT_F24B22.C1.p30.tg
MGILDKGKQLHQEDVIVEVGEPSGSSPNEDPSSLPNVEDHTSEDVTKPHSRNLMYKAVLTGDWKTASTLISRKECNVVEQITGNSEIALHIAVAAKHKDFVRNLLREMDPPDLSLKNKDGNTPLSFAAALGDIETAEMLINMIRDLPDISNEKTMTPIHIAALYGHGEMVQYLFSKTSIKDLNDQQYLNLFHTMISADIYGVFADVPLWMLERVDLYRKELALYPNSNKALHLLARKTSAISHKSQLNLFQQVASSWLLFDAAELGNVEILVILIRSHLDLLWIVDNNNRTLFHVAALYRHENIFSLIYELGGIKDLIASYKEKQSKDTLLHLVARLPPMNRQQVGSGAALHMQKELLWFKAVKEIVPRSYIETKNTKGELAHDIFTEQHENLRKEGERWMKETATACMLGATLIATVVFAAAITIPGGNDDSGDKANTLGFPNFRKRLLFDIFTLSDSVALFSSMMSIVIFLSIFTSRYAEEDFRYDLPTKLMFGLSALFISIISMILAFTFSMILIRVEKASLSLVLISCLASLTALTFAYLYFHLWFNTLRSVYISMFLFLGRKRGIRIFV

SEQ ID NO: 43 - protein, 776 aa, Arabidopsis thaliana
  Clone ID: AT_F23C21.C1.p2.tg
MAGFINLEDSPMFQKQVFSLEGTSDELKDRCQKLYKGVKKFMGALGEASTGVSAFADSLEEFGAGHDDPVSVSIGGPVISKFINTLRELSSYKEFLRSQVEHVLLERLTNFMTVDLQEAKESRRRFDKAVHSYDQAREKFVSLKKNTRGDIVAELEEDLENSKSAFEKSRFNLVNSLMTIEAKKKYEFLESISAIMDSHFKYFKLGYDLLSQLEPYIHQVLTYAQQSKEQSKIEQDRFAQRIQEFRTQSELDSQQASAKADPSDVGGNHVYRAIPRKNVEANSVSTADKEVTKQGYLLKRSASLRADWKRRFFVLDNHGSLYYYRNTGNKSAKSQHYYSGLGEHSSGVFGRFRTRHNRSASQGSLDCNMIDLRTSLIKLDAEDTDLRLCFRIISPQKTYTLQAENGADRMDWVNKITAAITIRLNSHFLQQSPARYLDKKNTSSGPATENLTLNQKEDYNQRLNVGDDVLTILREIPGNNTCAECNAPDPDWASLNLGVLMCIECSGVHRNLGVHISKVRSLTLDVKVWEPTILDLFRNLGNGYCNSVWEELLHHLDDDSEKGSTDTLASVSKPSSEDWFTLKEKYINGKYLEKALVVKDEREANSTASSRIWEAVQSRNIRDIYRLIVKADANIINTKFDDITDLDVYHHHHVDAPDEVKKRHDPNACQRIKNSNEARNCLQGCSLLHVACQSGDPILLELLLQFGADINMRDYHGRTPLHHCIASGNNAFAKVLLRRGARPSIEDGGGLSVLERAMEMGAITDEELFLLLAECQ

SEQ ID NO: 44 - protein, 326 aa, Arabidopsis thaliana
  Clone ID: AT_K14B20.C1.p3.tg
MEEADQLCLAAKSGDLKKVQTLIYSGADVTHFDNDGLTPLMHAAKIGNAEIVTALLESGAPWNALSPSNLSAGDFAMEAGHQETFDLLLKTGIQSELILGTIARNQTKNEYSNQEYLQDRVSFSEDKLMDSESKGVMMAWEKPLMEAHAKAICLNGGHILNVGFGMGLVDTAIQRYNPVKHTIIEAHPEVYKRMIESGWGEKENVKIVFGRWQDVLDKLDDNSFDGIFFDTYGEYYEDLREFHQHLPRLLKPDGVYSYFNGFCGSNAFFHVVYCNLVTLEIENLGFSTQLIPLPVKDCLGDEVWEGVKQKYWQLDTYYLPVCQFSD

SEQ ID NO: 45 - protein, 591 aa, Arabidopsis thaliana
  Clone ID: AT_T32N4.C1.p3.tg
MAQGSDINGLTCSLFPLIVMDSSEAHLDRIEAQRSTDVSHDQQKKRYFPMNLINKVASKLCSRGGDGATPPMGDNESGLEFLNNLKLSDLFHLPGENVQMNTEVFSGLSDGDKECLEMLKGVGTPMACLKSDRGDSVLHLAARWGHLELVKNIISECPCLVLELNFKDQLPLHVAAHAGHSAIVEALVASVTFFSDRLAEEDRERLNPYVLRDKYGNTALHLAIEGRYMEMAASLVNENQNASFLENNEGISSLYMAVEAGDVTLVKEILKTAGNNDLEGRNSNLDSKLEGRKHLVHVALNARSIGVLDVILNEYPSLEDERDEEGRTCLSFAASIGFYKGVCNLLDRSTKNVYVCDEDGSFPIHTAAENGHIRIVKEILKRCPHSKHMLNKLGQNVLHIAAKIGEHNLVKSLMRSDDTKHLGVGQDVDGNTPLHLAVLNWRYRSIRTLASDVKILQLRNDNGLTARGIAESVLKPNYIFHERLTLAFLLDAHAFRGCGSVKSLTKPSEPLDHEKSRDYVNTLLLVAALVATMTFAAGFTIPGGFNSSAPHLGRATLTTDPNLFFFLLFDILAMQTSVASICTLIYMGAVG

SEQ ID NO: 46 - protein, 624 aa, Arabidopsis thaliana
  Clone ID: AT_F25C20.C1.p11.tg
MARSSPANIPATTIDDYAHSPVHYAVVVGDHAGLTRLVSSLPKLTDPEQIHTESDSMSQERVAEKISTVIDRRDVPFGETPLHLAVRLGDVFAAKTISSAGADITLQNAAGWNSLHEALCRRNSEITEAILRDHHRSAWCKWRRRLPHLIAVLSRMRDFYMEISFHFESSVIPFVGKIAPSDTYKIWKRGGDLRADTSLAGFDGFKIRRANQSFLFLSDGDEFLDVSPGTLLVLNRDDKTILNAFENAKDPISDSDIAGFCGQSSLYRPGMDVTKAKLVEITNWRRQAKIETVGEWKAKAYDVENVSFSFKSRKVGKEQGLRLDETRRSVSEPLRPQRREQRRRSVSLPEAAILVANSSVGRIKEKEIVKSLRPSVWLTDQFPLKTEELLPLLDILANHVKAVRRMRELLTTKFPAGTFPVKLSIPVIPTVKVVMTFSKFVALPPLDEFYTPLSSPKHLLAAMEDQHDVHDDEKLDRRISSSRPSFSTPSWLRLNINATGKSSRRRLVDEEQVVDPFTIPTGYKWTSNSDNSVFTKKSSKNQRYIRYWDHYKMASEAPSWADQWGTGGIGVMAAEETTDGKKDVTGKKSGKTKAGINKAKIVVFIGVNWMKNLVQRKKKDSTSS

SEQ ID NO: 47 - protein, 531 aa, Arabidopsis thaliana
  Clone ID: AT_T19D16.C1.p20.tg
MFQGYDLLNQLEPFIHQILTYAQQSKEQSKIEQDRLARRIQEFRTQSELDSQQLVANAESSGANGNRVGGNIPYKNTETSLTADKEGSHHHYSGSSDHNTGVFGRFRARHNRSGSLTEGSLGYNTIDLRTSLIKLDAEDMDLRLCFRIISPQKTYTLQAENGADRMDWVNKITKAIGTLLNSHFLQQSPVRYLDKDNSSSAPANAVVSGDQIRHNDSRQNIGDDVSTILRGLPGNNACAECNAPEPDWASLNLGVLLCIQCSGVHRNLGVHISKVRSLSLDVKVWEPTILDLFRNLGNVYCNSLWEGLLHLDDDCEDGSALSHASVSKPCPEDSFSVKEKYILGKYLEKALVIKDESEANLSAASRIWEAVQSRNIREIYRLIVTTGDVNIINTKFDDITDIDAYHHIDAAEKAVKKRHDPTVCQRIKESNEPRSCLQGCSLLHVACHIGDSVLLELLLQFGADLNIRDYHGRTPLHHCISSGNHKFAKILLRRGARPSIEDDGGLSVLERAMEMGAITDEELFLLLAECA

SEQ ID NO: 48 - protein, 762 aa, Arabidopsis thaliana
  Clone ID: AT_MLD15.C1.p5.tg
MEKFVLSYLPLVPYRYYARNRGNLSFDFTEMFDSYSLYPTGKLSPVVDSYVTAELDGEDMRDDYAFLESGLKDNKSQFISYAKRILVGEDAESERIEDLKLLTACCSYDSINCASSIINGDVGSVPYINDICSDTGLSLLHTAAESHAPLCVEMLLKRRARTDMRSKDERALIPLELSLSNVRLIVLLGDKDLTVVKLLAEKTKEVDVVAYAYAKAGEIVSLTALLIVASGKIREATVALRDDDDDDSVAKRERKTIYEAVIQEALRSNSLTQSVCSEKRMVLLREIELLQLFGAAVFSESVDKQTSPLISIVQAGDEAVLELFINTNFDVNEKNIEGNTVLQCSLKGSSVPHNQQTRIMNLLIAHGARVNQKNKLGLSAVHFAAANGNLSTLEILLAANPDLVNMKTVIKETPLFFAVKNNHLDCVELLLRCGAITEIHNLRKETELAQSQSAAVSPNASDEETLGFLGDSVPTWLKTFVTWLPLYLRDTSANWKGAGYPLSSFKADFRAVFGMDLDHTSLDFPKHIDFVKYFPRLCQMKVVPIGKLGAATHWVMLPTKSKCSQLKERPPEPLIITKNDSVASPSKPKALSVPPDFKFIQEAHDSKTFKASPQPKAQPPPPLTASYNNNQRQLKHPVLETLTKIRNSTSVFFLREFDFYQSYETCLKEGMCFWCNKNMIRWANFPCRHKLWCSSCKQQITQSTSGEKILEEDHHKCVVCDAKVERFVLSPPFESGHHRILSDRPNNAELATSFLQFLSIRK

SEQ ID NO: 49 - protein, 1042 aa, Arabidopsis thaliana
  Clone ID: AT_T26C19.C1.p4.tg
MLDKYSQKHDIDGFVLLKSVKFYRITKDFKFLLSHLLHHQVQLKFFINIQCRMELKSSKTDVHGGSVFMFDRKVLRYFRKDGHNWRKKKDGKTVKEAHERLKAGSVDVLHCYYAHGQDNENFQRRSYWLLQEELSHIVFVHYLEVKGSRVSTSFNRMQRTEDAARSPQETGDALTSEHDGYASCSFNQNDHSNHSQTTDSASVNGFHSPELEDAESAYNQHGSSTAYSHQELQQPATGGNLTGFDPYYQISLTPRDSYQKELRTIPVTDSSIMVDKSKTINSPGVTNGLKNRKSIDSQTWEEILGNCGSGVEALPLQPNSEHEVLDQILESSFTMQDFASLQESMVKSQNQELNSGLTSDRTVWFQGQDMELNAISNLASNEKAPYLSTMKQHLLHGALGEEGLKKMDSFNRWMSKELGDVGVIADANESFTQSSSRTYWEEVESEDGSNGHNSRRDMDGYVMSPSLSKEQLFSINDFSPSWAYVGCEVVVFVTGKFLKTREETEIGEWSCMFGQTEVPADVISNGILQCVAPMHEAGRVPFYVTCSNRLACSEVREFEYKVAESQVFDREADDESTIDILEARFVKLLCSKSENTSPVSGNDSDLSQLSEKISLLLFENDDQLDQMLMNEISQENMKNNLLQEFLKESLHSWLLQKIAEGGKGPSVLDEGGQGVLHFAASLGYNWALEPTIIAGVSVDFRDVNGWTALHWAAFFGRERIIGSLIALGAAPGTLTDPNPDFPSGSTPSDLAYANGHKGIAGYLSEYALRAHVSLLSLNDKNAETVEMAPSPSSSSLTDSLTAVRNATQAAARIHQVFRAQSFQKKQLKEFGDKKLGMSEERALSMLAPKTHKSGRAHSDDSVQAAAIRIQNKFRGYKGRKDYLITRQRIIKIQAHVRGYQFRKNYRKIIWSVGVLEKVILRWRRKGAGLRGFKSEALVEKMQDGTEKEEDDDFFKQGRKQTEDRLQKALARVKSMVQYPEARDQYRRLLNVVNDIQESKVEKALENSEATCFDDDDDLIDIEALLEDDDTLMLPMSSSLWTS

SEQ ID NO: 50 - protein, 586 aa, Arabidopsis thaliana
  Clone ID: AT_F27K19.C1.p160.tg
MEKDSIMCSGPKSNLCSSRTLTEIESRQKEEETMLLLEFAACDDLDSFKREVEEKGLDLDESGLWYCRRVGSKKMGLEERTPLMVAAMYGSIKVLTFIVSTGKSDVNRACGEERVTPLHCAVAGCSVNMIEVINVLLDASALVNSVDANGNQPLDVFVRVSRFVASPRRKAVELLLRGGGVGGLIDEAVEEEIKIVSKYPADASLPDINEGVYGSDEFRMYSFKVKPCSRAYSHDWTECAFVHPGENARRRDPRKYPYTCVPCPEFRKGSCPKGDSCEYAHGVFESWLHPAQYKTRLCKDETGCARKVCFFAHKREEMRPVNASTGSAVAQSPFSSLEMMPGLSPLAYSSGVSTPPVSPMANGVPSSPRNGGSWQNRVNTLTPPALQLNGGSRLKSTLSARDIDMEMEMELRLRGFGNNVEETFGSYVSSPSRNSQMGQNMNQHYPSSPVRQPPSQHGFESSAAAAVAVMKARSTAFAKRSLSFKPATQAAPQSNLSDWGSPNGKLEWGMKGEELNKMRRSVSFGIHGNNNNNAARDYRDEPDVSWVNSLVKDSTVVSERSFGMNERVRIMSWAEQMYREKEQTVV

SEQ ID NO: 51 - protein, 438 aa, Arabidopsis thaliana
  Clone ID: AT_F7A19.C1.p9.tg
MSSDSPAAGDGGEQAAAGTSVPSPSYDKQKEKARVSRTSLILWHAHQNDAAAVRKLLEEDPTLVHARDYDKRTPLHVASLHGWIDVVKCLLEFGADVNAQDRWKNTPLADAEGARKQKMIELLKSHGGLSYGQNGSHFEPKPVPPPIPKKCDWEIEPAELDFSNAAMIGKGSFGEIVKAYWRGTPVAVKRILPSLSDDRLVIQDFRHEVDLLVKLRHPNIVQFLGAVTERKPLMLITEYLRGGDLHQYLKEKGGLTPTTAVNFALDIARGMTYLHNEPNVIIHRDLKPRNVLLVNSSADHLKVGDFGLSKLIKVQNSHDVYKMTGETGSYRYMAPEVFKHRRYDKKVDVFSFAMILYEMLEGEPPFANHEPYEAAKHVSDGHRPTFRSKGCTPDLRELIVKCWDADMNQRPSFLDILKRLEKIKETLPSDHHWGLFTS

SEQ ID NO: 52 - protein, 587 aa, Arabidopsis thaliana
  Clone ID: AT_F9H3.C1.p12.tg
MGKVQEFEKVMEENEIPVLDQVTFQGNTILHLAAIYGHDHLVRRILAYELNILRNWKRGLNCNFVPSFSHYQTLLVRRNYKGDLALHVAAAAGHKLIVGLLIDCLRQLPQDITMVIGSEQMVIGNIFRVSNNDGNTALHLSLKGNHVSVSLQLVREDRSTCFLLDKEDVSPLYMAAEAGYVSLVEHMLRGLDASFVGKSVLCAAVKSQNLDILTAVLESDSDLVESRDEDGRTPLATAASIGYDIGVQHMLTRFASSTQGQNVLHVAAKSGNARAVGYLLRKSDVKRLINEQDIEGNTPLHLASSNSHPKVWLIWMALVAAGTTRAPRVHLRADIPGLTTDEDLILKIHKDRVNTLLVVATLVATMAFAAGLSVPLGYNSTEFKSNVKHSYEESAFHAFVICNSIAVYTAVISTVALIGTQLADLKCMLTTFKFIVPLLGFSIIAMSLAFVAGLYLVLGHHYWLAIFVLASGGFYLMALLLLIIPYASPYTFTLSRSLNSLVQNMSKEDVDSVNQLVPAPTEELALIKAIQVNRCIQGNIGVTSLSYYLLKHVAPINVLLHLKLWNHYSLVFSGHLYDGPKKTYSQL

SEQ ID NO: 53 - protein, 174 aa, Arabidopsis thaliana
  Clone ID: AT_maf19.C1.p230.tg
MLQEPSAAFSLRRNSFRRRSPRSNVDDRGWNPLHIKARKGDLKSVKQLLDQGMDVNALAWGPKSKGVSALHLAAEGGHIEVMDLLLERGANIDAKTWGSCGWTPLHAAAKERKREAVKFLVENGAFLADDITDTRFNPPVHYCHGLEWAYEEMKKLNSESSSSSGGDTSSSSDN

SEQ ID NO: 54 - protein, 573 aa, Arabidopsis thaliana
  Clone ID: AT_F12G12.C1.p160.tg
MMMQEKSHLKSLEKKKMVAPIIDAILANDVSTLLALAEGNLSVLRERYHWDSLGGTVLHLATELGHKEIVEAIIKLCPSLVGVTNLDGDTPLHFAARWGHATIVAQILASGYAEFTPVNGRGETAFVVACRYTNPDVASLILEETSSITIGEFYATFVLGEYTDIARRMLERFPKLAWNADGELSTPLHHACNANNLEITKMLLEIDESLAERVNKDGFTPLHLAAMKCSIPILKEFSDKAPRYFDILTPAKETVFHLAAEHKNILAFYFMAESPDRNNLLHQVDRYGNTVLHTAVMSSCYSVIVSITYETTIDLSAKNNRGLKAVDLINVDDEDYSKISRWLRFDAKQIRSLSDPNHQQGNKNMGVLSEYKKMQIFETPSKRESKMHAEALLNARNTITIVAVLIASVAFTCGINPPGGVYQEGPYKGKSTAGRTLAFQVFSISNNIALFTSLCIVILLVSIIPYRTRPLKNFLKLTHRILWVAVASMALAYVSAASIIIPHVEGKRWLFTTVLSISTLMLGGLFAFMTYKVIRHWLKKMTFNPMMIIMSAFTSISIGVDWLAAGSDGYYFY

SEQ ID NO: 55 - protein, 652 aa, Arabidopsis thaliana
  Clone ID: AT_K5F14.C1.p6.tg
MKINKQGQTAFILACLNNHLDAALTLVENMRSMTMVELDAAFTGQQPVIIDKMLEKFPSLVLDVDEEQSTLLHKAVTQRNEEYATKVIDLCPSLVSVTNVDGNTPLHLAAEIGNINILWKMLETGEAECMKINKQGQTAFILACLNNNVNSARILVEGTSSMTMVELNAAFSEQQQVIIDSILEKFPNLILDADEEQSTLLHKACKSGNLEMARTLLDVDVNQEIAEKVDKDGLTPLHRAVINGSVEILKEFLCKAPSSFNITTQGTIETVFHLAAKYQKTKAFIFMAQSANIRQLLYSLDAEDNTVLHVAASVDSTSLVRHILSETTIDVTLKNKKGFAAVDLIDKEGVDFPLLSLWFRDEAEKIQRPARYVKFAHEPVELIRNTNNGEKLSSESRAMDLLREGRDPRNKEREMHSESLQNARNTITIVAVLIASVAFTCGINPPGGVHQDGPFIGKATAGRTLAFKIFSVANNIALFTSLSIVTLLVSIISYRTKALKMCVVIAHKMMWLAVASMATAYAASAWITVPHNEGSKWLVYTTSAIASVALGSMFVYVSFMMVKHILKKDKLRRNQSHGKTPSTTLDMEAAGRQEASLTKLLVITHRLMWVDVAAMESAYLAASSITLPHFGDVMLLCYRWLDVRRYVCLNFG

SEQ ID NO: 56 - protein, 664 aa, Arabidopsis thaliana
  Clone ID: AT_F28J7.C1.p8.tg
MPPTYFPLRWESTGDQWWYATPIDYAAANSQYDLVRELLRIDSNNLIKLTSLRRIRRLETVWDDDSQFHDVAACRSRVARKLLAACDEGGSPGSKRNTLIRSGYGGWLIYTAASAGDLAFVHDLLERNPLLVFGEGEYGVTDILYAAARSKNDDVFRLIYDFAVTPRFGTGGIEQQTGEIPAAYKWEMKNRAVHSASRGGNLILLKELLSDCSVEHVLAFRDKQGSTILHSAAGKGKTQVVKELVASSYHLVDAVDNQGNTALHVAAYRGHADLVDVLISASPSLISARNNAGDTFLHAGISGFQTPAFERLDKHTELMNRLITSAASKSQGDFVNYRNNEGRTALHLAISGNVPLEFVEMLMSVKSIDINIRDNAGMTPLDLIRQKPLSPTSDLLFRRLVSAGGMFSCRDQSITSVVASHLKDRGNFYSPGARFKTSDAEMFLSTRLEVAPEKIGVVVPRHVRSSSCCIEIGQLNVMDENHHLKKCRNASVNSTTERLKSVFHWPRVKKQPGHSKNNSDISIISTTLETQETPVPLRQRFSKSSTSSLDPPNNNKRTLAVRSNQSSPRAKKKRFGSVRSRSSSFSKISIHSSSTSSTSSMVDLKQKGVLIDTSIAGPSGLKRSEPVKNKVSEKQGSVRSRLKSHYFCFGTSALSVKTPATVLV

SEQ ID NO: 57 - protein, 491 aa, Arabidopsis thaliana
  Clone ID: AT_F13H10.C1.p8.tg
MSNLEESLRSLSLDFLNLLINGQAFSDVTFSVEGRLVHAHRCILAARSLFFRKFFCGTDSPQPVTGIDPTQHGSVPASPTRGSTAPAGIIPVNSVGYEVFLLLLQFLYSGQVSIVPQKHEPRPNCGERGCWHTHCSAAVDLALDTLAASRYFGVEQLALLTQKQLASMVEKASIEDVMKVLIASRKQDMHQLWTTCSHLVAKSGLPPEILAKHLPIDVVTKIEELRLKSSIARRSLMPHNHHHDLSVAQDLEDQKIRRMRRALDSSDVELVKLMVMGEGLNLDESLALHYAVESCSREVVKALLELGAADVNYPAGPAGKTPLHIAAEMVSPDMVAVLLDHHADPNVRTVGGITPLDILRTLTSDFLFKGAVPGLTHIEPNKLRLCLELVQSAAMVISREEGNNSNNQNNDNNTGIYPHMNEEHNSGSSGGSNNNLDSRLVYLNLGAGTGQMGPGRDQGDDHNSQREGMSRHHHHHQDPSTMYHHHHQHHF

SEQ ID NO: 58 - protein, 457 aa, Arabidopsis thaliana
  Clone ID: AT_T20K14.C1.p110.tg
MDQRSLEAAAKSGNIDLLYELIHEDPYVLDKTDHVPFVNTPLHVAAVNGKTEFAMEMMNLKPSFARKLNADGLTPLHLAVEHGHFWLVLEVVKVDPSLVRIKGRHGMTPLLVAVSRKKIDLMSEFFLGCPESIVDANVNGENALHIAVNNYDQREGLSVLKVLMGWILRLCQKDAEWIETRVINRRDKDGNTPLHLAAYEINRQAMKLLLESSKINVNIENKNGLTVFDIAVLHNNREIERMVKRHGGKRSVSLVKIKTTSDILASQLSWRESRRTKKIRFYSWISEERRNALLVVATLIVTATYQTVLQPPGGVSDGGGQKSGTSGPKAGSVVMDEVYFIWLWLWNSAGFCFAIEMMIRLLSLGQESMFWYYPLFVPMVLAYSVAGDVIKPNARAYTIAGVGAIVVLIIWGLVVWFWEWVQSKRTKQRGPKSGLVWEGFTTLDQARGVAPNRYVIR

SEQ ID NO: 59 - protein, 192 aa, Arabidopsis thaliana
  Clone ID: AT_T1O16.C1.p16.tg
MDSSEIEVVPLDSNSHQSPTESPTITDVFSASAYGDLHQLKHFVEHNGSSVSLPDDNGFYALQWAALNNSLHVAQYIIQHGGDVNSADNIQQTPLHWAAVKGSIDVADLLLQHGARIEAVDVNGFRACCCCDHRLQILVRFCRSTTCFVVQAVHVASQYGQTAFVNHIIVDYAADYNALDIEGRSPLHWYGY

SEQ ID NO: 60 - protein, 499 aa, Arabidopsis thaliana
  Clone ID: AT_F28I8.C1.p22.tg
MSPIENSSSWTLESDLEDLDLDLQDYKPSVPLKKVPNGDIFEASRAGDVDRLRYLVETGVNVNARDRWDSVALYYACLAGHIDSARLLLENGAICSEHTFDGDRCHYASLNLRIRKLLKAFEARPPPLAPLQASLRDTFLGCCHNRDYLQQEEANLDVSDTLSEFGSSNYFPPDVMFYVQGRPIEAHRVILSARSPFFKQKFENEWKDRREVRFSKEKLSLEISVDDMEDLVRICKVCKCESLQKIIEKELIHQRYAEYKTHRDLDNSMKRFILQGISLPEEDRLPASLHRILRVSLAKSFVGDVIDSSVGDTRVGDSVESLADVCVRVDKRNFYCHQAEEIFDVASRYLLFPLKRAVADALLPHLETATPAELCQWLVLSDMYGVLKIREYCLDLVACNFEAFVETHEFRAMLLTLPPPSGDSSLRTTVPSAPGAMMTTDQGNLLDDLREKWLEAEALELDMRDESALIFDKRLAMLVEIAEREKSESEAEDYKDTSA

SEQ ID NO: 61 - protein, 637 aa, Arabidopsis thaliana
  Clone ID: AT_F9H3.C1.p9.tg
MLTRDEIVDLRNTTYQSISQALWSWFCKHLEILKLGKAFPEPSSIKRQIINMGRSDLDFDRQKKDASSRMFYADETGRTHSLDLSTLFNDTSETVPMGPKTIAAVRAGDETYLRDMKFDVNIALSSVNDHGNTMLHLAAAAGHTDLVCYILNAYPGLLMKSNSMGEVALHVAAGAGHLAVVEALVSFIKDISCNKPGVAKKIYFAKDRHQDNALHVSLKRKHLKVASCLVCAEQSLSFVANNDGVSPLYLAVEAGQADLAKTMWQHSNNGSSSTSTLASKIGGRSIVHGAMKARRKDKALDSVYVSDDDGSFPIHMAVKYGYVKILKAILKRCPDALELLDRENQNVLHVAAKNGKIEVLKFILRCCKDKNKEKLINEEDANGNTPLHLATKNWHPKVVSMLTWDNRVDLKTLNHDGVTALDIAEKNMDSSYTFFERLTWMALISAGAPRGPKLILSTPVTQNSDGGKYKDRVNTLLLVATLVATMTFTAGFTLPGGYNGSVPNFGMATLAKKTAFQVFLVFDTLAMYCSIITIVALIWAQLGDLSLIMKAFNLALPLLGLALTSMSIAFMAGTYAAVYGLLIVGVLTSSYLDFLLLFVNEDDDEKNYTTGSSHTCVKSGESMGSSSGVQAEKSKVL

SEQ ID NO: 62 - protein, 543 aa, Arabidopsis thaliana
  Clone ID: AT_F24B9.C1.p17.tg
MEGEEDTVAGSSIPKKKMMKQLTGKRDDTLLHSAVRHGNKDRVVEILTKTRESELNQLLGKQNQSGETALYVAAEYGDVEIVKEMINCYDLALVEIKARNGFDAFHIAAKQGDLDVLKVLAEAHSELAMTVDLSNTTALHTAATQGHTEVVNFLLELGSSLAGIAKSNGKTALHSASRNGHVKVIKALLASEPAIAIRMDKKGQTALHMAVKGTNVEVVEELIKADRSSINIADTKGNTALHIAARKGRSQIVKLLLANNMTDTKAVNRSGETALDTAEKIGNPEVALILQKHGVPSAKTIKPSGPNPARELKQTVSDIKHEVHNQLEHTRLTRKRVQGIAKQLNKMHTEGLNNAINSTTVVAVLIATVAFAAIFTVPGQYVEDTSKIPDGHSLGEANIASTTPFIIFFIFDSIALFISLAVVVVQTSVVVIESKAKKQMMAVINKLMWLACVLISVAFLALSFVVVGEEEKWLAIWVTAIGATIMITTLGTMCYWIIQHKIEAANLRNIRRSSINSISGSWGIPQLTDSDILQNECKKMYAI

SEQ ID NO: 63 - protein, 656 aa, Arabidopsis thaliana
  Clone ID: AT_T6K12.C1.p24.tg
MPPPIFPLRWESTGDQWWYASPIDCAAANGLYDVVIELLHQDTNLLVKLTSLRRIRRLETVWDDGDGNNFHVALNRSRVARRLLEECEIGNGDNSLIRAGYGGWLLYTAASAGDLEFVKKLLERDPLLVFGEGEYGVTDILYAAARGRSDDVFRLLLDFALLPADIAGVEEIDGEKLTEKQLIVKEEMVKRGVHSAARGGHVAILDELLLANKYDAVAKLRDAYGSTLLHSASSRAQIQVVKYLISKYDSIMEVKDSHGNTALHIAAYKGHLDVVEALINESPPLISIVNGDGDTFLHTVVSGFAASGFKRLDRQMELLKMLVSRSWSVDFSEIVNVRNCNGRTVIHLAVMDNLNAVRPDVVEILMRIPGVDLNVVDSYGMTAVDLLKRQTPQTVVSDLLIKRLVSAGGRSNCGEKVSRLREERYGFCGSPGTSFEISDSEIFLFTAARTDKTAANAELSPDRESFDGISECSTEISTHSKRKRRGGGGTGARLKLLLRWAKREESEENRRLSGDVNNRRVPLREMYSPSSCSRGKAFPMRTESGDLPSLSVRLKFTQGLMKGVVVQESPRFVFSPPAVSDYSRAPSSACSTPFQTFSSELGRRTPAMKKQGSFMNRYLCFGGKGLAIDGSSEMISNGSGHRPQSFKRVMSSLVSS

SEQ ID NO: 64 - protein, 590 aa, Arabidopsis thaliana
  Clone ID: AT_T2E22.C1.p133.tg
MAASSYVDGERDMEKGGMILLQSSENQNPMIDPSPTPSPSATATAPALVLSNSGKRMDQAGKKKYVKQVTGRHNDTELHLAAQRGDLAAVQQILKDINSQMEGILSGEEFDAEVAEIRASIVNEVNELGETALFTAADKGHLDVVKELLKYSSRESIAKKNRSGYDPLHIAAIQGHHAIVEVLLDHDATLSQTFGPSNATPLVSAAMRGHTEVVNQLLSKAGNLLEISRSNNKNALHLAARQGHVEVIKALLSKDPQLARRIDKKGQTALHMAVKGQSSEVVKLLLDADPAIVMQPDKSCNTALHVATRKKRAEIVELLLSLPDTNANTLTRDHKTALDIAEGLPLSEESSYIKECLARSGALRANELNQPRDELRSTVTQIKNDVHIQLEQTKRTNKNVHNISKELRKLHREGINNATNSVTVVAVLFATVAFAAIFTVPGGDNNDGSAVVVGRASFKIFFIFNALALFTSLAVVVVQITLVRGETKAEKRVVEVINKLMWLASMCTSVAFLASSYIVVGRKNEWAAELVTVVGGVIMAGVLGTMTYYVVKSKRTRSMRKKVKSARRSGSNSWHHSDFSNSEVDPIFAI

SEQ ID NO: 65 - protein, 421 aa, Arabidopsis thaliana
  Clone ID: AT_F13C5.C1.p120.tg
MAPEKIPEPSVHSEEEVFEDGEEIDGGVRLMYLANEGDIEGIKELIDSGIDANYRDIDDRTALHVAACQGLKDVVELLLDRKAEVDPKDRWGSTPFADAIFYKNIDVIKILEIHGAKHPMAPMHVKTAREVPEYEINPSELDFTQSKEITKGTYCMAMWRGIQVAVKKLDDEVLSDDDQVRKFHDELALLQRLRHPNIVQFLGAVTQSNPMMIVTEYLPRGDLRELLKRKGQLKPATAVRYALDIARNILRDDSGHLKVADFGVSKLVTVKEDKPFTCQDISCRYIAPEVFTSEEYDTKADVFSFALIVQEMIEGRMPFAEKEDSEASEAYAGKHRPLFKAPSKNYPHGLKTLIEECWHEKPAKRPTFREIIKRLESILHHMGHKRQWRMRPLTCFQNFEHKKKHNWDLSSHDGSSSGSHL

SEQ ID NO: 66 - protein, 1007 aa, Arabidopsis thaliana
  Clone ID: AT_T5E8.C1.p210.tg
MVDRRSFGSITPPLQLDMEQLLSEAQHRWLRPTEICEILQNYHKFHIASESPTRPASGSLFLFDRKVLRYFRKDGHNWRKKKDGKTIREAHEKLKVGSIDVLHCYYAHGEANENFQRRCYWMLEQHLMHIVFVHYLQVKGNRTSIGMKENNSNSVNGTASVNIDSTASPTSTLSSLCEDADTGDSQQASSVLRPSPEPQTGNRYGWTPAPGMRNVSQVHGNRVRESDSQRLVDVRALDTVGNSLTRFHDQPYCNNLLTQMQPSNTDSMLVEENSEKGGRLKAEHIRNPLQTQFNWQDDTDLALFEQSAQDNFETFSSLLGSENLQPFGISYQAPPSNMDSEYMPVMKILRRSEDSLKKVDSFSKWAIKELGEMEDLQMQSSRGDIAWTTVECETAAAGISLSPSLSEDQRFTIVDFWPKSAKTDAEVEVMVIGTFLLSPQEVTKYNWSCMFGEVEVPAEILVDGVLCCHAPPHTAGHVPFYVTCSNRFACSEVREFDFLSGSTQKINATDVYGTYTNEASLQLRFEKMLAHRDFVHEHHIFEDVGDKRRQISKIMLLKEEKEYLLPGTYQRDSTKQEPKGQLFRELFEEELYIWLIHKVTEEGKGPNILDEDGQGILHFVAALGYDWAIKPVLAAGVNINFRDANGWSALHWAAFSGREETVAVLVSLGADAGALTDPSPELPLGKTAADLAYANGHRGISGFLAESSLTSYLEKLTVDSKENSPANSCGEKAVQTVSERTAAPMTYGDVPEKLSLKDSLTAVRNATQAADRLHQVFRMQSFQRKQLCDIGDDEKIDISDQLAVSFAASKTKNPGQGDVSLSCAATHIQKKYRGWKKRKEFLLIRQRIVKIQAHVRGHQVRKQYRTVIWSVGLLEKIILRWRRKGNGLRGFKRNAVAKTVEPEPPVSAICPRIPQEDEYDYLKEGRKQTEERLQKALTRVKSMVQYPEARDQYRRLLTVVEGFRENEASSSASINNKEEEAVNCEEDDFIDIESLLNDDTLMMSISP

SEQ ID NO: 67 - protein, 850 aa, Arabidopsis thaliana
  Clone ID: AT_k22g18.C1.p100.tg
MHFAKLDDSPMFRQQMQSMEESAELLRLRCLRFYKGCRKYTEGLGEGYDADIGFVNALESFGGGHNDPVCVAFGGPVMTKFTIALREIGTYKEVLRSQVEHMLSDRLLQFVNGDVHEVKEARKRFDKATITYDQAREKYLSLRKSTRLDVAATIEEDLHSARTTFEQARFHLVSALSNAESKKRFEFLEAVSGTMDAHLRFFKQASFFLKTIFRARPQITLDPIRLGYELLHQMEPFINQVLAYAHQSRECANYEMASLNERMQEYQRQVDRETRNSCVSPTGDGMRHNSRNSQKVIEAVMQSAAKGKVQTIRQGYLSKRSSNLRGDWKRRFFILDSRGMLYYYRKPWNWSSGNGSRSVVHRNMASENSPGLLSRWLSSHYHGGVHDEKPVARHTVNLLTSTIKVDADQTDLRFCFRIISPTKVYTLQAENAQDQMDWIEKITGVIASLLSFQTPERAIMRLSTVDGGDTFSASDSGSLADPYDIEQAESGESTVEHPMTGGNRSRFSGCLQQHDMVKTEKPIDVLTRVLGNERCADCGAPEPDWASLNLGVLICIECSGIHRNLGVHISKVRSLTLDVKVWEPSVLTLFQSLGNVYVNSVWEELLNSESRTSSASRSSGTPKSDRPRKLLVRKPGFNDPISVKELFIHAKYSERIFVRKAIDSQHFQAVFQEIWENVRANDKKSVYRHIVCSEADVNALRGQASYTVSLPLSKMMQMEETLEAKFKSIEEEFQENPAGYSNSRGDGESMVREETSNDCSLLHLACLSADIGMVELLLQYGAKINATDSKGRTPLHHCIISRRYAIARLLLMRGGDPNAVDKDSNIPVKYASQTDLNDSELIALLTDSKR

SEQ ID NO: 68 - protein, 462 aa, Arabidopsis thaliana
  Clone ID: AT_K14B15.C1.p17.tg
MGQQQSKGELLYQQVSYGNSEGIRALHRDGGDLEWMDREGKTPLILACMNSELFDVAKTLIELGSNVNAYRPGRHAGTPLHHAAKRGLENTVKLLLSHGANPLVLNDDCQTPLEVARVKGFSNVVRAIEKHICLFSGWMREFYGPTFLDLFAPQLLSRRVWVVIVPTGSRNPTKPFKLELVVYASLQDAQPRTVMPLWKANLEEPKAKQSDTSVMIVDNSTIPSRRMKKRRVCASHGRRRPQVVRQTRLKFAPSTEGDSQQLKWFCDACKGIPQPMHPPVFLQAPPSAPPPPSEDGLAMGMNASLHTTMSDPSNLNHHSIGQASSSSGPSSSTAPPSGKASAFGFNSHGIGIVLESSPSAPPLTDDDIATVDDGPIHYPSIDSTPVDLPSAASLPASTEGERKEDGNTGTCAICLDAPSEAVCVPCGHVAGCMSCLKEIKSKNWGCPVCRAKIDQVIKLYRV

SEQ ID NO: 69 - protein, 1073 aa, Arabidopsis thaliana
  Clone ID: AT_F20H23.C1.p18.tg
MNLQTPRKSSLSGSRKDLWFAIREGSLVDVDSALSILKKTGGNINLRNAYGLTPLHIAVWRNHIPIVRRLLAAGADPDARDGESGWSSLHRALHFGHLAVASVLIDSGASFTLEDIKLRTPVDLVSGPVAQVIGEQQSSVATEVFSWGNGANYQLGTGNQHVQKVPGRVDSLHGCFIKLVSAAKFHSVAISTHGEVYTWGFGRGGRLGHPEFDIHSGQAAVITPRQVISGLGSRRVKAVAAAKHHTVIATEGGDVYTWGSNRESDVVCDALVEGQLGYTSVDTQATPRKVTSLKAKIVAVSAANKHTAVVSDCGEVFTWGCNKEGQLGYGTSNSASNYSPRLVDYLKGKVFTAIASSKYHTLVYTWGHRLVTPRRVIISRNLKKAGNTLLNFHRRRPLRLTAIAAGMVHSLALAEDGAFFYWVSSDSNLRCQQLHSLHGKTVVSISAGKYWASAVTSTGEVYMWDGKNGKDIAPSLSRLHNLKRATTVAVGETHLLVVGSLYHPAYAPIVLKKSQTLQADKCREEENEELDEGFMFDDVESVNVLQSVQYDNPKERIVPSLKSLCEKVAAECIVEPRNAIQLLEIADSLGAEDLKKYCEDIVIRNLDFILTFSPQSIANTSPDVLANLEKLLDDRSSETWSSRPLPTPTATFPVVIDSEEEESESDILRTRDSHVKHFSSIGGTRMDSFLQPEDELTQHNSKEVRALRKKLQQIEILEAKQSRGQLLDGQQIAKLQKKLDIESSLVELGIPVEEFPEAKATTALPLEGKANKKGKKKKKGNQRFVQVETFPEFGEVKVEIDTMQDKEIEEICEAIKPKGGKTMLDTTMISGFPKESDFVSLSQKKDNPPDSPRSKKLATAANKKKNRKGGLSMFLTGALDDVPKPVVAPPPRPKIEGPVWGGAKISKGLSSLRDIQDEQSKTRSHEPVRTTKNQSGDDSPGKSEGKILLSSFLTSKPIPMEPAKSLQQSDVEKGTPPWASSETPRKLSRPSLRDIQMQEVKKQQSLSHSPKTKTSGFTVATGQGSPSDSPGTNRWFKPEIDAPSAIRSIQIEEKAMKDLRRFYSSVKVVRNQP

SEQ ID NO: 70 - protein, 282 aa, Arabidopsis thaliana
  Clone ID: AT_MIK22.C1.p14.tg
MSIAPPTIDRLPRDPLCKLFIVLPKEKHIEESHVSTKMNNLNKSKEPPKGDIIVEVGETCRSCPNKHHSPLHNVQRNFSCDDKLRAKGVQLYQAALKGDWKAANGIIIEQKYIIYQKITSKSETVLHIAVAAKHEGFVRNLLGSLESNDLALRNVDGNTALCFAAASGVVEIAKMLIEKNKDLPMIRGGGKTTPIHMAALFGHGEMVKYLYKNTRFREFNDEEFVNLFHAVISADIYVRSIHRCSSGDVRERGKEKSTSPLDKYKQRDSLALDGSQAFCSWP

SEQ ID NO: 71 - protein, 754 aa, Arabidopsis thaliana
  Clone ID: AT_F13M7.C1.p20.tg
MASSTIDVTKYGHSPVHHAVVTRDYAGLKKLLSALPKMRDPSEVQNEAASVAEETKADSIAAVIDRRDVVNRDTALHLAVKLGDETSAEMLMAAGADWSLQNEHGWSALQEAICGREERIAMIIVRHYQPLAWAKWCRRLPRLVATMHRMRDFYMEITFHFESSVIPFISRVAPSDTYKIWKRGANLRADMTLAGFDGFRIQRSDQTILFLGDGSEDGKVPSGSLLMISHKDKEIMNALDGAGAAASEEEVRQEVAAMSKTSIFRPGIDVTQAVLFPQLTWRRQEKTEMVGQWKAKVYDMHNVVVSIKSRRVPGAMTDEELFSNTNQENDTESEDLGDILTEDEKRQLELALKLDSPEESSNGESSRISQKQNSCSFEDREIPVTDGNGYCKQEKKGWFSGWRKREEGHRRSSVPPRNSLCVDEKVSDLLGDDDSPSRGGRQIKPGRHSTVETVVRNENRGLRDSSKASTSEGSGSSKRKEGNKENEYKKGLRPVLWLSERFPLQTKELLPLLDILANKVKAIRRLRELMTTKLPSGTFPVKVAIPVIPTIRVLVTFTKFEELEAIEDEFVTPPSSPTSSVKNSPREETQSSSNPSSSWFQWIKTPSQRPSTSSSSGGFNIGKAENDQDPFAIPRGYNWITAEEKKKKVQEKNKAKKGKLPKLKLLNMSNIFAISNIRPAYFPLFKAFLGLRLDLEVAFETARLAGDGSAASPAVSLRRLMLSPPSSSSSSEAKLTIFVCRVGYINNVVRTSSP

SEQ ID NO: 72 - protein, 750 aa, Arabidopsis thaliana
  Clone ID: AT_T31B5.C1.p120.tg
MEESAEILRERSLKFYKGCRKYTEGLGEAYDGDIAFASALETFGGGHNDPISVAFGGPVMTKFTIALREIGTYKEVLRSQVEHILNDRLLQFANMDLHEVKAREKFLSLRKGTKSDVAAALEQELHTSRSMFEQARFNLVTALSNVEAKKRFEFLEAVSGTMDAHLRYFKQGYELLHQMEPYINQVLTYAQQSRERSNYEQAALNEKMQEYKRQVDRESRWGSNGSNGSPNGDGIQAIGRSSHKMIDAVMQSAARGKGSGSQLSGQRNSSELGSGLLSRWLSSNNHGHGGVHDEKSVARHTVNLLTSTIKVDADQSDLRFCFRIISPTKNYTLQAESALDQMDWIEKITGVIASLLSSQVPEQRLPGSPMGSGHHRSASESSSYESSEYDHPTTEEFVCERSFLGYNERPSRSFQPQRSIRKGEKPIDALRKVCGNDKCADCGAPEPDWASLNLGVLVCIECSGVHRNLGVHISKVRSLTLDVKVWEPSVISLFQALGNTFANTVWEELLHSRSAIHFDPGLTVSDKSRVMVTGKPSYADMISIKEKYIQAKYAEKLFVRRSRDSDFPQSAAQQMWDAVSGNDKKAVYRLIVNGDADVNYVYDQTSSSSLTLSRVILVPERPKREDVLLRLRNELLDRTGSSSNISPEGSGGSSLLHCACEKADLGMVELLLQYGANVNASDSSGQTPLHCCLLRGKVTIARLLLTRGADPEAMNREGKTALDIAAESNFTDPEVLALLSDTNGYNHRQC

SEQ ID NO: 73 - protein, 652 aa, Arabidopsis thaliana
  Clone ID: AT_F9H3.C1.p13.tg
MKNESRTSEEISKLGIFSGVGFSMGRPDVHLDRRVAENHQAIPRNNVRSTPSLDLSTLFDETSETKPMDPKTMAAVRAGKENYLRSNNSYISVAPTLVNDRGNTILHLAASSGHVSLVRYIIQKCPGLLLKSNMMGEVALHLAAEAGHLDVVWNLIDFINDISCTNLPVAKRIYFAKNKNQDTALHVALKGKHEVVASYLVSAAKSLSFVANRDGFSPLYLAIEAGHTSLVTTMCHGTNELSSKVGGRSIVHAALKANRKDILDALLSKDASLINLRDEGRTSLSFGASIGYYQGFSYLFDKNRDKVYVSDDDGLFPTHMAAKYGHVQILEEILKHCPEAIELLDRDGQNILHLAAKYGKLKVIKFILSCCKDKNKKKLINEQDVNGNTPLHLATINWHPKVVSMFTWDHRVDLKKRNYIGFTALDVAEENIDSSYIVHQRLTWMALINAGAPKSSTPITENLRSFKKPDGGKYKDRVNTLMLVATLVATMTFTAGFTLPGGYNDSFPHLGMAVLAKRTAFQVFLVCDTLAMYSSIITIVALIWAQLGDLSIILKAFNIALPFLGLALTSMSIAFMAGTYVAVSHLPLLGYFVLGIGIIFLLVLLLLLVPYVSPYAHAQPLLRHIFYYPYFLKLLAAGDNKNIVDVYTASDE

SEQ ID NO: 74 - protein, 338 aa, Arabidopsis thaliana
  Clone ID: AT_MYN8.C1.p8.tg
MADWYQLAQSIIFGLIFAYLLAKLISILLAFKDENLSLTRNHTTQSEYENLRKVETLTGISGETDSLIAEQGSLRGDEDESDDDDWEGVESTELDEAFSAATAFVAAAASDRLSQKVSNELQLQLYGLYKIATEGPCTAPQPSALKMTARAKWQAWQKLGAMPPEEAMEKYIDLVTQLYPAWVEGGSKRRNRSGEAAGPMGPVFSSLVYEEESDNELKIDAIHAFAREGEVENLLKCIENGIPVNARDSEGRTPLHWAIDRGHLNVAEALVDKNADVNAKDNEGQTSLHYAVVCEREALAEFLVKQKADTTIKDEDGNSPLDLCESEWSWMREKKDSN

SEQ ID NO: 75 - protein, 1014 aa, Arabidopsis thaliana
  Clone ID: AT_MSJ1.C1.p6.tg
MFSYRVVVSMCFLPFYELVDIKQLLSEAQHRWLRPAEICEILRNHQKFHIASEPPNRPPSGSLFLFDRKVLRYFRKDGHNWRKKKDGKTVKEAHEKLKVGSIDVLHCYYAHGEDNENFQRRCYWMLEQDLMHIVFVHYLEVKGNRMSTSGTKENHSNSLSGTGSVNVDSTATRSSILSPLCEDADSGNRDGWTSAHGNRVKGSNSQRSGDVPAWDASFENSLARYQNLPYNAPLTQTQPSTFGLIPMEGKTEKGSLLTSEHLRNPLQSQTPVQESVPLQKWPMDSHSGMTDATDLALFGQGAHENFGTFSSLLGSQDQQSSSFQAPFTNNEAAYIPKLGPEDLIYEASANQTLPLRKALLKKEDSLKKVDSFSRWVSKELGEMEDLQMQSSSGGIAWTSVECENAAAGSSLSPSLSEDQRFTMIDFWPKWTQTDSEVEVMVIGTFLLSPQEVTSYSWSCMFGEVEVPADILVDGVLCCHAPPHEVGRVPFYITCSDRFSCSEVREFDFLPGSTRKLNATDIYGANTIETSLHLRFENLLALRCSVQEHHIFENVGEKRRKISKIMLLKDEKEPPLPGTIEKDLTELEAKERLIREEFEDKLYLWLIHKVTEEGKGPNILDEDGQGVLHLAAALGYDWAIKPILAAGVSINFRDANGWSALHWAAFSGREDTVAVLVSLGADAGALADPSPEHPLGKTAADLAYGNGHRGISGFLAESSLTSYLEKLTVDAKENSSADSSGAKAVLTVAERTATPMSYGDVPETLSMKDSLTAVLNATQAADRLHQVFRMQSFQRKQLSELGGDNKFDISDELAVSFAAAKTKKSGHSSGAVHAAAVQIQKKYRGWKKRKEFLLIRQRIVKIQAHVRGHQVRKQYRAIIWSVGLLEKIILRWRRKGSGLRGFKRDTISKPTEPVCPAPQEDDYDFLKEGRKQTEERLQKALTRVKSMAQYPEARAQYRRLLTVVEGFRENEVTIASSSSALKNNTEEAANYNEEDDLIDIDSLLDDDTFMSLAFE

SEQ ID NO: 76 - protein, 489 aa, Arabidopsis thaliana
  Clone ID: AT_F20M17.C1.p16.tg
MANVVGQLKRGISRQFSTGSLRRTLSRQFTRQASHDPRRNNMRFSFGRQSSLDPIRRSPDGSNGPQLAVPDNLDATMQLLFVACRGDVEGVQDLLDEGIDVNSIDLDGRTALHIAACEGHVDVVKLLLTRKANIDARDRWGSTAAADAKYYGNMDVFNILKARGAKVPKTKRTPMVVANPREVPEYELNPQELQGIYQVAKWNGTKVSVKILDKDLYKDSDTINAFKHELTLFEKVRHPNVVQFVGAVTQNVPMMIVSEYHPKGDLGSYLQKKGRLSPAKVLRFALDIARHVTFLARLGMNYLHECKPEPVIHCDLKPKNIMLDSGGHLKVAGFGLISFAKLSSDKSKILNHGAHIDPSNYCMAPEVYKDEIFDRSVDSYSFGVVLYEVVPYGFIRFGVILYPMIEGVQPFHPKPPEEAVKLMCLEGRRPSFKAKSKSCPQEMRELIEECWDTETFVRPTFSEIIVRLDKIFVHCSKQGWWKDTFKFPW

SEQ ID NO: 77 - protein, 185 aa, Arabidopsis thaliana
  Clone ID: AT_K5F14.C1.p7.tg
MNLYGSYLDDIADQIPVDRSRSQMIRKYLGKQRKNLDLIDEVVEARLIRQLEANQSILEKTDKHKYDYEEYATILHREEYEEYATKIIDLCPSLVRVANVDGNTPLHLAAEIGNEFILWKMLRCGEADCRKINKQGQTAFILACLNNHVAVALTLLQYMRSMTMVELDAAFSRHQPGLKLSSHKL

SEQ ID NO: 78 - protein, 751 aa, Arabidopsis thaliana
  Clone ID: AT_F9H3.C1.p6.tg
MARRGLRMDNSEAHLDRIEAQRSTDDQHKRRCFPVNVIKNLGTLSSRSFLRRRGDEATPPTTTIDIESVPKFLTTLRLLDLYNHPGEYVAMNSEISSAMRAGNKEFLEKMESYETPMSCFKNNKGDSILHLAAAFGHLELVKSIVSKFPSLLLELNFKDQLPLHVAARDGHLTVVKALVASVTFCSDRLAEEDRERLNPYILKDKNGDTALHSALKDLHEKTKELHEKTKDMHWLRRSKSKSLSNESTHLMETAACLVNANQDVSFLANKDEISPLYLAVEAGNVSLVNAMLNSHVNNVQDKTFNLATQLKGRKSLVHAALKAKNTDVLDVILGKYPSLVKERDEKGRTCLSVGASVGFYQGICKLLDTSTLSIFDCDDDGSFPIHKAVEKGHENVVKELLKRFPDSVEQLNKEGQNIFHISAKSGKSTLFLMEHINKVDTKNHLMEEQDMDGNTPLHLATINWRPKTVRMLTKFLSIRKKLLDKHNSVGLRPLDIAEINLQSDYVFRERMTLMVLLGVYNLRQRGISLLPTSGMTLRSRSEKLGDGEKYKDRVNILLLVAALVATMTFAAGFTMPGGFSSSAPNTGMAILVDDRYLTTFIMNDTIAMLTSVLAIVALIWAQLGDPELAHRAFHLALPALFVALLFMCFTFFYGVLATIQHNIVLSRIISFVFIILFIMTGTLLTPYVIPQVYGLPIIGVLTSSYLDFLLLFVNEDDDEKHYTTGSSHTCVKSGESMGSSSGVQAEKSKVL

SEQ ID NO: 79 - protein, 213 aa, Arabidopsis thaliana
  Clone ID: AT_F13G24.C1.p40.tg
MTPVVIPQNLRVFGPVSLRKYPLSLSSVNSSQFWFICKMLQEQPVALSFRPNSFRRRSMETGVDRDDRGWTQLHIKAREGDLKAVKELLDQGADVNALACGPKSKGMTPLHLAAKGGHIEVMDLLLERGANMEARTSGACGWTPLHAAAKERKREAVKFLVGNGAFLPDDITDSRFNPPVQYCHGLEWAYEERKKLSEDTSLSCGDTSCSSAN

SEQ ID NO: 80 - protein, 221 aa, Arabidopsis thaliana
  Clone ID: AT_T12E18.C1.p20.tg
MAAIEYRGANAVTNFDISNYIDRLKKKGVFPFPVNQANHQEGILVEAKQEVETREAKEEPREEVKQQYVEEPPQEEEEKEEEKAEQQEAEIVGYSEEAAVVNCCIDSSTIMEMDRCGDNNELAWNFCMMDTGFSPFLTDQNLANENPIEYPELFNELAFEDNIDFMFDDGKHECLNLENLDCCVVGRESPPSSSSPLSCLSTDSASSTTTTTTSVSCNYLV

SEQ ID NO: 81 - protein, 196 aa, Arabidopsis thaliana
  Clone ID: AT_F25G13.C1.p130.tg
MITGIPNPNARAAYNPGPAETVTTVIVEKKAIEERSRRTRSKHMHFRSDYSDISPVNSDSISPKYQPPKRRKQHRRKRVHNQEPCLMRGVYYKNMKWQAAIKVEKKQIHLGTFSSQEEAARLYDRAAFMCGREPNFELSEEVIRELKQQSWEEFLNCTRRTITNKKPKSRIEHEDTKINASMPHQPEEEEQDSDKM

SEQ ID NO: 82 - protein, 292 aa, Arabidopsis thaliana
  Clone ID: AT_F26K10.C1.p20.tg
MDFDEELNLCITKGKNVDHSFGGEASSTSPRSMKKMKSPSRPKPYFQSSSSPYSLEAFPFSLDPTLQNQQQQLGSYVPVLEQRQDPTMQGQKQMISFSPQQQQQQQQYMAQYWSDTLNLSPRGRMMMMMSQEAVQPYIATKLYRGVRQRQWGKWVAEIRKPRSRARLWLGTFDTAEEAAMAYDRQAFKLRGHSATLNFPEHFVNKESELHDSNSSDQKEPETPQPSEVNLESKELPVIDVGREEGMAEAWYNAITSGWGPESPLWDDLDSSHQFSSESSSSSPLSCPMRPFF

SEQ ID NO: 83 - protein, 337 aa, Arabidopsis thaliana
  Clone ID: AT_F17J6.C1.p20.tg
MRLDDEPENALVVSSSPKTVVASGNVKYKGVVQQQNGHWGAQIYADHKRIWLGTFKSADEAATAYDSASIKLRSFDANSHRNFPWSTITLNEPDFQNCYTTETVLNMIRDGSYQHKFRDFLRIRSQIVASINIGGPKQARGEVNQESDKCFSCTQLFQKELTPSDVGKLNRLVIPKKYAVKYMPFISADQSEKEEGEIVGSVEDVEVVFYDRAMRQWKFRYCYWKSSQSFVFTRGWNSFVKEKNLKEKDVIAFYTCDVPNNVKTLEGQRKNFLMIDVHCFSDNGSVVAEEVSMTVHDSSVQVKKTENLVSSMLEDKETKSEENKGGFMLFGVRIECP

SEQ ID NO: 84 - protein, 209 aa, Arabidopsis thaliana
  Clone ID: AT_T12C24.C1.p26.tg
MNNDDIILAEMRPKKRAGRRVFKETRHPVYRGIRRRNGDKWVCEVREPTHQRRIWLGTYPTADMAARAHDVAVLALRGRSACLNFADSAWRLPVPESNDPDVIRRVAAEAAEMFRPVDLESGITVLPCAGDDVDLGFGSGSGSGSGSEERNSSSYGFGDYEEVSTTMMRLAEGPLMSPPRSYMEDMTPTNVYTEEEMCYEDMSLWSYRY

SEQ ID NO: 85 - protein, 211 aa, Arabidopsis thaliana
  Clone ID: AT_T12C22.C1.p10.tg
MVKTLQKTPKRMSSPSSSSSSSSSTSSSSIRMKKYKGVRMRSWGSWVSEIRAPNQKTRIWLGSYSTAEAAARAYDAALLCLKGSSANNLNFPEISTSLYHIINNGDNNNDMSPKSIQRVAAAAAAANTDPSSSSVSTSSPLLSSPSEDLYDVVSMSQYDQQVSLSESSSWYNCFDGDDQFMFINGVSAPYLTTSLSDDFFEEGDIRLWNFC

SEQ ID NO: 86 - protein, 166 aa, Arabidopsis thaliana
  Clone ID: AT_F3M18.C1.p26.tg
MAPTVKTAAVKTNEGNGVRYRGVRKRPWGRYAAEIRDPFKKSRVWLGTFDTPEEAARAYDKRAIEFRGAKAKTNFPCYNINAHCLSLTQSLSQSSTVESSFPNLNLGSDSVSSRFPFPKIQVKAGMMVFDERSESDSSSVVMDVVRYEGRRVVLDLDLNFPPPPEN

SEQ ID NO: 87 - protein, 188 aa, Arabidopsis thaliana
  Clone ID: AT_T12C24.C1.p11.tg
MASAGLGSRRKDPVYRGIRCRSGKWVSEIREPRKTTRIWLGTYPMAEMAAAAYDVAAMALKGREAVLNFPGSVGSYPVPESTSAADIRAAAAAAAAMKGCEEGEEEKKAKEKKSSSSKSRARECHVDNDVGSSSWCGTEFMDEEEVLNMPNLLANMAEGMMVAPPSWMGSRPSDDSPENSNDEDLWGY

SEQ ID NO: 88 - protein, 354 aa, Arabidopsis thaliana
  Clone ID: AT_K19E1.C1.p9.tg
MDEYIDFRPLKYTEHKTSMTKYTKKSSEKLSGGKSLKKVSICYTDPDATDSSSDEDEEDFLFPRRRVKRFVNEITVEPSCNNVVTGVSMKDRKRLSSSSDETQSPASSRQRPNNKVSVSGQIKKFRGVRQRPWGKWAAEIRDPEQRRRIWLGTFETAEEAAVVYDNAAIRLRGPDALTNFSIPPQEEEEEEEPEPVIEEKPVIMTTPTPTTSSSESTEEDLQHLSSPTSVLNHRSEEIQQVQQPFKSAKPEPGVSNAPWWHTGFNTGLGESDDSFPLDTPFLDNYFNESPPEMSIFDQPMDQIFCENDDIFNDMLFLGGETMNIEDELTSSSIKDMGSTFSDFDDSLISDLLVA

SEQ ID NO: 89 - protein, 263 aa, Arabidopsis thaliana
  Clone ID: AT_T2I1.C1.p20.tg
MANSGNYGKRPFRGDESDEKKEADDDENIFPFFSARSQYDMRAMVSALTQVIGNQSSSHDNNQHQPVVYNQQDPNPPAPPTQDQGLLRKRHYRGVRQRPWGKWAAEIRDPQKAARVWLGTFETAEAAALAYDNAALKFKGSKAKLNFPERAQLASNTSTTTGPPNYYSSNNQIYYSNPQTNPQTIPYFNQYYYNQYLHQGGNSNDALSYSLAGGETGGSMYNHQTLSTTNSSSSGGSSRQQDDEQDYARYLRFGDSSPPNSGF

SEQ ID NO: 90 - protein, 308 aa, Arabidopsis thaliana
  Clone ID: AT_F20B17.C1.p12.tg
MAKVSGRSKKTIVDDEISDKTASASESASIALTSKRKRKSPPRNAPLQRSSPYRGVTRWTGRYEAHLWDKNSWNDTQTKKGRQGAYDEEEAAARAYDLAALKYWGRDTLLNFPLPSYDEDVKEMEGQSKEEYIGSLRRKSSGFSRGVSKYRGVARHHHNGRWEARIGRVFGNKYLYLGTYATQEEAAIAYDIAAIEYRGLNAVTNFDVSRYLNPNAAADKADSDSKPIRSPSREPESSDDNKSPKSEEVIEPSTSPEVIPTRRSFPDDIQTYFGCQDSGKLATEEDVIFDCFNSYINPGFYNEFDYGP

SEQ ID NO: 91 - protein, 565 aa, Arabidopsis thaliana
  Clone ID: AT_F11M15.C1.p5.tg
MNSNNWLAFPLSPTHSSLPPHIHSSQNSHFNLGLVNDNIDNPFQNQGWNMINPHGGGGEGGEVPKVADFLGVSKSGDHHTDHNLVPYNDIHQTNASDYYFQTNSLLPTVVTCASNAPNNYELQESAHNLQSLTLSMGSTGAAAAEVATVKASPAETSADNSSSTTNTSGGAIVEATPRRTLETFGQRTSIYRGVTRHRWTGRYEAHLWDNSCRREGQSRKGRQGGYDKEEKAARAYDLAALKYWGPSTTTNFPITNYEKEVEEMKNMTRQEFVASIRRKSSGFSRGASMYRGVTRHHQHGRWQARIGRVAGNKDLYLGTFSTEEEAAEAYDIAAIKFRGLNAVTNFEINRYDVKAILESNTLPIGGGAAKRLKEAQALESSRKREEMIALGSNFHQYGAASGSSSVASSSRLQLQPYPLSIQQPFEHLHHHQPLLTLQNNNDISQYHDSFSYIQTQLHLHQQQTNNYLQSSSHTSQLYNAYLQSNPGLLHGFVSDNNNTSGFLGNNGIGIGSSSTVGSSAEEEFPAVKVDYDMPPSGGATGYGGWNSGESAQGSNPGGVFTMWNE

SEQ ID NO: 92 - protein, 241 aa, Arabidopsis thaliana
  Clone ID: AT_k11j9.C1.p120.tg
MATKQEALAIDFISQHLLTDFVSMETDHPSLFTNQLHNFHSETGPRTITNQSPKPNSTLNQRKPPLPNLSVSRTVSTKTEKEEEERHYRGVRRRPWGKYAAEIRDPNKKGCRIWLGTYDTAVEAGRAYDQAAFQLRGRKAILNFPLDVRVTSETCSGEGVIGLGKRKRDKGSPPEEEKAARVKVEEEESNTSETTEAEVEPVVPLTPSSWMGFWDVGAGDGIFSIPPLSPTSPNFSVISVT

SEQ ID NO: 93 - protein, 306 aa, Arabidopsis thaliana
  Clone ID: AT_F21J9.C1.p70.tg
MEEAIMRLEGAEHRETNIHSLKRKPSRTSSTAPGSPGGVTTAKAASGAGASGVSTIRYRGVRRRPWGRYAAEIRDPLSKERRWLGTFDTAEEAACAYDCAARAMRGLKARTNFVYPMPSLDSYHHRIFSSPPMNMFLLRDVLNSQSLSPLTTFAYPPCNLSNVNDVVHESFTNVNDVCEDLSPKAKRSSTIENESLISNIFEPEPASSGLLQEIVQGFLPKPISQHASIPPKSNQQSVGVFPTMPESGFQTDVRLADFHVEGNGFGQVKYHGELGWADHENGFDSAKMQQNGNGGMFYQYCFHDDY

SEQ ID NO: 94 - protein, 250 aa, Arabidopsis thaliana
  Clone ID: AT_MWD22.C1.p13.tg
MASSHQQQQEQDQSALDLITQHLLTDFPSLDTFASTIHHCTTSTLSQRKPPLATIAVPTTAPVVQENDQRHYRGVRRRPWGKYAAEIRDPNKKGVRVWLGTFDTAMEAARGYDKAAFKLRGSKAILNFPLEAGKHEDLGDNKKTISLKAKRKRQVTEDESQLISRKAVKREEAQITINVQPKEIQNVQDAQIEEKTNAPPELRLPDVLDAKVVTCSRHTTWQDYVDYFKSPNQRKQPERNTEDESVLIAF

SEQ ID NO: 95 - protein, 189 aa, Arabidopsis thaliana
  Clone ID: AT_F2I11.C1.p80.tg
MVHSRKFRGVRQRQWGSWVSEIRHPLLKRRVWLGTFETAEAAARAYDQAALLMNGQNAKTNFPVVKSEEGSDHVKDVNSPLMSPKSLSELLNAKLRKSCKDLTPSLTCLRLDTDSSHIGVWQKRAGSKTSPTWVMRLELGNVVNESAVDLGLTTMNKQNVEKEEEEEEAIISDEDQLAMEMIEELLNWS

SEQ ID NO: 96 - protein, 529 aa, Arabidopsis thaliana
  Clone ID: AT_MOE17.C1.p13.tg
MINPHGGGGDEGGEVPKVADFLGVSKPDENQSNHLVAYNDSDYYFHTNSLMPSVQSNDVVVAACDSNTPNNSSYHELQESAHNLQSLTLSMGTTAGNNVVDKASPSETTGDNASGGALAVVETATPRRALDTFGQRTSIYRGVTRHRWTGRYEAHLWDNSCRREGQSRKGRQGGYDKEDKAARSYDLAALKYWGPSTTTNFPITNYEKEVEEMKHMTRQEFVAAIRRKSSGFSRGASMYRGVTRHHQHGRWQARIGRVAGNKDLYLGTFSTEEEAAEAYDIAAIKFRGLNAVTNFEINRYDVKAILESSTLPIGGGAAKRLKEAQALESSRKREAEMIALGSSFQYGGGSSTGSGSTSSRLQLQPYPLSIQQPLEPFLSLQNNDISHYNNNNAHDSSSFNHHSYIQTQLHLHQQTNNYLQQQSSQNSQQLYNAYLHSNPALLHGLVSTSIVDNNNNNGGSSGSYNTAAFLGNHGIGIGSSSTVGSTEEFPTVKTDYDMPSSDGTGGYSGWTSESVQGSNPGGVFTMWNE

SEQ ID NO: 97 - protein, 328 aa, Arabidopsis thaliana
  Clone ID: AT_F3F19.C1.p1.tg
MEKALRNFTESTHSPDPNPLTKFFTEPTASPVSRNRKLSSKDTTVTIAGAGSSTTRYRGVRRRPWGRYAAEIRDPMSKERRWLGTFDTAEQAACAYDSAARAFRGAKARTNFTYPTAVIMPEPRFSFSNKKSSPSARCPLPSLPLDSSTQNFYGAPAAQRIYNTQSIFLRDASCSSRKTTPYNNSFNGSSSSYSASKTACVSYSENENNESFFPEESSDTGLLQEVVQEFLKKNRGVPPSPPTPPPVTSHHDNSGYFSNLTIYSENMVQETKETLSSKLDRYGNFQANDDGVRAVADGGLSLGSNEWGYQEMLMYGTQLGCTCRRSWG

SEQ ID NO: 98 - protein, 388 aa, Arabidopsis thaliana
  Clone ID: AT_MLN21.C1.p1.tg
MCGGAIISDFIPPPRSLRVTNEFIWPDLKNKVKASKKRSNKRSDFFDLDDDFEADFQGFKDDSAFDCEDDDDVFVNVKPFVFTATTKPVASAFVSTVGSAYAKKTVESAEQAEKSSKRKRKNQYRGIRQRPWGKWAAEIRDPRKGSREWLGTFDTAEEAARAYDAAARRIRGTKAKVNFPEEKNPSVVSQKRPSAKTNNLQKSVAKPNKSVTLVQQPTHLSQQYCNNSFDNSFGDMSFMEEKPQMYNNQFGLTNSFDAGGNNGYQYFSSDQGSNSFDCSEFGWSDHGPKTPEISSMLVNNNEASFVEETNAAKKLKPNSDESDDLMAYLDNALWDTPLEVEAMLGADAGAVTQEEENPDFAVGGWYKSHLKLYALVSHEPLFHREFLF

SEQ ID NO: 99 - protein, 153 aa, Arabidopsis thaliana
  Clone ID: AT_F11C1.C1.p100.tg
MDAGVAVKADVAVKMKRERPFKGIRMRKWGKWVAEIREPNKRSRLWLGSYSTPEAAARAYDTAVFYLRGPTATLNFPELLPCTSAEDMSAATIRKKATEVGAQVDAIGATVVQNNKRRRVFSQKRDFGGGLLELVDLNKLPDPENLDDDLVGK

SEQ ID NO: 100 - protein, 133 aa, Arabidopsis thaliana
  Clone ID: AT_F19P19.C1.p19.tg
MDQGGRSSGSGGGGAEQGKYRGVRRRPWGKYAAEIRDSRKHGERVWLGTFDTAEDAARAYDRAAYSMRGKAAILNFPHEYNMGTGSSSTAANSSSSSQQVFEFEYLDDSVLDELLEYGENYNKTHNINMGKRQ

SEQ ID NO: 101 - protein, 364 aa, Arabidopsis thaliana
  Clone ID: AT_F2J7.C1.p8.tg
MSAVSESAAISSLFLISFAIQSSSSSSSSVLFFGLSLTAVLNALRFCSEQRLILEVPSISMGLRLKRTCSGVEVFGDMKSFVKPERDSLLRTVRIVFTDPDATDDSSSSSDEWLPKPRKVKRFVHEITFLPQVSESSQDRSNAVKTPRRKSTRQFKYPVGVRPRPSGKFAAEILNPFTKTKKWLGTYETPAEAEKAYVDKKVEYDALASSGSAVSSSVVTVTSQCLRSPTSASVSCVSADDLSKEKTSLNKDVAASGDSTTKEVFTTFDFSDVKIPDLRFLAAEEDSMVSNANGAELDFDCFLTDSNILLDDYSLLENDINFSRFENSLPSELPDCDFTEMEFQLDDFKFAYTDHLTTPPLGLV

SEQ ID NO: 102 - protein, 361 aa, Arabidopsis thaliana
  Clone ID: AT_F2J7.C1.p3.tg
MEYSCVDDSSTTSESLSISTTPKPTTTTEKKLSSPPATSMRLYRMGSGGSSVVLDSENGVETESRKLPSSKYKGVVPQPNGRWGAQIYEKHQRVWLGTFNEEEEAASSYDIAVRRFRGRDAVTNFKSQVDGNDAESAFLDAHSKAEIVDMLRKHTYADEFEQSRRKFVNGDGKRSGLETATYGNDAVLRAREVLFEKTVTPSDVGKLNRLVIPKQHAEKHFPLPAMTTAMGMNPSPTKGVLINLEDRTGKVWRFRYSYWNSSQSYVLTKGWSRFVKEKNLRAGDVVCFERSTGPDRQLYIHWKVRSSPVQTVVRLFGVNIFNVSNEKPNDVAVECVGKKRSREDDLFSLGCSKKQAIINIL

SEQ ID NO: 103 - protein, 161 aa, Arabidopsis thaliana
  Clone ID: AT_F23N20.C1.p12.tg
MKRIIRISFTDAEATDSSSDEDTEERGGASQTRRRGKRLVKEIVIDPSDSADKLDVCKTRFKIRIPAEFLKTAKTEKKYRGVRQRPWGKWVAEIRCGRGACKGRRDRLWLGTFNTAEEAALAYDNASIKLIGPHAPTNFGLPAENQEDKTVIGASEVARGA

SEQ ID NO: 104 - protein, 334 aa, Arabidopsis thaliana
  Clone ID: AT_T13J8.C1.p60.tg
MMDEFMDLRPVKYTEHKTVIRKYTKKSSMERKTSVRDSARLVRVSMTDRDATDSSSDEEEFLFPRRRVKRLINEIRVEPSSSSTGDVSASPTKDRKRINVDSTVQKPSVSGQNQKKYRGVRQRPWGKWAAEIRDPEQRRRIWLGTFATAEEAAIVYDNAAIKLRGPDALTNFTVQPEPEPVQEQEQEPESNMSVSISESMDDSQHLSSPTSVLNYQTYVSEEPIDSLIKPVKQEFLEPEQEPISWHLGEGNTNTNDDSFPLDITFLDNYFNESLPDISIFDQPMSPIQPTENDFFNDLMLFDSNAEEYYSSEIKEIGSSFNDLDDSLISDLLLV

SEQ ID NO: 105 - protein, 256 aa, Arabidopsis thaliana
  Clone ID: AT_T21F11.C1.p9.tg
MENSYTVDGHRLQYSVPLSSMHETSQNSETYGLSKESPLVCMPLFETNTTSFDISSLFSFNPKPEPENTHRVMDDSIAAVVGENVLFGDKNKVSDHLTKEGGVKRGRKMPQKTGGFMGVRKRPWGRWSAEIRDRIGRCRHWLGTFDTAEEAARAYDAAARRLRGTKAKTNFVIPPLFPKEIAQAQEDNRMRQKQKKKKKKKVSVRKCVKVTSVAQLFDDANFINSSSIKGNVISSIDNLEKMGLELDLSLGLLSRK

SEQ ID NO: 106 - protein, 185 aa, Arabidopsis thaliana
  Clone ID: AT_T29M8.C1.p14.tg
MEGSSSSMQSKYKGVRKRKWGKWVSEIRLPNSRERIWLGSYDTPEKAARAFDAALYCLRGNNAKFNFPDNPPVISGGRNLSRSEIREAAARFANSAEDDSSGGAGYEIRQESASTSMDVDSEFLSMLPTVGSGNFASEFGLFPGFDDFSDEYSGDRFREQLSPTQDYYQLGEETYADGSMFLWNF

SEQ ID NO: 107 - protein, 391 aa, Arabidopsis thaliana
  Clone ID: AT_MVP7.C1.p8.tg
MCVLKVANQEDNVGKKAESIRDDDHRTLSEIDQWLYLFAAEDDHHRHSFPTQQPPPSSSSSSLISGFSREMEMSAIVSALTHVVAGNVPQHQQGGGEGSGEGTSNSSSSSGQKRRREVEEGGAKAVKAANTLTVDQYFSGGSSTSKVREASSNMSGPGPTYEYTTTATASSETSSFSGDQPRRRYRGVRQRPWGKWAAEIRDPFKAARVWLGTFDNAESAARAYDEAALRFRGNKAKLNFPENVKLVRPASTEAQPVHQTAAQRPTQSRNSGSTTTLLPIRPASNQSVHSQPLMQSYNLSYSEMARQQQQFQQHHQQSLDLYDQMSFPLRFGHTGGSMMQSTSSSSSHSRPLFSPAAVQPPPESASETGYLQDIQWPSDKTSNNYNNSPSS

SEQ ID NO: 108 - protein, 236 aa, Arabidopsis thaliana
  Clone ID: AT_F15N18.C1.p180.tg
MAEEYYSLRSERVTQLLVPNSESDSVSDKSKAEQSEKKTKRGRDSGKHPVYRGVRMRNWGKWVSEIREPRKKSRIWLGTFPTPEMAARAHDVAALSIKGTAAILNFPELADSFPRPVSLSPRDIQTAALKAAHMEPTTSFSSSTSSSSSLSSTSSLESLVLVMDLSRTESEELGEIVELPSLGASYDVDSANLGNEFVFYDSVDYCLYPPPWGQSSEDNYGHGISPNFGHGLSWDL

SEQ ID NO: 109 - protein, 244 aa, Arabidopsis thaliana
  Clone ID: AT_T5M16.C1.p23.tg
MVKQELKIQVTTSSSSLSHSSSSSSSSTSALRHQSCKNKIKKYKGVRMRSWGSWVTEIRAPNQKTRIWLGSYSTAEAAARAYDAALLCLKGPKANLNFPNITTTSPFLMNIDEKTLLSPKSIQKVAAQAANSSSDHFTPPSDENDHDHDDGLDHHPSASSSAASSPPDDDHHNDDDGDLVSLMESFVDYNEHVSLMDPSLYEFGHNEIFFTNGDPFDYSPQLHSSEATMDDFYDDVDIPLWSFS

SEQ ID NO: 110 - protein, 245 aa, Arabidopsis thaliana
  Clone ID: AT_F11M21.C1.p27.tg
MTTEKENVTTAVAVKDGGEKSKEVSDKGVKKRKNVTKALAVNDGGEKSKEVRYRGVRRRPWGRYAAEIRDPVKKKRVWLGSFNTGEEAARAYDSAAIRFRGSKATTNFPLIGYYGISSATPVNNNLSETVSDGNANLPLVGDDGNALASPVNNTLSETARDGTLPSDCHDMLSPGVAEAVAGFFLDLPEVIALKEELDRVCPDQFESIDMGLTIGPQTAVEEPETSSAVDCKLRMEPDLDLNASP

SEQ ID NO: 111 - protein, 259 aa, Arabidopsis thaliana
  Clone ID: AT_F6I18.C1.p30.tg
MVYIGNQKVAAIGIRVSKWITYHGLALNVTTDLTPFNWIVPCGIRDRKVGNIKGLLEDGEHGMVDDLRLIDIVHESLLKEFSEAFQLQIEKQTVSDPNILGVRKRSWGKWVSEIRVPKTGRRIWLGSYDAPEKAARAYDAALFCIRGEKGVYNFPTDKKPQLPEGSVRPLSKLDIQTIATNYASSVVHVPSHATTLPATTQVPSEVPASSDVSASTEITEMVDEYYLPTDATAESIFSVEDLQLDSFLMMDIDWINNLI

SEQ ID NO: 112 - protein, 277 aa, Arabidopsis thaliana
  Clone ID: AT_MQN23.C1.p6.tg
MALNMNAYVDEFMEALEPFMKVTSSSSTSNSSNPKPLTPNFIPNNDQVLPVSNQTGPIGLNQLTPTQILQIQTELHLRQNQSRRRAGSHLLTAKPTSMKKIDVATKPVKLYRGVRQRQWGKWVAEIRLPKNRTRLWLGTFETAQEAALAYDQAAHKIRGDNARLNFPDIVRQGHYKQILSPSINAKIESICNSSDLPLPQIEKQNKTEEVLSGFSKPEKEPEFGEIYGCGYSGSSPESDITLLDFSSDCVKEDESFLMGLHKYPSLEIDWDAIEKLF

SEQ ID NO: 113 - protein, 332 aa, Arabidopsis thaliana
  Clone ID: AT_MPE11.C1.p4.tg
MAERKKRSSIQTNKPNKKPMKKKPFQLNHLPGLSEDLKTMRKLRFVVNDPYATDYSSSEEEERSQRRKRYVCEIDLPFAQAATQAESESSYCQESNNNGVSKTKISACSKKVLRSKASPVVGRSSTTVSKPVGVRQRKWGKWAAEIRHPITKVRTWLGTYETLEQAADAYATKKLEFDALAAATSAASSVLSNESGSMISASGSSIDLDKKLVDSTLDQQAGESKKASFDFDFADLQIPEMGCFIDDSFIPNACELDFLLTEENNNQMLDDYCGIDDLDIIGLECDGPSELPDYDFSDVEIDLGLIGTTIDKYAFVDHIATTTPTPLNIACP

SEQ ID NO: 114 - protein, 581 aa, Arabidopsis thaliana
  Clone ID: AT_T10B6.C1.p90.tg
MNSMNNWLGFSLSPHDQNHHRTDVDSSTTRTAVDVAGGYCFDLAAPSDESSAVQTSFLSPFGVTLEAFTRDNNSHSRDWDINGGACNNINNNEQNGPKLENFLGRTTTIYNTNETVVDGNGDCGGGDGGGGGSLGLSMIKTWLSNHSVANANHQDNGNGARGLSLSMNSSTSDSNNYNNNDDVVQEKTIVDVVETTPKKTIESFGQRTSIYRGVTRHRWTGRYEAHLWDNSCKREGQTRKGRQGGYDKEEKAARAYDLAALKYWGTTTTTNFPLSEYEKEVEEMKHMTRQEYVASLRRKSSGFSRGASIYRGVTRHHQHGRWQARIGRVAGNKDLYLGTFGTQEEAAEAYDIAAIKFRGLSAVTNFDMNRYNVKAILESPSLPIGSSAKRLKDVNNPVPAMMISNNVSESANNVSGWQNTAFQHHQGMDLSLLQQQQERYVGYYNGGNLSTESTRVCFKQEEEQQHFLRNSPSHMTNVDHHSSTSDDSVTVCGNVVSYGGYQGFAIPVGTSVNYDPFTAAEIAYNARNHYYYAQHQQQQQIQQSPGGDFPVAISNNHSSNMYFHGEGGGEGAPTFSVWNDT

SEQ ID NO: 115 - protein, 315 aa, Arabidopsis thaliana
  Clone ID: AT_F15G16.C1.p20.tg
MERRTRRVKFTENRTVTNVAATPSNGSPRLVRITVTDPFATDSSSDDDDNNNVTVVPRVKRYVKEIRFCQGESSSSTAARKGKHKEEESVVVEDDVSTSVKPKKYRGVRQRPWGKFAAEIRDPSSRTRIWLGTFVTAEEAAIAYDRAAIHLKGPKALTNFLTPPTPTPVIDLQTVSACDYGRDSRQSLHSPTSVLRFNVNEETEHEIEAIELSPERKSTVIKEEEESSAGLVFPDPYLLPDLSLAGECFWDTEIAPDLLFLDEETKIQSTLLPNTEVSKQGENETEDFEFGLIDDFESSPWDVDHFFDHHHHSFD

SEQ ID NO: 116 - protein, 232 aa, Arabidopsis thaliana
  Clone ID: AT_MSG15.C1.p10.tg
MSNNNNSPTTVNQETTTSREVSITLPTDQSPQTSPGSSSSPSPRPSGGSPARRTATGLSGKHSIFRGIRLRNGKWVSEIREPRKTTRIWLGTYPVPEMAAAAYDVAALALKGPDAVLNFPGLALTYVAPVSNSAADIRAAASRAAEMKQPDQGGDEKVLEPVQPGKEEELEEVSCNSCSLEFMDEEAMLNMPTLLTEMAEGMLMSPPRMMIHPTMEDDSPENHEGDNLWSYK

SEQ ID NO: 117 - protein, 256 aa, Arabidopsis thaliana
  Clone ID: AT_T8B10.C1.p150.tg
MGKQINIESSATHHQDNIVSVITATISSSSVVTSSSDSWSTSKRSLVQDNDSGGKRRKSNVSDDNKNPTSYRGVRMRSWGKWVSEIREPRKKSRIWLGTYPTAEMAARAHDVAALAIKGNSGFLNFPELSGLLPRPVSCSPKDIQAAATKAAEATTWHKPVIDKKLADELSHSELLSTAQSSTSSSFVFSSDTSETSSTDKESNEETVFDLPDLFTDGLMNPNDAFCLCNGTFTWQLYGEEDVGFRFEEPFNWQND

SEQ ID NO: 118 - protein, 220 aa, Arabidopsis thaliana
  Clone ID: AT_MPF21.C1.p9.tg
MSAMVSALTQVVSARSQTEAEGAHSQTEAEGAHSSSSSAGHKRGWLGIDSAPIPSSFARVDSSHNPIEEAREKKRRYRGVRQRPWGKWAAEIRDPHRAARVWLGTFDTAEAAARAYDEAALRFRGNKAKLNFPEDVRILPPPPPLLRSPADTVANKAEEDLINYWSYTKLLQSSGQRSFLERGQEESSNIFEHSPMEQPLPPSSSGPSSSNFPAPSLPNT

SEQ ID NO: 119 - protein, 566 aa, Arabidopsis thaliana
  Clone ID: AT_F12B17.C1.p140.tg
MEMLRSSDQSQFVSYDASSAASSSPYLLDNFYGWSNQKPQEFFKEEAQLAAAASMADSTILTTFVDPQSHHSQNHIPKLEDFLGDSSSIVRYSDNSQTDTQDSSLTQIYDPRHHHNQTGFYSDHHDFKTMAGFQSAFSTNSGSEVDDSASIGRTHLAGDYLGHVVESSGPELGFHGGSTGALSLGVNVNNNTNHRNDNDNHYRGNNNGERINNNNNNDNEKTDSEKEKAVVAVETSDCSNKKIADTFGQRTSIYRGVTRHRWTGRYEAHLWDNSCRREGQARKGRQGGYDKEDKAARAYDLAALKYWNATATTNFPITNYSKEVEEMKHMTKQEFIASLRRKSSGFSRGASIYRGVTRHHQQGRWQARIGRVAGNKDLYLGTFATEEEAAEAYDIAAIKFRGINAVTNFEMNRYDVEAIMKSALPIGGAAKRLKLSLEAAASSEQKPILGHHQLHHFQQQQQQQQLQLQSSPNHSSINFALCPNSAVQSQQIIPCGIPFEAAALYHHHQQQQQHQQQQQQQNFFQHFPANAASDSTGSNNNSNVQGTMGLMAPNPAEFFLWPNQSY

SEQ ID NO: 120 - protein, 261 aa, Arabidopsis thaliana
  Clone ID: AT_F16L1.C1.p5.tg
MTTSMDFYSNKTFQQSDPFGGELMEALLPFIKSPSNDSSAFAFSLPAPISYGSDLHSFSHHLSPKPVSMKQTGTSAAKPTKLYRGVRQRHWGKWVAEIRLPRNRTRLWLGTFDTAEEAALAYDKAAYKLRGDFARLNFPDLRHNDEYQPLQSSVDAKLEAICQNLAETTQKQVRSTKKSSSRKRSSTVAVKLPEEDYSSAGSSPLLTESYGSGGSSSPLSELTFGDTEEEIQPPWNENALEKYPSYEIDWDSILQCSSLVN

SEQ ID NO: 121 - protein, 555 aa, Arabidopsis thaliana
  Clone ID: AT_MSF19.C1.p5.tg
MKNNNNKSSSSSSYDSSLSPSSSSSSHQNWLSFSLSNNNNNFNSSSNPNLTSSTSDHHHPHPSHLSLFQAFSTSPVERQDGSPGVSPSDATAVLSVYPGGPKLENFLGGGASTTTTRPMQQVQSLGGVVFSSDLQPPLHPPSAAEIYDSELKSIAASFLGNYSGGHSSEVSSVHKQQPNPLAVSEASPTPKKNVESFGQRTSIYRGVTRHRWTGRYEAHLWDNSCRREGQSRKGRQGGYDKEDKAARAYDLAALKYWGPTTTTNFPISNYESELEEMKHMTRQEFVASLRRKSSGFSRGASMYRGVTRHHQHGRWQARIGRVAGNKDLYLGTFSTQEEAAEAYDIAAIKFRGLNAVTNFDISRYDVKSIASCNLPVGGLMPKPSPATAAADKTVDLSPSDSPSLTTPSLTFNVATPVNDHGGTFYHTGIPIKPDPADHYWSNIFGFQANPKAEMRPLANFGSDLHNPSPGYAIMPVMQEGENNFGGSFVGSDGYNNHSAASNPVSAIPLSSTTTMSNGNEGYGGNINWINNNISSSYQTAKSNLSVLHTPVFGLE

SEQ ID NO: 122 - protein, 437 aa, Arabidopsis thaliana
  Clone ID: AT_K21L13.C1.p1.tg
MADSTTLSTFFDHSQTQIPKLEDFLGDSFVRYSDNQTETQDSSSLTPFYDPRHRTVAEGVTGFFSDHHQPDFKTINSGPEIFDDSTTSNIGGTHLSSHVVESSTTAKLGFNGDCTTTGGVLSLGVNNTSDQPLSCNNGERGGNSNKKKTVSKKETSDDSKKKIVETLGQRTSIYRGVTRHRWTGRYEAHLWDNSCRREGQARKGRQGGYDKEDRAARAYDLAALKYWGSTATTNFPVSSYSKELEEMNHMTKQEFIASLRRKSSGFSRGASIYRGVTRHHQQGRWQARIGRVAGNKDLYLGTFATEEEAAEAYDIAAIKFRGINAVTNFEMNRYDIEAVMNSSLPVGGAAAKRHKLKLALESPSSSSSDHNLQQQQLLPSSSPSDQNPNSIPCGIPFEPSVLYYHQNFFQHYPLVSDSTIQAPMNQAEFFLWPNQSY

SEQ ID NO: 123 - protein, 268 aa, Arabidopsis thaliana
  Clone ID: AT_F10M10.C1.p180.tg
MHYPNNRTEFVGAPAPTRYQKEQLSPEQELSVIVSALQHVISGENETAPCQGFSSDSTVISAGMPRLDSDTCQVCRIEGCLGCNYFFAPNQRIEKNHQQEEEITSSSNRRRESSPVAKKAEGGGKIRKRKNKKNGYRGVRQRPWGKFAAEIRDPKRATRVWLGTFETAEDAARAYDRAAIGFRGPRAKLNFPFVDYTSSVSSPVAADDIGAKASASASVSATDSVEAEQWNGGGGDCNMEEWMNMMMMMDFGNGDSSDSGNTIADMFQ

SEQ ID NO: 124 - protein, 207 aa, Arabidopsis thaliana
  Clone ID: AT_MBK20.C1.p1.tg
MASFEESSDLEAIQSHLLEDLLVCDGFMGDFDFDASFVSGLWCIEPHVPKQEPDSPVLDPDSFVNEFLQVEGESSSSSSPELNSSSSTYETDQSVKKAERFEEEVDARHYRGVRRRPWGKFAAEIRDPAKKGSRIWLGTFESDVDAARAYDCAAFKLRGRKAVLNFPLDAGKYEAPANSGRKRKRSDVHEELQRTQSNSSSSSCDAF

SEQ ID NO: 125 - protein, 189 aa, Arabidopsis thaliana
  Clone ID: AT_F3M18.C1.p27.tg
MASTTCAREVHYRGVRKRPWGRYAAEIRDPWKKTRVWLGTFDTPEEAALAYDGAARFLRGIKAKTNFPSPLSLDLNHLPSAPSAATAAANNQPHQHQQLWFAAPPPVPPSSDHHHQHHRIFLRTGVLNDKTSDYSSTEAPLYFTSSPNTATSSPGYQVVGFPMMNSSPSPVTVRRGLAIDLNEPPPLWL

SEQ ID NO: 126 - protein, 272 aa, Arabidopsis thaliana
  Clone ID: AT_T19P19.C1.p170.tg
MAAIDMFNSNTDPFQEELMKALQPYTTNTDSSSPTYSNTVFGFNQTTSLGLNQLTPYQIHQIQNQLNQRRNIISPNLAPKPVPMKNMTAQKLYRGVRQRHWGKWVAEIRLPKNRTRLWLGTFDTAEEAAMAYDLAAYKLRGEFARLNFPQFRHEDGYYGGGSCFNPLHSSVDAKLQEICQSLRKTEDIDLPCSETELFPPKTEYQESEYGFLRSDENSFSDESHVESSSPESGITTFLDFSDSGFDEIGSFGLEKFPSVEIDWDAISKLSES

SEQ ID NO: 127 - protein, 388 aa, Arabidopsis thaliana
  Clone ID: AT_F18A5.C1.p10.tg
MITPIHTQHSLILVYINIYSPPILSKLRTGFILWTNTQKTNKKRNMEDQFPKIETSFMHDKLLSSGIYGFLSSSTPPQLLGVPIFLEGMKSPLLPASSTPSYFVSPHDHELTSSIHPSPVASVPWNFLESFPQSQHPDHHPSKPPNLTLFLKEPKLLELSQSESNMSPYHKYIPNSFYQSDQNRNEWVEINKTLTNYPSKGFGNYWLSTTKTQPMKSKTRKVVQTTTPTKLYRGVRQRHWGKWVAEIRLPRNRTRVWLGTFETAEQAAMAYDTAAYILRGEFAHLNFPDLKHQLKSGSLRCMIASLLESKIQQISSSQVSNSPSPPPPKVGTPEQKNHHMKMESGEDVMMKKQKSHKEVMEGDGVQLSRMPSLDMDLIWDALSFPHSS

SEQ ID NO: 128 - protein, 332 aa, Arabidopsis thaliana
  Clone ID: AT_T24D18.C1.p16.tg
MEDITRQSKKTSVENETGDDQSATSVVLKAKRKRRSQPRDAPPQRSSVHRGVTRHRWTGRYEAHLWDKNSWNETQTKKGRQGAYDEEDAAARAYDLAALKYWGRDTILNFPLCNYEEDIKEMESQSKEEYIGSLRRKSSGFSRGVSKYRGVAKHHHNGRWEARIGRVFGNKYLYLGTYATQEEAAIAYDIAAIEYRGLNAVTNFDISRYLKLPVPENPIDTANNLLESPHSDLSPFIKPNHESDLSQSQSSSEDNDDRKTKLLKSSPLVAEEVIGPSTPPEIAPPRRSFPEDIQTYFGCQNSGKLTAEEDDVIFGDLDSFLTPDFYSELNDC

SEQ ID NO: 129 - protein, 352 aa, Arabidopsis thaliana
  Clone ID: AT_F23H24.C1.p7.tg
MDEMSNVAKTTTETSGLTDSVLSLTKRMKPTEVTTTTKPALSNTTKFKGVVQQQNGHWGAQIYADHRRIWLGTFKSAHEAAAAYDSASIKLRSFDANSHRNFPWSDFTLHEPDFQECYTTEAVLNMIRDGSYQHKFRDFLRIRSQIVANINIVGSKQVLGGGEGGQESNKCFSCTQLFQKELTPSDVGKLNRLVIPKKYAVKYMPFISDDQSEKETSEGVEDVEVVFYDRAMRQWKFRYCYWRSSQSFVFTRGWNGFVKEKNLKEKDIIVFYTCDVPNNVKTLEGQSKTFLMIDVHHFSGNGFVVPEEVNKTVHEISDEEMKTETLFTSKVEEETKSEEKKGGFMLFGVRIQ

SEQ ID NO: 130 - protein, 358 aa, Arabidopsis thaliana
  Clone ID: AT_T18A20.C1.p14.tg
MCGGAIISDFIPPPRSRRVTSEFIWPDLKKNLKGSKKSSKNRSNFFDFDAEFEADFQGFKDDSSIDCDDDFDVGDVFADVKPFVFTSTPKPAVSAAAEGSVFGKKVTGLDGDAEKSANRKRKNQYRGIRQRPWGKWAAEIRDPREGARIWLGTFKTAEEAARAYDAAARRIRGSKAKVNFPEENMKANSQKRSVKANLQKPVAKPNPNPSPALVQNSNISFENMCFMEEKHQVSNNNNNQFGMTNSVDAGCNGYQYFSSDQGSNSFDCSEFGWSDQAPITPDISSAVINNNNSALFFEEANPAKKLKSMDFETPYNNTEWDASLDFLNEDAVTTQDNGANPMDLWSIDEIHSMIGGVF

SEQ ID NO: 131 - protein, 358 aa, Arabidopsis thaliana
  Clone ID: AT_T25K16.C1.p3.tg
MDLSLAPTTTTSSDQEQDRDQELTSNIGASSSSGPSGNNNNLPMMMIPPPEKEHMFDKVVTPSDVGKLNRLVIPKQHAERYFPLDSSNNQNGTLLNFQDRNGKMWRFRYSYWNSSQSYVMTKGWSRFVKEKKLDAGDIVSFQRGIGDESERSKLYIDWRHRPDMSLVQAHQFGNFGFNFNFPTTSQYSNRFHPLPEYNSVPIHRGLNIGNHQRSYYNTQRQEFVGYGYGNLAGRCYYTGSPLDHRNIVGSEPLVIDSVPVVPGRLTPVMLPPLPPPPSTAGKRLRLFGVNMECGNDYNQQEESWLVPRGEIGASSSSSSALRLNLSTDHDDDNDDGDDGDDDQFAKKGKSSLSLNFNP

SEQ ID NO: 132 - protein, 675 aa, Arabidopsis thaliana
  Clone ID: AT_F10N7.C1.p180.tg
MEVTRGFSFLDKFLRKRLHCGCIASRFMMELLENGGVTCISCAKKSGLISMNVSHESNGKDFPSFASAEHVGSVLERTNLKHLLHFQRIDPTHSSLQMKQEESLLPSSLDALRHKTERKELSAQPNLSISLGPTLMTSPFHDAAVDDRSKTNSIFQLAPRSRQLLPKPANSAPIAAGMEPSGSLVSQIHVARPPPEGRGKTQLLPRYWPRITDQELLQLSGQYPHLYESLTVYFPSSNSKIIPLFEKVLSASDAGRIGRLVLPKACAEAYFPPISLPEGLPLKIQDIKGKEWVFQFRFWPNNNSRMYVLEGVTPCIQSMQLQAGDTVTFSRTEPEGKLVMGYRKATNSTATQMFKGSSEPNLNMFSNSLNPGCGDINWSKLEKSEDMAKDNLFLQSSLTSARKRVRNIGTKSKRLLIDSVDVLELKITWEEAQELLRPPQSTKPSIFTLENQDFEEYDKLPSLHNETFVSTEFKRRRLASSNEKLNQSQDASALNSLGNAGITTTGEQGEITVAATTKHPRHRAGCSCIVCSQPPSGKGKHKPSCTCTVCEAVKRRFRTLMLRKRNKGEAGQASQQAQSQSECRDETEVESIPAVELAAGENIDLNSDPGASRVSMMRLLQAAAFPLEAYLKQKAISNTAGEQQSSDMVSTEHGSSSAAQETEKDTTNGAHDPVN

SEQ ID NO: 133 - protein, 282 aa, Arabidopsis thaliana
  Clone ID: AT_MHF15.C1.p23.tg
MSVNHYSTDHHHTLLWQQQQHRHTTDTSETTTTATWLHDDLKESLFEKSLTPSDVGKLNRLVIPKQHAEKYFPLNAVLVSSAAADTSSSEKGMLLSFEDESGKSWRFRYSYWNSSQSYVLTKGWSRFVKDKQLDPGDVVFFQRHRSDSRRLFIGWRRRGQGSSSSVAATNSAVNTSSMGALSYHQIHATSNYSNPPSHSEYSHYGAAVATAAETHSTPSSSVVGSSRTVRLFGVNLECQMDENDGDDSVAVATTVESPDGYYGQNMYYYYSHPHNMVILTLL

SEQ ID NO: 134 - protein, 328 aa, Arabidopsis thaliana
  Clone ID: AT_F11O4.C1.p9.tg
MNLDQELAEIRASSSDHTNYFYSSERREHMFDKVLTPSDVGKLNRLVIPKQHAENFFPLEDNQNGTVLDFQDKNGKMWRFRYSYWNSSQSYVMTKGWSRFVKEKKLFAGDTVSFYRGYIPDDNAQPERRRKIMFIDWRPRAEINFVHNINNHNFVFGSPTYPTARFYPVTPEYSMPYRSFPPFYQNQFQEREYLGYGYGRVVNGNGVRYYAGSPLDQHHQWNLGRSEPLVYDSVPVFPAGRVPPSAPPQPSTTKKLRLFGVDVEESSSSGDTRGEMGVAGYSSSSPVVIRDDDQSFWRSPRGEMASSSSAMQLSDDEEYKRKGKSLEL

SEQ ID NO: 135 - protein, 591 aa, Arabidopsis thaliana
  Clone ID: AT_F23M19.C1.p4.tg
MESGNVVNAQPELSGIIDGSKSYVYEQLWKLCAGPLCDIPKLGEKVYYFPQGHIELVETSTREELNELQPICDLPSKLQCRVIAIHLKVENNSDETYAEITLMPDTTVSENLQVVIPTQNENQFRPLVNSFTKVLTASDTSAHGGFFVPKKHAIECLPSLDMSQPLPAQELLAIDLHGNQWRFNHNYRGTPQRHLLTTGWNAFTTSKKLVAGDVIVFVRGETGELRVGIRRARHQQGNIPSSIVSIDCMRHGVVASAKHAFDNQCMFTVVYKPSYDKFLDAVNNKFNVGSRFTMRLEGDDFSERRCFGTIIGVSDFSPHWKCSEWRSLEVQWDEFTSFPGPKKVSPWDIEHLMPAINVPRSFLLKNKRLREVNEIGSSSSHLLPPILTQGQENEQLSVASPMNISLRYRDATEDAMNPSKLLMSYPVQPMPKLNYNNQMVTEMEENITTKTGTNFRLFGVTLDTPPVIKDPIEEIGSEISKLTEGKKFGLSQTLRSPTEIQNKQFSSSRTCTKVQMQGVTIGRAVDLSVLNGYDQLILELEKLFDIKGQLQTRNQWEIAFTDSDEDKMLVGDDPWPEFCNMVKKIFIQKRR

SEQ ID NO: 136 - protein, 615 aa, Arabidopsis thaliana
  Clone ID: AT_T9I1.C1.p3.tg
METGNVVNAQPELSGIIDGSKSYMYEQLWKLCAGPLCDIPKLGENVYYFPQGNIELVDASTREELNELQPICDLPSKLQCRVIAIHLKVENNSDETYAEITLMPDTTQVVIPTQSENQFRPLVNSFTKVLTASDTSAYGGFFVPKKHAIECLPPLDMSQPLPAQELLAKDLHGNQWRFRHSYRGTPQRHSLTTGWNEFTTSKKLVKGDVIVFVRGETGELRVGIRRARHQQGNIPSSIVSIDCMRHGVIASAKHALDNQCIFIVVYKPRSSQFIVSYDKFLDAMNNKFIVGSRFTMRFEGDDFSERRYFGTIIGVNDFSPHWKCSEWRSLEVQWDEFASFSRPNKVSPWEIEHLMSALNVPRSSLLKNKRLRETLEYLLNILVLYTCSSSSHILPPILTQGQEIGQLSVASPMNTSLRYRDTTEDAMNPSRLLMSYPVQPMPKLNYNNQMVTQIEENITTKAVTNFRLFGVSLAIPLVIKDPIEEIGSDISKLTEGKKFGQSQTLRSPIEIQSKQFGSTRTCTKVQMQGVTIGRAVDLSVLNGYDQLILELEKLFDLKGQLQTRNQWKIAFTDSDGYEMLVGDDPWPEFCKMVKKILIYSKEEVKNLKSSKSLSS

SEQ ID NO: 137 - protein, 693 aa, Arabidopsis thaliana
  Clone ID: AT_T1B3.C1.p13.tg
MEQEKSLDPQLWHACAGSMVQIPSLNSTVFYFAQGHTEHAHAPPDFHAPRVPPLILCRVVSVKFLADAETDEVFAKITLLPLPGNDLDLENDAVLGLTPPSSDGNGNGKEKPASFAKTLTQSDANNGGGFSVPRYCAETIFPRLDYSAEPPVQTVIAKDIHGETWKFRHIYRGTPRRHLLTTGWSTFVNQKKLIAGDSIVFLRSESGDLCVGIRRAKRGGLGSNAGSDNPYPGFSGFLRDDESTTTTSKLMMMKRNGNNDGNAAATGRVRVEAVAEAVARAACGQAFEVVYYPRASTPEFCVKAADVRSAMRIRWCSGMRFKMAFETEDSSRISWFMGTVSAVQVADPIRWPNSPWRLLQVAWDEPDLLQNVKRVSPWLVELVSNMPTIHLSPFSPRKKIRIPQPFEFPFHGTKFPIFSPGFANNGGGESMCYLSNDNNNAPAGIQGARQAQQLFGSPSPSLLSDLNLSSYTGNNKLHSPAMFLSSFNPRHHHYQARDSENSNNISCSLTMGNPAMVQDKKKSVGSVKTHQFVLFGQPILTEQQVMNRKRFLEEEAEAEEEKGLVARGLTWNYSLQGLETGHCKVFMESEDVGRTLDLSVIGSYQELYRKLAEMFHIEERSDLLTHVVYRDANGVIKRIGDEPFSDFMKATKRLTIKMDIGGDNVRKTWITGIRTGENGIDASTKTGPLSIFA

SEQ ID NO: 138 - protein, 1086 aa, Arabidopsis thaliana
  Clone ID: AT_T29M8.C1.p7.tg
MKAPSNGFLPSSNEGEKKPINSQLWHACAGPLVSLPPVGSLVVYFPQGHSEQVAASMQKQTDFIPNYPNLPSKLICLLHSVTLHADTETDEVYAQMTLQPVNKYDREALLASDMGLKLNRQPTEFFCKTLTASDTSTHGGFSVPRRAAEKIFPPLDFSMQPPAQEIVAKDLHDTTWTFRHIYRGQPKRHLLTTGWSVFVSTKRLFAGDSVLFVRDEKSQLMLGIRRANRQTPTLSSSVISSDSMHIGILAAAAHANANSSPFTIFFNPRASPSEFVVPLAKYNKALYAQVSLGMRFRMMFETEDCGVRRYMGTVTGISDLDPVRWKGSQWRNLQVGWDESTAGDRPSRVSIWEIEPVITPFYICPPPFFRPKYPRQPGMPDDELDMENAFKRAMPWMGEDFGMKDAQSSMFPGLSLVQWMSMQQNNPLSGSATPQLPSALSSFNLPNNFASNDPSKLLNFQSPNLSSANSQFNKPNTVNHISQQMQAQPAMVKSQQQQQQQQQQHQHQQQQLQQQQQLQMSQQQVQQQGIYNNGTIAVANQVSCQSPNQPTGFSQSQLQQQSMLPTGAKMTHQNINSMGNKGLSQMTSFAQEMQFQQQLEMHNSSQLLRNQQEQSSLHSLQQNLSQNPQQLQMQQQSSKPSPSQQLQLQLLQKLQQQQQQQSIPPVSSSLQPQLSALQQTQSHQLQQLLSSQNQQPLAHGNNSFPASTFMQPPQIQVSPQQQGQMSNKNLVAAGRSHSGHTDGEAPSCSTSPSANNTGHDNVSPTNFLSRNQQQGQAASVSASDSVFERASNPVQELYTKTESRISQGMMNMKSAGEHFRFKSAVTDQIDVSTAGTTYCPDVVGPVQQQQTFPLPSFGFDGDCQSHHPRNNLAFPGNLEAVTSDPLYSQKDFQNLVPNYGNTPRDIETELSSAAISSQSFGIPSIPFKPGCSNEVGGINDSGIMNGGGLWPNQTQRMRTYTKVQKRGSVGRSIDVTRYSGYDELRHDLARMFGIEGQLEDPLTSDWKLVYTDHENDILLVGDDPWEEFVNCVQNIKILSSVEVQQMSLDGDLAAIPTTNQACSETDSGNAWKVHYEDTSAAASFNR

SEQ ID NO: 139 - protein, 902 aa, Arabidopsis thaliana
  Clone ID: AT_F6F9.C1.p8.tg
MMASLSCVEDKMKTSCLVNGGGTITTTTSQSTLLEEMKLLKDQSGTRKPVINSELWHACAGPLVCLPQVGSLVYYFSQGHSEQVAVSTRRSATTQVPNYPNLPSQLMCQVHNVTLHADKDSDEIYAQMSLQPVHSERDVFPVPDFGMLRGSKHPTEFFCKTLTASDTSTHGGFSVPRRAAEKLFPPLDYSAQPPTQELVVRDLHENTWTFRHIYRGQPKRHLLTTGWSLFVGSKRLRAGDSVLFIRDEKSQLMVGVRRANRQQTALPSSVLSADSMHIGVLAAAAHATANRTPFLIFYNPRACPAEFVIPLAKYRKAICGSQLSVGMRFGMMFETEDSGKRRYMGTIVGISDLDPLRWPGSKWRNLQVEWDEPGCNDKPTRVSPWDIETPESLFIFPSLTSGLKRQLHPSYFAGETEWGSLIKRPLIRVPDSANGIMPYASFPSMASEQLMKMMMRPHNNQNVPSFMSEMQQNIVMGNGGLLGDMKMQQPLMMNQKSEMVQPQNKLTVNPSASNTSGQEQNLSQSMSAPAKPENSTLSGCSSGRVQHGLEQSMEQASQVTTSTVCNEEKVNQLLQKPGASSPVQADQCLDITHQIYQPQSDPINGFSFLETDELTSQVSSFQSLAGSYKQPFILSSQDSSAVVLPDSTNSPLFHDVWDTQLNGLKFDQFSPLMQQDLYASQNICMSNSTTSNILDPPLSNTVLDDFCAIKDTDFQNHPSGCLVGNNNTSFAQDVQSQITSASFADSQAFSRQDFPDNSGGTGTSSSNVDFDDCSLRQNSKGSSWQKIATPRVRTYTKVQKTGSVGRSIDVTSFKDYEELKSAIECMFGLEGLLTHPQSSGWKLVYVDYESDVLLVGDDPWEEFVGCVRCIRILSPTEVQQMSEEGMKLLNSAGINDLKTSVS

SEQ ID NO: 140 - protein, 1049 aa, Arabidopsis thaliana
  Clone ID: AT_T1M15.C1.p130.tg
MKAPSSNGVSPNPVEERRNINSELWHACAGPLISLPPAGSLVVYFPQGHSEQVAASMQKQTDFIPSYPNLPSKLICMLHNVTLNADPETDEVYAQMTLQPVNKYDRDALLASDMGLKLNRQPNEFFCKTLTASDTSTHGGFSVPRRAAEKIFPALDFSMQPPCQELVAKDIHDNTWTFRHIYRGQPKRHLLTTGWSVFVSTKRLFAGDSVLFIRDGKAQLLLGIRRANRQQPALSSSVISSDSMHIGVLAAAAHANANNSPFTIFYNPRAAPAEFVVPLAKYTKAMYAQVSLGMRFRMIFETEECGVRRYMGTVTGISDLDPVRWKNSQWRNLQIGWDESAAGDRPSRVSVWDIEPVLTPFYICPPPFFRPRFSGQPGMPDDETDMESALKRAMPWLDNSLEMKDPSSTIFPGLSLVQWMNMQQQNGQLPSAAAQPGFFPSMLSPTAALHNNLGGTDDPSKLLSFQTPHGGISSSNLQFNKQNQQAPMSQLPQPPTTLSQQQQLQQLLHSSLNHQQQQSQSQQQQQQQQLLQQQQQLQSQQHSNNNQSQSQQQQQLLQQQQQQQLQQQHQQPLQQQTQQQQLRTQPLQSHSHPQPQQLQQHKLQQLQVPQNQLYNGQQAAQQHQSQQASTHHLQPQLVSGSMASSVITPPSSSLNQSFQQQQQQSKQLQQAHHHLGASTSQSSVIETSKSSSNLMSAPPQETQFSRQVEQQQPPGLNGQNQQTLLQQKAHQAQAQQIFQQSLLEQPHIQFQLLQRLQQQQQQQFLSPQSQLPHHQLQSQQLQQLPTLSQGHQFPSSCTNNGLSTLQPPQMLVSRPQEKQNPPVGGGVKAYSGITDGGDAPSSSTSPSTNNCQISSSGFLNRSQSGPAILIPDAAIDMSGNLVQDLYSKSDMRLKQELVGQQKSKASLTDHQLEASASGTSYGLDGGENNRQQNFLAPTFGLDGDSRNSLLGGANVDNGFVPDTLLSRGYDSQKDLQNMLSNYGGVTNDIGTEMSTSAVRTQSFGVPNVPAISNDLAVNDAGVLGGGLWPAQTQRMRTYTKRIRKLCSEH

SEQ ID NO: 141 - protein, 653 aa, Arabidopsis thaliana
  Clone ID: AT_F6G3.C1.p110.tg
MINVMNPMKGGTEKGLDPQLWHACAGGMVRMPPMNSKVFYFPQGHAENAYDCVDFGNLPIPPMVLCRVLAIKYMADAESDEVFAKLRLIPLKDDEYVDHEYGDGEDSNGFESNSEKTPSFAKTLTQSDANNGGGFSVPRYCAETIFPRLDYNAEPPVQTILAKDVHGDVWKFRHIYRGTPRRHLLTTGWSNFVNQKKLVAGDSIVFMRAENGDLCVGIRRAKRGGIGNGPEYSAGWNPIGGSCGYSSLLREDESNSLRRSNCSLADRKGKVTAESVIEAATLAISGRPFEVVYYPRASTSEFCVKALDARAAMRIPWCSGMRFKMAFETEDSSRISWFMGTVSAVNVSDPIRWPNSPWRLLQVAWDEPDLLQNVKRVNPWLVELVSNVHPIPLTSFSPPRKKMRLPQHPDYNNLINSIPVPSFPSNPLIRSSPLSSVLDNVPVGLQGARHNAHQYYGLSSSDLHHYYLNRPPPPPPPSSLQLSPSLGLRNIDTKNEKGFCFLTMGTTPCNDTKSKKSHIVLFGKLILPEEQLSEKGSTDTANIEKTQISSGGSNQNGVAGREFSSSDEGSPCSKKVHDASGLETGHCKVFMESDDVGRTLDLSVLGSYEELSRKLSDMFGIKKSEMLSSVLYRDASGAIKYAGNEPFRYIFLL

SEQ ID NO: 142 - protein, 505 aa, Arabidopsis thaliana
  Clone ID: AT_F12G12.C1.p40.tg
MENNGEMNAQPELSGIIDITKTYMYEKLWNICAGPLCVLPKPGEKVYYFPQGHIELIENSTRDELDHIRPIFDLPSKLRCRVVAIDRKVDKNTDEVYAQISLMPDTTDMSQPISTQNLVAKDLYGQEWSFKHVFRGTPQRHMFTSGGGWSVFATTKRLIVGDIFVLLRGENGELRFGIRRAKHQQGHIPSSVISANCMQHGVIASVVNAFKTKCMFNVVYKPSYDKFVDAMNNNYIVGSRFRMQFEGKDFSEKRYDGTIIGVNDMSPHWKDSEWRSLKVQWDELSPFLRPNQVSPWDIEHLIPSSDISQSSATLSNLWTCQEIGQRSMNSPISVPEFSYPNAIEDSKFLSGLLLNHSLLAIPNENYNSDQMIQPRKEDITTEATTSCLLFGVDLTKVHMQGVAISRAVDLTAMHGYNQLIQKLEELFDLKDELRTRNQWEIVFTNNEGAEMLVGDDPWPEFCNMAKRIFICSKEEIKKMKLKNKFFQPESKALTSSDVPPNVTDN

SEQ ID NO: 143 - protein, 218 aa, Arabidopsis thaliana
  Clone ID: AT_F9C16.C1.p11.tg
MESGNVVNVQSELSGIIDGSKSYMYEQLWKLCAGPLCDIPKLGEKVYYFPQGHIELVEASTREELNELQPNCDLPSKLQCRVIAIHLKVENNSDETYVEITLMPDTTQVVIPTENENQFRPIVNSFTKVLTASDTSAQGEFSVPCKHAIECLPPLDMSQPIPAQELIAIDLHGNQWRFKHSYRDTTGWNAFTTSKKLVVGDVIVFARGETGELRVGIR

SEQ ID NO: 144 - protein, 576 aa, Arabidopsis thaliana
  Clone ID: AT_T3F17.C1.p31.tg
MGSVNCCRVRSSLLMAGWSMVADEDAVDYSKTPKSLDANRSPESVNPESTGFEKKIKELISLFRPLLDSFLAEFCSADGFLPLPAMTGEGRTVDLFNLFLNVTHKGGFDAVSENGSWDEVVQESGLESYDSASAKLIYVKYLDAFGRWLNRVVAGDTDVSSVELSGISDALVARLNGFLSEVKKKYELRKGRPAKELGAELKWFISKTKRRYDKHHVGKESASNDAVKEFQGSKLAERRLEQIMILESVTQECSSPGKRKRECPLETLKWLSDVAKDPCDPSLGIVPDRSEWVSYGSEEPWKQLLLFRASRTNNDSACEKTWQKVQKMHPCLYDDSAGASYNLRERLSYEDYKRGKTGNGSDIGSSDEEDRPCALVGSKFQAKVPEWTGITPESDSKWLGTRIWPLTKEQTKANLLIERDRIGKGRQDPCGCHNPGSIECVKFHITAKRDKLKLELGPAFYMWCFDVMGECTLQYWTDLELKKIKSLMSSPPSLSPAFIHQAKMILPSKSRGKIVSYFYNVTLLQYRASQSRITPHDIDSDTDQIFLRATENENPAPEANTFQKPALLSPNKKRCR

SEQ ID NO: 145 - protein, 717 aa, Arabidopsis thaliana
  Clone ID: AT_F7K15.C1.p90.tg
MFHGQGFSRNRCNVVAVVSGAELCDTNNQIDGTSHQPKYPFPDLSSSGRLKVLNNPTPEEFQVAVNSSATDFVYLQGEHSGDSDEVGPLVLGYTDFSTPDALVTLFGSTLPTTVYLELPNGEELAQALYSKGVQYVIYWKNVFSKYAACHFRHSLFSVIQSSCSDTWDVFHVAEASFRLYCTSDNAVLPSNSNRKMNYEMGPCLLGEPPKIDVVSPEADELEEENSLESLPSIKIYDEDVTVSYKAFSLFQDTFLLGSLMDGLNALLRIEMRGSKLHNRSSAPAPPLQAGTFTRGVVTMRCDVSTCSSAHISMLVSGNAQTCFKETKRGFSEPRRSASIACGASVCEVSMQVPTWALQVLRQLAPDVSYRSLVVLGVASIQGLSVASFEKDDAERLLFFCGQQINDTSNHDALLSKIPNWLTPPLPTRKRSEPCRESKEIENGGPTSRKINVAALRPIPHTRRHKMIPFSGYSEIGRFDGDHTKGSLPMPPKHGASGGTPVTHRKAFSGSYQRKQIISLNPLPLKKHDCGRAHIQVCSEEEFLRDVMQFLLIRGHTRLVPPGGLAEFPDAVLNSKRLDLFNLYREVVSRGGFHVGNGINWKGQVFSKMRNHTLTNRMTGVGNTLKRHYETYLLEYEYAHDDVDGECCLICRSSTAGDWVNCGSCGEWAHFGCDRRPGLGAFKDYAKTDGLEYVCPNCSVSNYRKKSQKTSNGGLLVP

SEQ ID NO: 146 - protein, 435 aa, Arabidopsis thaliana
  Clone ID: AT_F9H16.C1.p11.tg
MVDTEMQEQDVTFGALVETKYLEEEPLEPENDHNPSEIPQPLLLGDGQANNGHGMNGGAVGVVDHSERKTRRVQMLSPKTEGENAKKRKTWLLDSEAQGTDEAGTPVEQVAFLREVEAFYKESFLEFKPPKFYGQPLNILKLWRAVVNLGGYEVVTTNKLWRQVGESFNPPKTCTTVSYTFRNFYEKALLEYEKCLRNNGELNLPGSTLILSSSVEKEPSSHQGSGSGRARRDSAARAMQGWHAQRLVGSGEVTAPAVKDKGLISTPKHKKLKSIGLQKHKQQTSMDHVVTNEADKQLAAEVVDVGPVADWVKINVKESVSNFCQRLKKRQKLANWMFVSNMEFLPNLFSFFLNSQKDSFEIFALVPGLLRKEVRIQSDPAGKVVITGQPEQLDNPWGITPFKKIVDLSARIDPLHTSAVMSMHGRLFIRVPFEQ

SEQ ID NO: 147 - protein, 494 aa, Arabidopsis thaliana
  Clone ID: AT_F14G6.C1.p11.tg
MADTEMQEQDVPSGTKGVVEEPSELEKDLNSIERPKSPVPEDTTHTLDSDVHLSDAPIANQIEANEEVGGQNSVDGRNGDVDQSEKKITSDGGQEETTLGESNPLKGDPSSPHVPEESVKKWKTWLLSDAEAREVDEAGAPQDQEAFIKEVEAFNKENFLEFKAPKFYGQPLNCLKLWRAVIKLGGYDVVTTSKLWRQVGESFHPPKYGLYCPQSSTFSAFLTCTTVSWTFRIFYEKALLEYEKHLRQNGELNLPGSASLPSSGIEKEASSHQASGSGRTRRDAAARAMQGWHSQRLLGSGEVTEPIVKEKGLNSTPKQKNLKNIGNIPKRWLLCAETKNNNRHGPCFFTRIRKTVTKDNHLLYFCVAYARLLYHVQFHTILSIEKPCIVNVWSTAEVIDVGPPADWVKINVRETKDCFEIFALVPGLLREEVRVQSDPAGRLVIAGQPEQLDNPWGITPFKKVVNFPARIDPLHTSAVVSLHGRLFVRVPFEQ

SEQ ID NO: 148 - protein, 338 aa, Arabidopsis thaliana
  Clone ID: AT_T23E18.C1.p4.tg
MSSDNESTPSQATVEMMATSPAKIKEYPEPLALHEVVVKDSSVFWDTLRRFHSIMSTKFMIPVIGGKELDLHVLYVEVTRRGGYEKVVVEKKWREVGGVFRFSATTTSASFVLRKHYLNLLFHYEQVHLFTARGPLLHPIATFHANPSTSKEMALVEYTPPSIRYHNTHPPSQGSSSFTAIGTIEGKFDCGYLVKVKLGSEILNGVLYHSAQPGPSSSPTAVLNNAVVPYVETGRRRRRLGKRRRSRRREDPNYPKPNRSGYNFFFAEKHCKLKSLYPNKEREFTKLIGESWSNLSTEERMVYQDIGLKDKERYQRELNEYRETLRLRDGDMTNGKAF

SEQ ID NO: 149 - protein, 573 aa, Arabidopsis thaliana
  Clone ID: AT_F25E4.C1.p20.tg
MGSFNDTSCSYVDVEIKYVDECEERLRRLFDQALLVFLEEEGSIKPLPAVIGDGKNVDLFKLFVLVREREGFDTVSRKRLWEVVAEKLGFDCSLVPSLILIYLKYLNRMEKWAVEESRIVNWDNKDSEKKGCYSGMLHELGNGFKSLLDNGKCQKRNRAVAFGCNHMEESCSEFDRSRKRFRESDDDDKGVGLSSVVIREETVVCAVEEGLSDFSLEKRDDLPGMLKWLALVATSPHDPAIGVIPHSSKWKQYNGNKCWLQVARAKNSLLVQRDNAELRYRYHPFRGHQNIHHPSMYEDDRKSIGRLRYSIRPPNLSKHCSSSCCNGSSLVSLSKSRSTKCRKLTIIASERAGLTAGTSRARKRNKAEIPRRCIKVGHQHQAQVDEWTESGVDSDSKWLGTRIWPPENSEALDQTLGNDLVGKGRPDSCSCELSGFVECTRLHIAEKRMELKRELGDDFFHWRFNQMGEEVCLRWTEEEEKRFKDMIIADPQSFWTNAAKNFPKKKREELVSYYFNVFLINRRRYQNRVTPKSIDSDDEGAFGSVGGSFGRDAVTSSGSDVMICAQNRQCEDY

SEQ ID NO: 150 - protein, 319 aa, Arabidopsis thaliana
  Clone ID: AT_MDC11.C1.p14.tg
MSTDISPPYSQTHVEPVNGYPSDNKRCDDSSVPAKYDDLVRNSALFWEKLRAFLGLTSKTLKVPTVGGNTLDLHRLFIEVTSRGGIERVVKDRKWKEVIGAFSFPTTITSASFVLRKYYLKFLFQLEHVYYLEKPVSSLQSTDEALKSLANESPNPEEGIDEPQVGYEVQGFIDGKFDSGYLVTMKLGSQELKGVLYHIPQTPSQSQQTMETPSAIVQSSQRRHRKKSKLAVVDTQKPKCHRSGYNFFFAEQYARLKPEYHGQERSITKKIGHMWSNLTESEKQVYQDKGVKDVERYRIEMLEYKSSHESGATASTVAQ

SEQ ID NO: 151 - protein, 448 aa, Arabidopsis thaliana
  Clone ID: AT_F13M7.C1.p11.tg
MASSSCLKQGSVPMNNVCVTPEATYEAVVADPRLFMTSLERLHSLLGTKFMVPIIGGRDLDLHKLFVEVTSRGGINKILNERRWKEVTATFVFPPTATNASYVLRKYYFSLLNNYEQIYFFRSNGQIPPDSMQSPSARPCFIQGAIRPSQELQALTFTPQPKINTAEFLGGSLAGSNVVGVIDGKFESGYLVTVTIGSEQLKGVLYQLLPQNTVSYQTPQQSHGVLPNTLNISANPQGVAGGVTKRRRRRKKSEIKRRDPDHPKPNRSGYNFFFAEQHARLKPLHPGKDRDISRMIGELWNKLNEDEKLIYQGKAMEDKERYRTEMEDYREKKKNGQLISNAVPLQQRLPEQNVDMAEADLPIDEVEEDDEEGDSSGSSGESEPHDDQSIETDPELEEPSLNPSGPNLNPNPTEIVVAPKEKNGDVVMETSPLKKADEPTVAVTAEQN

SEQ ID NO: 152 - protein, 337 aa, Arabidopsis thaliana
  Clone ID: AT_F20N2.C1.p4.tg
MSTDSSQFEVVPANASALDNDVSSHMSMLYQDIVRNPELFWEMLRDFHESSDKKFKIPIVGGKSLDLHRLFNEVTSRGGLEKVIKDRRCKEVIDAFNFKTTITNSAFVLRKSYLKMLFEFEHLYYFQAPLSTFWEKEKALKLLIEKSANRDKDSQELKPGTVITGIIDGKFESGYLISTKVGSEKLKGMLYHISPETKRGKKKAKSSQGDSHKPPKRQRTGYNFFVAEQSVRIKAENAGQKVSSPKNFGNMWTNLSESDRKVYYEKSREDGKRYKMEILQYRSLMESRVAEIVAATDAGTSASAAETADEASQENLAKTDACTSASSAAETEDEVSQ

SEQ ID NO: 153 - protein, 597 aa, Arabidopsis thaliana
  Clone ID: AT_F9B22.C1.p8.tg
MLKQGTIAWLYRDRLIKNPKITKKAMVDEIQREYKLTVTEDQCSKAKTIVMRERKATHQEHFSRIWDYQAEIFRTNPGTKFEIETIPGPTIGSLQRFYRLFICFKSQKDSWKQTCRPIIGIDGAFLKWDIKGHLLAATGRDGDNRIVPIAWAVVEIQNDDNWDWFVRQLSESLDLQDGRSVAIISDKQSGLGKAIHTVIPQAEHRQYARHIMDNWKKNSHDMELQRLFWKTNPLTWSRAFFRIGSCCNDNLNNLSESFNRTIRNARRKPLLDMLEDIRRQCMVRNEKRFVIAYRLKSRFTKRAHMEIEKMIDGAAVCDRWMARHNRIEVRVGLDDSFSVDMNDRTCGCRKWQMTGIPCIHAASVIIGNRQKVEDFVSDWYTTYMWKQTYYDGIMPVQGKMLWPIVNRVGVLPPPWRRGNPGRPKNHDRRKGIYESATASTSREGHNKAGCKNETVAPPPKRPRGRPRKDQDSRTILFGHGQSWQGSQGEPSVASQPAQPSQPSQPSQPSQPALSQPSLSQQSQRAPSAPSEPPAPPAPSAPSAPSQRVSPRGVAQRRGSQRGVSSRGGSQRRGSQRGGSQRGGLEGWGSWFECSNNR

SEQ ID NO: 154 - protein, 302 aa, Arabidopsis thaliana
  Clone ID: AT_F14G6.C1.p10.tg
MDGGYDQSGGASRYFHNLFRPELHHQLQPQPQLHPLPQPQPQPQPQQQNSDDESDSNKDPGSDPVTSGSTGKRPRGRPPGSKNKPKPPVIVTRDSPNVLRSHVLEVSSGADIVESVTTYARRRGRGVSILSGNGTVANVSLRQPATTAAHGANGGTGGVVALHGRFEILSLTGTVLPPPAPPGSGGLSIFLSGVQGQVIGGNVVAPLVASGPVILMAASFSNATFERLPLEDEGGEGGEGGEVGEGGGGEGGPPPATSSSPPSGAGQGQLRGNMSGYDQFAGDPHLLGWGAAAAAAPPRPAF

SEQ ID NO: 155 - protein, 693 aa, Arabidopsis thaliana
  Clone ID: AT_F2H15.C1.p1.tg
MDKSIPIKAIPVACVRPDLVDDVTKNTSTIPTMVSPVLTNMPSATSPLLMVPPLRTIWPSNKEWYDGDAGPSSTGPIKREASDNTNDTAHNTFAPPPEMVIPLITIRPSDDSSNYSCDAGAGPSTGPVKRGRGRPKGSKNSTPTEPKKPKVYDPNSLKVTSRGNFDSEITEAETETGNQEIVDSVMMRFDAVRRRLCQINHPEDILTTASGNCTKMGVKTNTRRRIGAVPGIHVGDIFYYWGEMCLVGLHKSNYGGIDFFTAAESAVEGHAAMCVVTAGQYDGETEGLDTLIYSGQGGTDVYGNARDQEMKGGNLALEASVSKGNDVRVVRGVIHPHENNQKIYIYDGMYLVSKFWTVTGKSGFKEFRFKLVRKPNQPPAYAIWKTVENLRNHDLIDSRQGFILEDLSFGAELLRVPLVNEVDEDDKTIPEDFDYIPSQCHSGMMTHEFHFDRQSLGCQNCRHQPCMHQNCTCVQRNGDLLPYHNNILVCRKPLIYECGGSCPCPDHCPTRLVQTGLKLHLEVFKTRNCGWGLRSWDPIRAGTFICEFAGLRKTKEEVEEDDDYLFDTSKIYQRFRWNYEPELLLEDSWEQVSEFINLPTQVLISAKEKGNVGRFMNHSCSPNVFWQPIEYENRGDVYLLIGLFAMKHIPPMTELTYDYGVSCVERSEEDEVLLYKGKKTCLCGSVKCRGSFT

SEQ ID NO: 156 - protein, 310 aa, Arabidopsis thaliana
  Clone ID: AT_T22E16.C1.p220.tg
MANPWWVGNVAIGGVESPVTSSAPSLHHRNSNNNNPPTMTRSDPRLDHDFTTNNSGSPNTQTQSQEEQNSRDEQPAVEPGSGSGSTGRRPRGRPPGSKNKPKSPVVVTKESPNSLQSHVLEIATGADVAESLNAFARRRGRGVSVLSGSGLVTNVTLRQPAASGGVVSLRGQFEILSMCGAFLPTSGSPAAAAGLTIYLAGAQGQVVGGGVAGPLIASGPVIVIAATFCNATYERLPIEEEQQQEQPLQLEDGKKQKEENDDNESGNNGNEGSMQPPMYNMPPNFIPNGHQMAQHDVYWGGPPPRAPPSY

SEQ ID NO: 157 - protein, 311 aa, Arabidopsis thaliana
  Clone ID: AT_F9H16.C1.p12.tg
MEGGYEQGGGASRYFHNLFRPEIHHQQLQPQGGINLIDQHHHQHQQHQQQQQPSDDSRESDHSNKDHHQQGRPDSDPNTSSSAPGKRPRGRPPGSKNKAKPPIIVTRDSPNALRSHVLEVSPGADIVESVSTYARRRGRGVSVLGGNGTVSNVTLRQPVTPGNGGGVSGGGGVVTLHGRFEILSLTGTVLPPPAPPGAGGLSIFLAGGQGQVVGGSVVAPLIASAPVILMAASFSNAVFERLPIEEEEEEGGGGGGGGGGGPPQMQQAPSASPPSGVTGQGQLGGNVGGYGFSGDPHLLGWGAGTPSRPPF

SEQ ID NO: 158 - protein, 315 aa, Arabidopsis thaliana
  Clone ID: AT_F7O18.C1.p4.tg
MANPWWTGQVNLSGLETTPPGSSQLKKPDLHISMNMAMDSGHNNHHHHQEVDNNNNDDDRDNLSGDDHEPREGAVEAPTRRPRGRPAGSKNKPKPPIFVTRDSPNALKSHVMEIASGTDVIETLATFARRRQRGICILSGNGTVANVTLRQPSTAAVAAAPGGAAVLALQGRFEILSLTGSFLPGPAPPGSTGLTIYLAGGQGQVVGGSVVGPLMAAGPVMLIAATFSNATYERLPLEEEEAAERGGGGGSGGVVPGQLGGGGSPLSSGAGGGDGNQGLPVYNMPGNLVSNGGSGGGGQMSGQEAYGWAQARSGF

SEQ ID NO: 159 - protein, 206 aa, Arabidopsis thaliana
  Clone ID: AT_F14L17.C1.p23.tg
METVGRPRGRPRGSKNKPKAPIFVTIDPPMSPYILEVPSGNDVVEALNRFCRGKAIGFCVLSGSGSVADVTLRQPSPAAPGSTITFHGKFDLLSVSATFLPPLPPTSLSPPVSNFFTVSLAGPQGKVIGGFVAGPLVAAGTVYFVATSFKNPSYHRLPATEEEQRNSAEGEEEGQSPPVSGGGGESMYVGGSDVIWDPNAKAPSPY

SEQ ID NO: 160 - protein, 1128 aa, Arabidopsis thaliana
  Clone ID: AT_F3F19.C1.p25.tg
MTPRSETHKIGGVTNPRNADRKGKAVAFSDDLVIPTLPPPPIGTLTGQGVSRGHTDDMDMGDWRRFREVGLLNEASMEKKDQEALLEKISTLEKELYGYQHNMGLLLMENKELVSKHEQLNQAFQEAQEILKREQSSHLYALTTVEQREENLRKALGLEKQCVQELEKALREIQEENSKIRLSSEAKLVEANALVASVNGRSSDVENKIYSAESKLAEATRKSSELKLRLKEVETRESVLQQERLSFTKERESYEGTFQKQREYLNEWEKKLQGKEESITEQKRNLNQREEKVNEIEKKLKLKEKELEEWNRKVDLSMSKSKETEEDITKRLEELTTKEKEAHTLQITLLAKENELRAFEEKLIAREGTEIQKLIDDQKEVLGSKMLEFELECEEIRKSLDKELQRKIEELERQKVEIDHSEEKLEKRNQAMNKKFDRVNEKEMDLEAKLKTIKEREKIIQAEEKRLSLEKQQLLSDKESLEDLQQEIEKIRAEMTKKEEMIEEECKSLEIKKEEREEYLRLQSELKSQIEKSRVHEEFLSKEVENLKQEKERFEKEWEILDEKQAVYNKERIRISEEKEKFERFQLLEGERLKKEESALRVQIMQELDDIRLQRESFEANMEHERSALQEKVKLEQSKVIDDLEMMRRNLEIELQERKEQDEKDLLDRMAQFEDKRMAELSDINHQKQALNREMEEMMSKRSALQKESEEIAKHKDKLKEQQVEMHNDISELSTLSINLKKRREVFGRERSRFLAFVQKLKDCGSCGQLVNDFVLSDLQLPSNDEVAILPPIGVLNDLPGSSNASDSCNIKKSLDGDASGSGGSRRPSMSILQKCTSIIFSPSKRVEHGIDTGKPEQRLSSSVAVGMETKGEKPLPVDLRLRPSSSSIPEEDEEYTDSRVQETSEGSQLSEFQSSRRGRGRPRKAKPALNPTSSVKHASLEESSKDELSGHVSVTSKKTTGGGGRKRQHIDDTATGGKRRRQQTVAVLPQTPGQRHYNLRRKKTVDQVPADVEDNAAAGEDDADIAASAPSKDTVEETVVETLRARRIETNADVVSAENNGDVPVANVEPTVNEDTNEDGDEEEDEAQDDDNEENQDDDDDDDGDDDGSPRPGEGSIRKKLWTFLTT

SEQ ID NO: 161 - protein, 324 aa, Arabidopsis thaliana
  Clone ID: AT_T12H17.C1.p200.tg
MDPVQSHGSQSSLPPPFHARDFQLHLQQQQQEFFLHHHQQQRNQTDGDQQGGSGGNRQIKMDREETSDNIDNIANNSGSEGKDIDIHGGSGEGGGGSGGDHQMTRRPRGRPAGSKNKPKPPIIITRDSANALRTHVMEIGDGCDLVESVATFARRRQRGVCVMSGTGNVTNVTIRQPGSHPSPGSVVSLHGRFEILSLSGSFLPPPAPPTATGLSVYLAGGQGQVVGGSVVGPLLCAGPVVVMAASFSNAAYERLPLEEDEMQTPVHGGGGGGSLESPPMMGQQLQHQQQAMSGHQGLPPNLLGSVQLQQQHDQSYWSTGRPPY

SEQ ID NO: 162 - protein, 339 aa, Arabidopsis thaliana
  Clone ID: AT_F16J13.C1.p120.tg
MDPVQSHGSQSSLPPPFHARDFQLHLQQQQQHQQQHQQQQQQQFFLHHHQQPQRNLDQDHEQQGGSILNRSIKMDREETSDNMDNIANTNSGSEGKEMSLHGGEGGSGGGGSGEQMTRRPRGRPAGSKNKPKAPIIITRDSANALRTHVMEIGDGCDIVDCMATFARRRQRGVCVMSGTGSVTNVTIRQPGSPPGSVVSLHGRFEILSLSGSFLPPPAPPAATGLSVYLAGGQGQVVGGSVVGPLLCSGPVVVMAASFSNAAYERLPLEEDEMQTPVQGGGGGGGGGGGMGSPPMMGQQQAMAAMAAAQGLPPNLLGSVQLPPPQQNDQQYWSTGRPPY

SEQ ID NO: 163 - protein, 265 aa, Arabidopsis thaliana
  Clone ID: AT_T4C21.C1.p280.tg
MDEVSRSHTPQFLSSDHQHYHHQNAGRQKRGREEEGVEPNNIGEDLATFPSGEENIKKRRPRGRPAGSKNKPKAPIIVTRDSANAFRCHVMEITNACDVMESLAVFARRRQRGVCVLTGNGAVTNVTVRQPGGGVVSLHGRFEILSLSGSFLPPPAPPAASGLKVYLAGGQGQVIGGSVVGPLTASSPVVVMAASFGNASYERLPLEEEEETEREIDGNAARAIGTQTQKQLMQDATSFIGSPSNLINSVSLPGEAYWGTQRPSF

SEQ ID NO: 164 - protein, 995 aa, Arabidopsis thaliana
  Clone ID: AT_T20F20.C1.p5.tg
MTKIRMGGVISTIGSGESESVVDRGVEVAVELESVVGDGVEVPPVEAPVGIELVARGEDCVPSRHRKRRKIRVGDEDEAEIDPDPDYEDDCAVHGDEDCDAYTDAVGGDDDATGGEGNDDEAVGGGDDATGCGGNDDEALGYDDDATSDGGNDDDDGGVEEDANLNLAEEFPEFAGVEEDCSDDDPPDDVWEEDKIPDPFSSDDEDESRTREVHGHRDAANEEVLLELKKTYNTPDDFKLAVLRYSLKTRYDIKLFRSEARIVAAKCSYVDKDGVQCPWKVYCSYEKTMHKMQIRTYVNNHICVRSGHSKMLKRSSIAYLFEERLRVNPKLTKYEMAAEILREYNLEVTPDQCAKAKTKVVKARNASHEAHFARVWDYQAEVIKQNPWTEFEIETTAGAVIGAKQRPFIGLDGAFLKWDIKGHLLAAVGRDGDNKIVPIAWAVVEIENDDNWDWFLRHLSASLGLCQMANIAILSDKQSGLVKAIHTILPHAEHRQCSKHIMDNWKRDSHDLELQRLFWKIARSYTVEEFNNHMMELQQYNRQAYESLQLTSPVTWSRAFFRIGTCCNDNLNNLSESFNRTIRQARRKPILDMLEDIRRQCMVRSAKRFLIAEKLQTRFTKRAHEEIEKMIVGLRQCERYMARENLHEIYVNNVSYFVDMEQKTCDCRKCQMVGIPCIHATCVIIGKKEKVEDYVSDYYTKVRWRETYLKGIRPVQGMPLWCRTNRLPVLPPPWRRGNAGRPSNYARRKGRNEAAAPSNPNKMSREKRIMTCSNCHQEGHNKQRCNIPTVLNPTKRPRGRPRKNQQPQSHQGSQADLESQGPSAAGRGLGSQGPSAAGRGLGSQGPSAAGRGLGSQGPSAAGRGLGSQEPSAAGRGRGAQGPSAAGRGRVAQGPRAAGRGRGAQGQRAAGRGCGAQGQTASGGGRGAQRQAGGPSQGPQPYRRHGSAQAEAEPQGLRRFESWFECSDNLSHKFLFVIVCSLVISFFLVVELVFMT

SEQ ID NO: 165 - protein, 946 aa, Arabidopsis thaliana
  Clone ID: AT_F9C16.C1.p9.tg
MARTRGGKVILRRSQRLSQASADEAEDVPQLVDVVQPKSNRKSRKRKKDDVVDCEEDREALSDDDCAVDGDEDCDEVCYADERVGNNKQIGEEGECHIVCVEAEVNDGGGVEVEVDDGGGLERDVNDGGIVEAEVNNGGNAEAEVNDGGGVEAEVNNGESVEEEGNGGLDMEEEDCEDFEAEFGAEAREEENESDGDSGDDIWDDERIPDPLVHSDDEGDNDDEDGAPQTDDPEESLRLAKTFNNPEDFKIAVLRYSLKTRYDIKLYRSQSLRVGAKCTDTDVNCQWRCYCSYDKKKQKMQVKVYKDGHSCVRSGYSKMLKQRTIAWLFRERLRKNPKITKQEMVDEIKREYKLTVTEDQCSKAKTMVMRERQATHQEHFARIWDYQAKIFRSNPGTTFEIETILGPTIGSLQRFLRLFICFKSQKESWKQTCRPIIGIDGAFLKWDIKGHLLAATGRDGDNRIVPIAWAVVEIENDDNWDWFVRMLSRTLDLQDGRNVAIISDKQSGLVKAIHSVIPQAEHRQCARHIMENWKRNSHDMELQRLFWKIVRSYTEGEFGAHMRALKSYNASAFELLLKTLPVTWSRAFFKIGSCCNDNLNNLSESFNRTIREARRKPLLDMLEDIRRQCMVRNEKRYVIADRLRTRFTKRAHAEIEKMIAGSQVCQRWMARHNKHEIKVGPVDSFTVDMNNNTCGCMKWQMTGIPCIHAASVIIGKRQKVEDYVSDWYTTSMWKQTYNDGIGPVQGKLLWPTVNKVGVLPPPWRRGNPGRPKNHARRKGVFESSTASSSSTTELSRLHRVMTCSNCQGEGHNKQGCKNETVAPPAKRPRGRPRKDKDPRMVFFGQGQTWQEPQAQGAPSSHGAPSQVFHGAPLSQPSQEAPSQGAPSQGAQSLSQPSQEAPSQAAPTETRGTRSVRRGESQRGGRGGSQRGGRGLQGLEAWFNCSN

SEQ ID NO: 166 - protein, 345 aa, Arabidopsis thaliana
  Clone ID: AT_F6N15.C1.p24.tg
METSDRISPGGGIGAEVPSAYHMAPRPSDSPANQFMGLSLPPMEAPMPSSGEASGKKRRGRPRKYEANGAPLPSSSVPLVKKRVRGKLNGFDMKKMHKTIGFHSSGERFGVGGGVGGGVGSNFTPHVITVNTGEVCILEEKGPKLSLGRRFDITMRIISFSQQGPRAICILSANGVISNVTLRQPDSCGGTLTYEGRFEILSLSGSFMETENQGSKGRSGGMSVSLAGPDGRVVGGGVAGLLIAATPIQVTHESNNNVYVVVGSFITSDQQDHQKPRKQRVEHAPAAVMSVPPPPSPPPPAASVFSPTNPDREQPPSSFGISSWTNGQDMPRNSATDINISLPVD

SEQ ID NO: 167 - protein, 294 aa, Arabidopsis thaliana
  Clone ID: AT_MBG8.C1.p20.tg
MEKESHEENNHTISGDLTAKRKRGRPRKQLKLESNEHSLGHSPSFSRSQQQSRQRNDDEAMVGQPISGVIEATFEAGFLLSVKVGNSDSMLRGVVFKPGHCDPVSVDNDVAPDVPMIRRNSDVMHHDGSAKRGRKSRFREKRGSGVRSRALVPVPIQPAHPTIPNNLIVPVVLQPAHLENGGERVPIDHSPMQTETGSQASGASNGKPFETLLTQVMNKGQVQHTTQSVEPESDEQALSIEPLQAIHPIHPVHMLKPMPSYGRGKMTELLQVLNPTIPMIISQAYLVFSIEIHV

SEQ ID NO: 168 - protein, 352 aa, Arabidopsis thaliana
  Clone ID: AT_F2E2.C1.p19.tg
MASNDDLEFSFFDLPETFGVLTECGGNASLLVSENEHNDLVGYNPVSAATSDVFPSPLIENSNTDQETLTRTSSSFDQETAIVAHNQSFHQDDDYSKYLTTAENFNDMPSSVFSNGQRENVDSGSYVLTSSNQMMTTGLQSTDVQHGPPEQSYQQPLLSQTIPHFSNQPYVSTLPDSFAYAFQKSSSLNPTRRPRGRPRRIQSVMPPSLTITTPQNMSLVPAIQTLSTPPSTPYRAQEKGKQHVTAMPSLNPTLYNQYQNSYTNSMIQQGGGLSQRDCYDQFENEGSSSKRKRIMLPFQEKSIAESSSVSLWQDGNRRSSAANNNEERLENTVYDPFYAGVGLPLDPHLRFF

SEQ ID NO: 169 - protein, 237 aa, Arabidopsis thaliana
  Clone ID: AT_F2D10.C1.p8.tg
MANSTGKPTSSTQEDEEVTYILAQLMQDVMDREEDIDDEDDIDDEVASLPLLLVSQANQKQSRKREEKTEKNQPKRVKNQNIMKINIHDFSEETLRLIEDWYNAELDPQDIFGDDEVTRRFSRPIKKQLMSSDVDTDQSRLMLSKEQVKEKMLPFLEESEDPVKGVDVSVYGPDGEVQQMKFKMWNGDKTPVLTSGWMQFVADYGLLKTSDFVTDGKVSQLEHVFIRGSKVRCCNTS

SEQ ID NO: 170 - protein, 487 aa, Arabidopsis thaliana
  Clone ID: AT_T30F21.C1.p3.tg
MAEEQREISHENNVSLGSAETAIPLTNVSISPTKKEEQKTVYLVLFGRTIYVESSSLESEETVMPIVDVPKSPAKEDLTTHCSLDAESSEKGFPVDPYMGILGNNPNINSNVTCAGNKDLTEDIIKFKKMRSLSKEKIVEEKGTRVLTELPPYTWTIKKTLKESDINHQCRLLLNTTDAENHIMRHLPTDDQKKIQEGIGVDVKAYDHDTYTEHDMVFKRHVKTSKSYVFNGGWAKAFVGRRELKEGDKIGLFWAKKSQTFMSQEQQGTSPLNTDEALKSHHSFSQNPNYIESNLSRRYQTNFSLGSQRISGQFLMIPNPGFVDTSSMTNTHDTSLANFQTVPTTTNPKIILKEEKENEEEQQYWTIKKELTKSDACQRLTLSKSSVEEHILKHLLPEDSQKIDKGKPGITVKVYDNDTDTEHELCLAFQCSYVLKNGWVKTFVKRRGLEEGDMIGLFWECSTSKLHFSVLFRVNAKAPAAEEKEAY

SEQ ID NO: 171 - protein, 278 aa, Arabidopsis thaliana
  Clone ID: AT_F7D8.C1.p24.tg
MSFDVRSEKIDLIKGPELPDYNMFMSQKFTSYEGKLAILLTGNGDCSFYMWILEDAAKHEWSKKAYVVPDFFPLDPFVLLMQRANENDIVRTFHYDDRVGTSDAIVESTPASPPRHIMFSVIIRKDSPLRNLRGAKSIFKVSFTIILKTFIVKLIMMKDFQLDGDMIISKTLSRTDVDHHGRLFLPKNQVLSVLKKMRNVTKESLRKGIELEVVDIIENDSYSVILKSRNTTNDFVLASGWSIMKHSLDLQEGDDIKLFWDYLNYKFIILNFEYNLIP

SEQ ID NO: 172 - protein, 326 aa, Arabidopsis thaliana
  Clone ID: AT_T1B8.C1.p29.tg
MKMPPPFSASKTQYLFHDESSENSKKSLVSTTLSLSSCENPNKRKMNSDEVLNISCIPRDYKLTQVERKIARMRNLSYQEKAEDEWYGVSTELTLFKDPWIIKKVFHFASVLDMAPNSVSNTHCLLDTESPENAEESLVSLDLCFYDKTWPHDPNVAYNKPTSEEAINLAWMRTMSKRARKEEEKYYVSTELTLLTVADPWTLKMAMTKSSIGNLYRLVLKASFVDIHILRYLPLDDQMMVKEDSGLAVEVYDHDTDSVHNLALKKWAKSSSFVLVSGWRKCFVDRRGLQVGDVIGMYWDRSESKLHFCVLSRSETMDSAPLPPSP

SEQ ID NO: 173 - protein, 250 aa, Arabidopsis thaliana
  Clone ID: AT_F4C21.C1.p9.tg
MANSTGKPTSSTQEDEEATSATEILAQLMQDIIDREEDIDDEDDIDDEVIDDEDYEVASLPLLQESQANQKQSREREEETEKNQPKRFKKQNMMKINIHDFSEETLRLIEVWYEAELDPQDIFGDNEVTRLFSRPIKKQLMSSDVDKDQCMLMLSKEQVKEKMLPFLEDSENPVKGIDVSVYGPDGKVQQMEFKMWNGDKTPVLTSGWKQFVEDYGLSMTCDFVTVWMFRHIKTRKLCFAIHYVKFSLRD

SEQ ID NO: 174 - protein, 301 aa, Arabidopsis thaliana
  Clone ID: AT_MRG7.C1.p5.tg
MKNKAFGQIMDDAENPGFFKILRSADLSSEIMRGIPLNFIKSISEEELSAKMLLKVSWGSSWPIKICRNPSFYFMEKKGWDQFLSDNGLGNDEFLTFTHQGNMCFTVDIYQIDGKELLTPRRSATIASSSGRNKREQRNNIYKDVKEEEDIESWSESSYPGHKTAESTGRRQRLSLSNKKAKETEKSKKKKMKVESISYDSQDDSLSLVPEFTLTIKKSYLIFLGIPKMFEELHMPTEATMFKIHDPEGKRSWDVMYKFSNNQTRFCAGWIRLAKELGLEIGDVCTFTLIKPTEMLVRVSK

SEQ ID NO: 175 - protein, 343 aa, Arabidopsis thaliana
  Clone ID: AT_T20M3.C1.p18.tg
MTTNDDDHAAERNTMSMNYELAATLSDEEQRARKGKAKIVCKEEDHVFIKKKEKYEEESEKREFFSHVPRKIRPALRYPQPNFENPNGASSSLNLPFEEDYYMAEYYKKTETINPPNPYHQWSPSSFLTEYTHPRMLEVMKDMRAEDLTLILEKTLSTTDVITTTHGRFSMHFNRLISNDFLKPEERSILEEDTYNDETMGVGAILVDQRSQKWSVILKRWGQNYFLSCGWNDVVKANKLKAGDDICLWAFSIAPIFVIDKFLVSVEIHIGLIFQAILETPSLCLTGDHEPQEACGVTERDRVALPMLAVSAKLLVSVEIDLHLYSRLSWGNSRGFWSYYNAR

SEQ ID NO: 176 - protein, 1440 aa, Arabidopsis thaliana
  Clone ID: AT_F25P17.C1.p5.tg
MANSRIYPQFFHTLVPSFHTHLMIPEDFFSEYIEGRSVAELKLDFSDKSWEVKLSDRRITDGWEEFVVANDFRIGDVVAFRYVGNLVFHVSNLGPNYYEIEHNDELPKEKKAKTNSEEADAVSSSSSADKSCFMAIITALDLTTDTLYLPLHFTSANGLTRKNREIILTDGGERSRVLDLRFDESSGTFYISRGWRNFCDENGQKAGGFFLFKLVGKGETLVLSFCPTESINGEENITREDSKDECSSLDSLMNIVEKKKYIPKPRGSPYSSYSPSHKQFVTFTLPPDYARIGKLSLSAPFVRENGINKPGEICLLDKHGRKWLTSLLLDSKGTMSLGKGWKEFVKANSLETGFTLKLIWEETTPVLSLCSPESNSDREQEEISKAIEKHSLFIDPSNRDKISNNDKEENMSWERKKDHLKSRDSTLSSQKQFVTITITPSSDRLVSLSNDSCLVVVSLLYFDMRLPKVFTRENGINKPGRITLLGKDGIKQQTNLLFDKANGAMSLGHGWKDFVKDNGLKTGDSFTLKLIWEDQTPVLSLCPADCSIDREAGGGRSETNQKKSLPIEPSTCKKIRKDVNIKDDNSKEKNDKEESKSVDGERKYLRGTYLTPSSQKHFVTLTITPSSIKKDRLILSPQFARKNNIDKPGMIYLLDTDGTKWLISLQRDKKGTMSLGKGWKEFAEANDFKLGESFTMELVWEDTTPMLSLLRTEFRSSKANEKESISSEHKTRESSPTIKNRIVTPALTPEDVKACKLVTSSNYSCFSEILSAQFARENNINQPGTIYLLDTDGRKWLTTVKRDKKGTMSLGKGWKEFADTKDLKSGDSFTMELIWEDTNPVLSLLRTKFSSSKSNKEESIFLEPKSRDSSSPTIVNRFVTLALTPEDVTACKLILPSQFMKANGINNKLGKITLLGENGVEWPGYMLSLDGTLALGNGWEGFCEANGVKLGQTFTLEFVNEQDTTTTPRIPVAFFLKNIEGRYEQKTAELRSDASKITWEVKIDGQRLTDGWKEFALSHDLRIGDIVVFRQERDMSFHVTMLGPSCCEIQYGSCSDEERNLEKKKNPNGEAKSSSLDPSCFSANVAPSSLRYDLMLFPMGFVRENGVVGSGKIVLMNEKGRSWNFNLRQKPSCGTVYVRGGWVSFCDANGLQAGDIYTFKLIKRGGTLVLRLLPKGAESCSLDPSCFVANVAPSTLRYDTLYLPKRFMRENGVDKRRGEMILMNEKGKSWTLDLKLKKSCGTSLIRRGWRSFCSANGLRAGSIITFKLIKKSGTLVLCLLSNEPEEEVCSEANEVESLSTDQESHEESSHNEKISRRKEKKGRMIWKASSSPSENRFVTLNLTPYNILRSALRLPIPFTRMNGINEETKMTLLDKHGMKWLTTLRLVDYKRKRLGMVGGWKGFIQANGVKANESIMLELIWEEETSCVLKFCSKVKLAIK

SEQ ID NO: 177 - protein, 273 aa, Arabidopsis thaliana
  Clone ID: AT_MCK7.C1.p15.tg
MAMAYEEARKLRLQENHKRFQSNFVALPQFQLLQQRNHKPIDKALLATAEPRRSSRVRTVISSYRDDVVVDTGRTSNLRRSRHSSTWATYISRPLHECKFASYEEKVGAFKAAEKFQRSLKSPHPYFVKSMVRSHVYSCFWLGLPSRFCADNFPEETMEIELEDEEGEVYEAVYIGRRAGLSGGWKRFALDHKLDDGDALLFELVEPKKFKIYVFKGNENANLTSARKRGRATTPSEEEEEEEDKDVEESGDEEHSSRATKRSSVRLLRKRKA

SEQ ID NO: 178 - protein, 310 aa, Arabidopsis thaliana
  Clone ID: AT_T5J8.C1.p19.tg
MTLSDDPISPSTQESSNSSYVRSKEAEKNSPSQETDEEVLKGYESYRENPSNYDNDNILIYTDTFNLYDDMFEGSLDSTRNFGAQKDPNVLVMQRLLHNSGSLIGVDMEQDGIDLATLFADSTEDSKLPYVIYEGLEMQGEGYGTNTRGPFENKIDIGSFGKSGSVMNVEREKEKIVMIPTPRFGNATPQWTIKKKLSSYDIRPRCGRLILQSSSFNEHIGRHLPKDQMIKINVGVNVNVYDYDTGTLHELRLEYQRQYGLAHGWQEDFVRRRHLKQKDEIGLLWDFSSSRLQFGVISRNTGPGLWETKD

SEQ ID NO: 179 - protein, 461 aa, Arabidopsis thaliana
  Clone ID: AT_F28M20.C1.p120.tg
MANASPLSPTNQHFFQPLLPGFQSNLKIPVNYFSEHIEGKHEGKTVTLRTDASERTWEVKMEGHRLTEGWKEFVEAHDLRIGDFVVFRHEGDMVFHVTALGPSCCEIQYPQSSRHEEGEESGENEISEKEGEENVQKESDKSSSDLNCFSQSVTHSNISRDAVSVPRDFVKRSGFSKGRHEIVLMNEEGKSWESEVKSYMSGAVYLVGGWTTFCTENKLDVGDSCTFKLLQKAKTPVFQLCSRTKHLPLSFTKVNGLINPGKIILVDKDRAEWSMMLKVDSRGAVYIIGGNDWKSFCAANEVGAGESLALELIQGGVLLNQITTCFQMEQPSFKAEDGRHKRARVQNRSQETDKGAETSRASTMGPKLEITEKGEPSRASTMRPKVEIREKIAETGEPSRASNKSSGIEGNLQHTKPCSVKTDQLAKVKESVVDTLTSIGRFQAELETMKRKLEDSLQELN

SEQ ID NO: 180 - protein, 352 aa, Arabidopsis thaliana
  Clone ID: AT_F28M20.C1.p170.tg
MKNPTLFAPKSPHFFQPILPGFKSHIKIPVKFFSKHIEGKHEGNTVYLRSYPSRRTWKVKMEGHKLTEGWKEFVEAHDLRVGDFVVFKHKGDMLFHVTAIGPSCCEVQYAPSRSHDRNEESDEIGESSRNEKIIEENVKTEPDQFSPDLTCFSQSVTASNLTRDLVGIPRDFAKRYGLNIGRHEIVLMDEEGNTWESEVKSYKSGRVFIAGGWTSLCTANKLEVGDSCTFKLLRNPKIPVFRLCSRPKAGAEARPHKRSRVQSSSGGSRQKHDVRQKLDEEGGPSRCTRSSNKATGDQEKLQQTQSCFIFDHVAKVKQSVEDTLNSIRRFRAKLETKEHNLEALLQETKTKL

SEQ ID NO: 181 - protein, 243 aa, Arabidopsis thaliana
  Clone ID: AT_F24K9.C1.p25.tg
MSVNHYHNTLSLHHHHQNDVAIAQRESLFEKSLTPSDVGKLNRLVIPKQHAEKYFPLNNNNNNGGSGDDVATTEKGMLLSFEDESGKCWKFRYSYWNSSQSYVLTKGWSRLFIGWRRRGEASSSPAVSVVSQEALVNTTAYWSGLTTPYRQVHASTTYPNIHQEYSHYGAVVDHAQSIPPVVAGSSRTVRLFGVNLECHGDAVEPPPRPDVYNDQHIYYYSTPHPMNISFAGEALEQVGDGRG

SEQ ID NO: 182 - protein, 691 aa, Arabidopsis thaliana
  Clone ID: AT_F15N18.C1.p60.tg
MEESVASEGLEFKWGKKKGVGGKKKDVQFYESFTYDGDEYRLYDCVLVGNASEPDSTEPFIGMIIKIWEHANKHIPKKVKLLWFFKPSEIAPYLEGVPNVLANEVFLASGEGLGLANTNQLEAIGGKCSVLCISKDKRNPQPSDEKFNSADFVFCRAFDVGSCKVVDTIDDKIAGVDVKFIFNRACSEKEATAVQNIEADVNGKSDSLKPNGPLARGASGSVRKIEDSAFESSDCKENSNGCKEEKEKGHYQLAIKKSTLAEERSNKDSGSRGNHYNGKDQESEVKKQLTKQKSMPGEERYSNSFEASGSRTIHSISKKAQENDVKKQLTKQKSMPAGERYSQESSGLDDRPLKKQKLDGSVTVRDGWDTTILQNITSDGKKDTGSFKRPRDKVTIEEVPPEKRSFVKNRDLVVSVSEGKTTKTVTEKGISKKPSFGRAEDKMSADDNERNYQVTEVCRRPDARVVKSLDARMWFCKNTILKGAVLFYSPSHCMLYSCSDVLSFFSSYYVTTMLGNIEPWEESMREAEKKGTVVLLQNLDPTYTSDEVEDIVYSALNQQCEARMIERTSVTIPHIGEALVIFKTREVAERVIRRLDEGCLLLSSGRPLVASFAKITPPGKPSLFSGHIKLHKTQTRREMRDAVATSHSSQPNNLEFDMAMEWCLHQARHEQASESVSKVIRLSRRLLPLFY

SEQ ID NO: 183 - protein, 704 aa, Arabidopsis thaliana
  Clone ID: AT_F24J5.C1.p6.tg
MAWSSETPSYCGWNERHVKNTKEKMEVHYYLERKDGIADLAVIGRLKNSKRMSFRYALKKNRSVLKKLNSKDDVALWLDSIVSGEIPHVADVPATVMTEKDAGGFNMSTFMNRKFQEPIQQIKTFSWMGFSWTCRKRRKHYQSYLRNGVRISVNDFVYVLAEQHKRLVAYIEDLYEDSKGKKMVVVRWFHKTEEVGSVLSDDDNDREIFFSLNRQDISIECIDYLATVLSPQHYEKFLKVPMHVQTVAFFCQKLYGDDGLKPYDITQLEGYWRQEMLRYLNVSILKSFEGAQAPGTDPGLKAPLVGCVGIRSRKRRRPSPVGTLNVSYAGDMKGDCKSSPDSVLAVTDASIFKGDEDGSSHHIKKGSLIEVLSEDSGIRGCWFKALVLKKHKDKVKVQYQDIQDADDESKKLEEWILTSRVAAGDHLGDLRIKGRKVVRPMLKPSKENDVCVIGVGMPVDVWWCDGWWEGIVVQEVSEEKFEVYLPGEKKMSAFHRNDLRQSREWLDDEWLNIRSRSDIVSSVLSLTKKKEMEVKHDEKSSDVGVCNGRMSPKTEAKRTISLPVATTKKSLPKRPIPDLLKDVLVTSDLKWKKSSRKRNRVVSCCPHDPSLNDGFSSERSLDCENCKFMEDTFGSSDGQHLTGTYYPDGHLLNAILGFKITGNSQAFLGWIIGLARNGIQIRLCTYVVTVGHSALIQSAKFWMQ

SEQ ID NO: 184 - protein, 813 aa, Arabidopsis thaliana
  Clone ID: AT_T1P17.C1.p210.tg
MASTPRAKTFKSPTKTPSNIYRKSYLSPSSTSHTPQTPETHTPLRRSARHVSRKIDLGNDPIDAPGNDPIEGMNLIRKRERAPRKPTTDVVPSKSKKTETPKKKKKIDSFTPVSPIRSETIKKTKKKKRVYYNKVEFDETEFEIGDDVYVKRREDSNSDEEEDPEIEDCQICFKSDTNIMIECDDCLGGFHLKCLKPPLKEVPEGDWICQFCEVKKSGQSQTLDLPKPPEGKKLARTMREKLLSGDLWAARIDKLWKEVDDGVYWIRARWYMIPEETVSGRQPHNLKRELYLTNDFADIEMECILRHCSVKCPKEFSKASNDGDDVFLCEYEYDVHWRSFKRLAELADGDSDSDQEWNGRKEEEVDDSDEEMELDDEVLKSKRGGLTSARGGANSRKGRFFGVEKVGMKLIPEHVRCHKQSELEKAKATLLLATRPKSLPCRSKEMEEITSFIKGSISDDQCLGRCMYIHGVPGTGKTISVLSVMKNLKAEVEEGSVSPYCFVEINGLKLASPENIYSVIYEALSGHRVGWKKALQCLNERFAEGKRIGKEDEKPCILLIDELDLLVTRNQSVLYNILDWPTKPNSKLVVLGIANTMDLPEKLLPRISSRMGIQRLCFGPYNHTQLQEIISTRLNGIDAFEKTAIEFASRKVAAISGDARRALEICRRAAEVADHRLNTNKSAKNQLVIMADVEAAIQEMFQAPHIQVMKSVSKLSKIFLTAMVHELYKTGMAETTFDRVATTVSSICLTNGEAFPGWDILLKIGCDLGECRIILCEPGEKHRLQKLQLNFPSDDVAFALKDNKDLPWLANYL

SEQ ID NO: 185 - protein, 1404 aa, Arabidopsis thaliana
  Clone ID: AT_T6G15.C1.p160.tg
MKTKAGKQKKRSVDSDDDVSRERRPKRATSGTNFKEKSLRFSEKYETVEAKKEQIVGDDEKEEKGVRFQSFGRVENWTISGYEDGSPVIWISTVIADYDCRKPSKKYKKLYDYFFEKACACVEVCKNLSTNPDTSLKELLAAVVRSMNGRKIFSSGGVIQEFVISQGEFIYNQLAGLDETSKNHETKFVDNRVLVSLRDESRKIHKAFSNVALRIDESKVLTSDQLMDGGEDEDLKYAKLLQEEEHMKSMDRSRNKRSSTTSAPNKFYIKINEDEIAHDYPLPSYYKNTKDETDELVLFNAGYAVDARNLPCRTLHNWALYNSDLMLISLEFLPMKPCADIDVTYLGQIKEWKIDFGEDMIFVLLRTDMAWYRLGKPSEQYAPWFEPILKTVRIGTSILALLKNETRMAKLSYTDVIKRLCGLEENDQAYISSTFFDVERYVIVHGQIILQFLTECPDEYIKRCPFVTGLASKMQDRHHTKWIIKKKRKMLQKGENLNLRRGKAPKVSKMKAMQATTTRLINRIWGEFYSIYSPEDPLEEIGAEEEFEEVEDVEEEDENEEEDTIQKAIEVQKADTLKKIRGSCKEMEIRWEGEILGETCAGEPLYGQALVGGRKMDVGGAVILEVDDQGETPLIYFVEYMFESSDNSKKLHGKLLQRGSETVLGTAANERELFLTNECLTVQLKDIKGTVSFEIRSRPWGHQYKKEHMAADKLDRARAEERKAKDLPIEYYCKSLYSPEKGGFFSLPRSDMGLGSGFCSSCKIRENEEERSKTKLNDSKTRFLSNGIKYSVGDFVYQIPNYLSKDRGKRRPVFKYGRNVGLRAFVVCQILDIVDLKEPKKGNTTSFEVKVRRFYRPDDVSAEEAYASDIQEVYYSEDTYILPPEAIKGKCEVMKKTDMPLCREYPILDHVYFCDRFYDSSNGCLKKLPYNMMLKFSTIKDDTLLREKKTETGSAMLLKPDEVPKGKRLATLDIFAGCGGLSYGLEKAGVSDTKWAIEYEEPAAQAFKQNHPKTTVFVDNCNVILRISWLRLLINDRAIMEKCGDVDDCISTTEAAELATKLDENQKSTLPLPGQVDFISGGPPCQGFSRLNRFSDGSWSKNQCQMILAFLSFADYFRPKYFLLENVKTFVSFNEGHTFHLTVASLLEMGYQVRFGLLEAGAYGISQPRKRAFIWAAAPNEVLPEWPEPMHVFNNPGFKIPLSQGLHYAAVQSTKFGAPFRSITVRDAIGDLPPIESGESKINKEEMRGSMTVLTDHICKKMNELNLIRCKKIPKTPGADWRDLPDEHVNLSNGIVKNIVPNLLNKAKDHNGYKGLYGRLDWHGNLPTCITNLQPMGLVGMCFHPDQDRIISVRECARSQGFPDSYKFSGNIKDKHRQVGNAVPPPLAFALGRKLKEALHLRNI

SEQ ID NO: 186 - protein, 380 aa, Arabidopsis thaliana
  Clone ID: AT_F13D4.C1.p80.tg
MLTEKMNEASQDEDNVALSNTKETEKKQRKRKKDCEEKNKKKRKKDCEEKHETKEMELAWKPEDCAKPLGEVSKVTGKGKKKKSHFKTFTFRGNQYALEDSVQLVPDDPNSKPYCAIIKDIYIPNKEKYVKLAVHWFYRPEDVDKKHVGKWESKDSRNLFYSFHRDEVFAESVKHKCVVNFVPENKQIPNRREHPCFIVQNVYDFVKKKVRKFTDKNFDVHQKNEIDRLVAKTSLRLGDLPDIEKDQVTKTSKGKRTVQRKSPKTSTVYKSILEDFDLLTGDSDRDKRLGELLEAVKHECRTSKKKGARDDDSYWPDDVVPVVRALEHVFYDSMAEDMSKYHHKLEILVDELKVSLIPFTHPSYIFIFVLHVLDFYLFFC

SEQ ID NO: 187 - protein, 156 aa, Arabidopsis thaliana
  Clone ID: AT_T27D20.C1.p8.tg
MAKTRPGVAFSSKIKLGKKDIKILGREILLGNVIVEVGFFTVGDCVLMRPSDAGKAPYVARVEKIEADARNNVKVHCRWYYCPEESHGGRRQLHGAKELFLSDHFDVQSAHTIEGKCIVHTFKNYTRLENVGVEDYYCIFDYKAATGAFTPDRVAV

SEQ ID NO: 188 - protein, 581 aa, Arabidopsis thaliana
  Clone ID: AT_MDF20.C1.p4.tg
MLSLRSLCAFMVLRIQFILASNGGREGKLWIGSLQCCLSRVHKETGRVRLPINLIIHSWEIMWSGAPWMCGKQLKHYPSFCRNGTTIGVQSFVFVLSKGEDRYVAYLEDMYEDKRGLKKVKVRWFHYTKEVKGAVALKNPNPKEVFITPHSQVISAECVDGPATVLTREHYEECVASFPNSLLARVHMCYRQLRNSKVKPFDLSKLRGYLDQPIMSCLSSMEAGPVDCAMNIEEDEEWSEGENVMVGAERSMKKRARIMSDHLLTTYESSCKRLKLNASGKRFPSPTNVQKHPCYNGVVKTDAKIEFLCQDSGIRGCWFRCTVLDVSRKQVKLQYDDIEDEDGYGNLEEWVPAFKSAMPDKLGIRLSNRPTIRPAPRDVKTAYFDLTIGEAVDAWWNDGWWEGVVIATGKPDTEDLKIYIPGENLCLTVLRKDIRISRDWVGDSWVDIDPKPEILAIVSSDSSSESKLSMLSTLSKDTKAKPSAMPNIVEEAEPEGEKAYNSLLGEQNKEHKDVVVKEDDENKLSKEEDKEVGSNETKTYVNHENTVEDHKEDDVTLNDEKARKSESVFTLSKTTTTLVTT

SEQ ID NO: 189 - protein, 380 aa, Arabidopsis thaliana
  Clone ID: AT_T15B3.C1.p130.tg
MSIQQSNEVVVIDNVPLSTLSTKETTTKKRRVEESKEMQVKKKAKFEQRPSDCAKSIGKPIKFTGKGQNKKCHYETFEFHGKQYRLKDFVLLYPEDNKQKEYIAIIKDIYSQEKDGLVKMEVQWFYRREDIEEKHFGKWKTENPREIFFSFHCDEVFAESVKYKCLVYFVPDDKQIPNRIHHSGFIVQMVYDNVRKKVRKFSHEGFEEEQKFEIDMLVAKTVSRIGNLVDVEKVQTTTIPRRKRIVRKCERMSSNPISEKLESLPSSALDRDKTLLELLEVVLKNMCCESTGTSRKDVVQMVLALEEALYDSFADDVPKYNYKLELLVERLKNSRVLATRLLNGELKPEQAIKMADFEEPKLVEDVASTSENVGHKDCLD

SEQ ID NO: 190 - protein, 1512 aa, Arabidopsis thaliana
  Clone ID: AT_F23J3.C1.p20.tg
METKVGKQKKRSVDSNDDVSKERRPKRAAACRNFKEKPLRISDKSETVEAKKEQNVVEEIVAIQLTSSLESNDDPRPNRRLTDFVLHNSDGVPQPVEMLELGDIFLEGVVLPLGDDKNEEKGVRFQSFGRVENWNISGYEDGSPGIWISTALADYDCRKPASKYKKIYDYFFEKACACVEVFKSLSKNPDTSLDELLAAVARSMSGSKIFSSGGAIQEFVISQGEFIYNQLAGLDETAKNHETCFVENSVLVSLRDHESSKIHKALSNVALRIDESQLVKSDHLVDGAEAEDVRYAKLIQEEEYRISMERSRNKRSSTTSASNKFYIKINEHEIANDYPLPSYYKNTKEETDELLLFEPGYEVDTRDLPCRTLHNWALYNSDSRMISLEVLPMRPCAEIDVTVFGSGVVAEDDGSGFCLDDSESSTSTQSNVHDGMNIFLSQIKEWMIEFGAEMIFVTLRTDMAWYRLGKPSKQYAPWFETVMKTVRVAISIFNMLMRESRVAKLSYANVIKRLCGLEENDKAYISSKLLDVERYVVVHGQIILQLFEEYPDKDIKRCPFVTGLASKMQDIHHTKWIIKRKKKILQKGKNLNPRAGLAHVVTRMKPMQATTTRLVNRIWGEFYSIYSPEVPSEAIHEVEEEEIEEDEEEDENEEDDIEEEAVEVQKSHTPKKSRGNSEDMEIKWNGEILGETSDGEPLYGRALVGGETVAVGSAVILEVDDPDETPAIYFVEFMFESSDQCKMLHGKLLQRGSETVIGTAANERELFLTNECLTVHLKDIKGTVSLDIRSRPWGHQYRKENLVVDKLDRARAEERKANGLPTEYYCKSLYSPERGGFFSLPRNDIGLGSGFCSSCKIKEEEEERSKTKLNISKTGVFSNGIEYYNGDFVYVLPNYITKDGLKKGTSRRTTLKCGRNVGLKAFVVCQLLDVIVLEESRKASNASFQVKLTRFYRPEDISEEKAYASDIQELYYSHDTYILPPEALQGKCEVRKKNDMPLCREYPILDHIFFCEVFYDSSTGYLKQFPANMKLKFSTIKDETLLREKKGKGVETGTSSGILMKPDEVPKEMRLATLDIFAGCGGLSHGLEKAGVSNTKWAIEYEEPAGHAFKQNHPEATVFVDNCNVILRAIMEKCGDVDDCVSTVEAAELVAKLDENQKSTLPLPGQADFISGGPPCQGFSGMNRFSDGSWSKVQCEMILAFLSFADYFRPKYFLLENVKKFVTYNKGRTFQLTMASLLEIGYQVRFGILEAGTYGVSQPRKRVIIWAASPEEVLPEWPEPMHVFDNPGSKISLPRGLHYDTVRNTKFGAPFRSITVRDTIGDLPLVENGESKINKEYRTTPVSWFQKKIRGNMSVLTDHICKGLNELNLIRCKKIPKRPGADWRDLPDENVTLSNGLVEKLRPLALSKTAKNHNEWKGLYGRLDWQGNLPISITDPQPMGKVGMCFHPEQDRIITVRECARSQGFPDSYEFSGTTKHKHRQIGNAVPPPLAFALGRKLKEALYLKSSLQHQS

SEQ ID NO: 191 - protein, 652 aa, Arabidopsis thaliana
  Clone ID: AT_F25E4.C1.p180.tg
MVLSRRFAQVSSDEEDDVPITRSKGRNSASPEESLGKRRKRKTVKLYEDFEEKEADRKKKRKGNKEDEDMAEGDDDQAEEETNPEAEEEEDEEEEEKPDDACPVGDSVNVTGKGKGKRTHFNQFAYDGNTYDLGFLVVDLELRFGLRFFFTIESALLAAITLLWILKSRKLLSITGLIRSWLLSFVEHPLLCQRNVSLSLMLFRFLVLTAPCLETSEEVPVLLVPEDKSQKPYVAIIKVLDITQTKDGSMMILGQWFYRPEEAEKRGGGNWQSSDTRELFYSFHRDEVPAESVMHRCVVYFVPAHKQLPKRKNNPGFIVRKVYDTVEKKLWKLTDKDYEDSKQREIDVLVKKTMNVLGDLPDLESEDMLVDQENVLKAKRSFRKVNISPVDVRREEDASLKAETPGSGAGISSEHYAILEKFDSLTGDAHRDKCLGKLLEAVQHICYIPENKQAGDEAKDEKFLWPDAAVPQVCALENASHASLASDFQKYNQKMRTLVFNLKNTALLARRLLNGELEPATILNMSPTELKEGLTADETTKKEPDDADRMQMTSVRCSRCSQLTVGLRDIIQAGHGDRYQLECVDCGYSWYASRDEVSTLTIVTDKPAQGTEKEDIEKNLTSPRETNKPKDEALKTNDSNADNNPEASKKPE

SEQ ID NO: 192 - protein, 258 aa, Arabidopsis thaliana
  Clone ID: AT_F19H22.C1.p200.tg
MPKQKAPRKQLKSYKLKHINKSIQEGDAVLMRSSEPGKPSYVARVEAIETDARGSHAKVRVRWYYRPEESIGGRRQFHGAKEVFLSDHFDFQSADTIEGKCKVHSFSSYTKLDSVGNDDFFCRFEYNSTTGAFDPDRVTVFCKCEMPYNPDDLMVQCEECSEWFHPSCIGTTIEEAKKPDNFYCEECSPQQQNLHNSNSTSNNRDAKVFLYFSFQKISLVFEGWSNPLQIGLNKFKVFKLTVRSTYKASLANNCKLLD

SEQ ID NO: 193 - protein, 201 aa, Arabidopsis thaliana
  Clone ID: AT_F1N20.C1.p240.tg
GDCVLMRPSDAGKPPYVARVEKIEADARNNVKVHCRWYYRPEESLGGRRQFHGAKELFLSDHFDVQSAHTIEGKCIVHTFKNYTRLENVGAEDYYCRFEYKAATGAFTPDRVAVYCKCEMPYNPDDLMVQCEGCKDWYHPACVGMTIEEAKKLDHFVCAECSSDDDVKKSQNGFTSSPADDVKVRLSLFSHLLYRCSITYL

SEQ ID NO: 194 - protein, 793 aa, Arabidopsis thaliana
  Clone ID: AT_F23A5.C1.p8.tg
MAARNKQKKRAEPESDLCFAGKPMSVVESTIRWPHRYQSKKTKLQAPTKKPANKGGKKEDEEIIKQAKCHFDKALVDGVLINLNDDVYVTGLPGKLKFIAKVIELFEADDGVPYCRFRWYYRPEDTLIERFSHLVQPKRVFLSNDENDNPLTCIWSKVNIAKVPLPKITSRIEQRVIPPCDYYYDMKYEVPYLNFTSADDGSDASSSLSSDSALNCFENLHKDEKFLLDLYSGCGAMSTGFCMGASISGVKLITKWSVDINKFACDSLKLNHPETEVRNEAAEDFLALLKEWKRLCEKFSLVSSTEPVESISELEDEEVEENDDIDEASTGAELEPGEFEVEKFLGIMFGDPQGTGEKTLQLMVRWKGYNSSYDTWEPYSGLGNCKEKLKEYVIDGFKSHLLPLPGTVYTVCGGPPCQGISGYNRYRNNEAPLEDQKNQQLLVFLDIIDFLKPNYVLMENVVDLLRFSKGFLARHAVASFVAMNYQTRLGMMAAGSYGLPQLRNRVFLWAAQPSEKLPPYPLPTHEVAKKFNTPKEFKASDLQVGRIQMEFLKLDNALTLADAISDLPPVTNYVANDVMDYNDAAPKTEFENFISLKRSETLLPAFGGDPTRRLFDHQPLVLGDDDLERVSYIPKQKGANYRDMPGVLVHNNKAEINPRFRAKLKSGKNVVPAYAISFIKGKSKKPFGRLWGDEIVNTVVTRAEPHNQCVIHPMQNRVLSVRENARLQGFPDCYKLCGTIKEKYIQVGNAVAVPVGVALGYAFGMASQGLTDDEPVIKLPFKYPECMQAKDQI

SEQ ID NO: 195 - protein, 1171 aa, Arabidopsis thaliana
  Clone ID: AT_F13C5.C1.p190.tg
MLSPAKCESEEAQAPLDLHSSSRSEPECLSLVLWCPNPEEAAPSSTRELIKLPDNGEMSLRRSTTLNCNSPEENGGEGRVSQRKSSRGKSQPLLMLTNGCQLRRSPRFRALHANFDNVCSVPVTKGGVSQRKFSRGKSQPLLTLTNGCQLRRSPRFRAVDGNFDSVCSVPVTGKFGSRKRKSNSALDKKESSDSEGLTFKDIAVIAKSLEMEIISECQYKNNVAEGRSRLQDPAKRKVDSDTLLYSSINSSKQSLGSNKRMRRSQRFMKGTENEGEENLGKSKGKGMSLASCSFRRSTRLSGTVETGNTETLNRRKDCGPALCGAEQVRGTERLVQISKKDHCCEAMKKCEGDGLVSSKQELLVFPSGCIKKTVNGCRDRTLGKPRSSGLNTDDIHTSSLKISKNDTSNGLTMTTALVEQDAMESLLQGKTSACGAADKGKTREMHVNSTVIYLSDSDEPSSIEYLNGDNLTQVESGSALSSGGNEGIVSLDLNNPTKSTKRKGKRVTRTAVQEQNKRSICFFIGEPLSCEEAQERWRWRYELKMEKATSEFSGFTEQRIQCVYKFFSFIMERQATNHDKRRLFYSTVMNDNPVDCLISKVTVLQVSPRVGLKPNSIKSDYYFDMEYCVEYSTFQTLRNRKCSSKTSENKLECCADVVPTESTESILKKKSFSGELPVLDLYSGCGGMSTGLSLGAKISGVDVVTKWAVDQNTAACKSLKLNHPNTQVRNDAAGDFLQLLKEWDKLCKRYVFNNDQRTDTLRSVNSTKETSGSSSSSDDDSDSEEYEVEKLVDICFGDHDKTGKNGLKFKVHWKGYRSDEDTWELAEELRYMLQNNVKKRFCCYLELINFVWNFSNCQDAIREFVTSGFKSKILPLPGRVGVICGGPPCQGISGYNRHRNVDSPLNDERNQQIIVFMDIVEYLKPSYVLMENVVDILRMDKGSLGRYALSRLVNMRYQARLGIMTAGCYGLSQFRSRVFMWGAVPNKNLPPFPLPTHDVIVRYGLPLEFERNVVAYAEGQPRKLEKALVLKDAISDLPHVCFISTRSICNSGPFARLWWDETVPTVLTVPTCHSQVPSKPFQALLHPEQDRVLTIRESARLQGFPDYFQFCGTIKERYCQIGNAVAVSVSRALGYSLGMAFRGLARDEHLIKLPQNFSHSTYPQLQETIPH

SEQ ID NO: 196 - protein, 839 aa, Arabidopsis thaliana
  Clone ID: AT_T6C23.C1.p3.tg
MAPKRKRPATKDDTTKSIPKPKKRAPKRAKTVKEEPVTVVEEGEKHVARFLDEPIPESEAKSTWPDRYKPIEVQPPKASSRKKTKDDEKVEIIRARCHYRRAIVDERQIYELNDDAYVQSGEGKDPFICKIIEMFEGANGKLYFTARWFYRPSDTVMKEFEILIKKKRVFFSEIQDTNELGLLEKKLNILMIPLNENTKETIPATENCDFFCDMNYFLPYDTFEAIQQETMMAISESSTISSDTDIREGAAAISEIGECSQETEGHKKATLLDLYSGCGAMSTGLCMGAQLSGLNLVTKWAVDMNAHACKSLQHNHPETNVRNMTAEDFLFLLKEWEKLCIHFSLRNSPNSEEYANLHGLNNVEDNEDVSEESENEDDGEVFTVDKIVGISFGVPKKLLKRGLYLKVRWLNYDDSHDTWEPIEGLSNCRGKIEEFVKLGYKSGILPLPGGVDVVCGGPPCQGISGHNRFRNLLDPLEDQKNKQLLVYMNIVEYLKPKFVLMENVVDMLKMAKGYLARFAVGRLLQMNYQVRNGMMAAGAYGLAQFRLRFFLWGALPSEIIPQFPLPTHDLVHRGNIVKEFQGNIVAYDEGHTVKLADKLLLKDVISDLPAVANSEKRDEITYDKDPTTPFQKFIRLRKDEASGSQSKSKSKKHVLYDHHPLNLNINDYERVCQVPKRKGANFRDFPGVIVGPGNVVKLEEGKERVKLESGKTLVPDYALTYVDGKSCKPFGRLWWDEIVPTVVTRAEPHNQVIIHPEQNRVLSIRENARLQGFPDDYKLFGPPKQKYIQVGNAVAVPVAKALGYALGTAFQGLAVGKDPLLTLPEGFAFMKPTLPSELA

SEQ ID NO: 197 - protein, 1611 aa, Arabidopsis thaliana
  Clone ID: AT_T17F15.C1.p70.tg
MHGRVCERRHKSRRRHMLISSSRVIATVEGGGSSCLSLSSSTSFSKDGRKISVGDCALFKPPQDCPPFIGIIRLIIAEEEDKLKLGVNWLYRPTELKLGKGILLEAEPNELFYSFHEDNIPAASLLHPCKVAFLPRGVELPSGISSFVCRRVYDVTNERLWWLTDQDYIDDRQLEVDKLLCKTRSEMHTTLQQGGRSPKSMNSPTTSQPKDGIQNNNSLFSQSKGRKRERMDHGSESVKRERSSRVDDSGSGPLRTESGLTSEILKFTEKGGLVDSEGVEKLVQLMLPERNEKKIDLVGRAILAGFVAATNRFDCLSRFVQLRGLPVFDEWLQEVHKGKVGDGGSPKDSDRLVDDFLLVLLRALDKLPVNLNALQTCNIGKSVNHLRSHKNSEIGKKARSLVDTWKKRVEAEMDAKSGSNQGVSWPGRLSHGGRHSGGSAEANKTSSSHLHASKSVSVKQQVENNLKCVATSPGSTRSAPSPGSGGNVSKDGQQRNAGAGGVSEVLAAVKDEKSSSSSQSHNNSQSCSSEHAKTGNLCGKEDARSSTAGSTLKKCSGGSSRHRKSNNVFQGSSSSASPRGAGLSRSFSSHRNVPSEKISQSSLTSEKTLEVPLTEGSGNKLIVKLPRGRSPAQSVSGGSLEDPAPVNSRVSSPVHTVKQELCDNNWREKNHSYRADVSSVLNAESWQSNELKDILTGSQEATGSPLVVAGDEREGALKDSDKASGNVKATSSLGNEFKSGERHGGTLSSMNALIESCVRYSETNASLAGSDDVGMNLLASVAADEMSKSPVASPSVSQPPNSLMNENSTVGNNTKLMASDGLPHKQHQAVRPTLSNEQGEQHVSSSGTQLESEIKNESKTGDRVKSSNSDTEDLQRFVDQRLESNENSDGVVASPPLPTKVIKENILDDSDSGEVKDIKTDVKSEADCTSDLTKRVASSMLTECRDVSKMVDSVAVEHTPLEGVDDDKKEEKPPTALSSELVKKVEEDVPVSSGISRGMDAVSIDRPITEMVNNIAFNHMDQKDIKKIKQDFDTSVGAVKDASAGLDSSVTKGKVEPVEGNLENIEIMERYSGLRATPGLSPKEAEDLKRPNAPKTSDADGDEAGECTSAARDASSVSAAASASAGSEMDARVEFDLNEGFDGDDAQHGDSNNFSGSVVLTPTPLQPVNTLPFPVAPVSSGIPASITVAAAVKGPFVPPEDLLRYKGAVGWRGSAATSAFRPAEPRKAQDVLLSINNTSTSDASTSAGKQTRTFLDFDLNVPDERVLEDLASQRSGNPTNCTSGITNNFDQVRSGVMGSALDHSSGGLDLNKVDDLTDMNSYTMNSSHRLDSSFQQVKLPSTGGRRDFDLNDGPVGDDAAVEPSMVLNQHSRSGLPSQPSLSGIRVNGENMASFSTWFPAANAYSAVSMPPIMPERGDQPFPMIATRGPQRMLGPTTGVSSFSPEGYRGPVLSSSPAMPFQSTTFQYPVFPFGNSFPVTPANFPGASTAHMDSSSSGRAYFPGVNSQILGPGVPVPSNYPRPYIVGLPNGGSNGGVLDNSAKWFRSGLDLNSGPGGHETEGRDESTLVSRQLSSSASVPSKEDQARMYQMSGGVLKRKEPEGGWDGYRQSL

SEQ ID NO: 198 - protein, 1613 aa, Arabidopsis thaliana
  Clone ID: AT_T17F15.C1.p80.tg
MHGRVCERRHKSRRRHMLISSSRVIATVEGGGSSCLSLSSSTSFSKDGRKISVGDCALFKPPQDCPPFIGIIRLIIAEEEDKLKLGVNWLYRPTELKLGKGILLEAEPNELFYSFHEDNIPAASLLHPCKVAFLPRGVELPSGISSFVCRRVYDVTNERLWWLTDQDYIDDRQLEVDKLLCKTRSEMHTTLQQGGRSPKSMNSPTTSQPKDGIQNSNSFLSQGKGRKRERMDHGSESVKRERSSRVDDSGSGPLRTESGLKSEILKFTEKGGLVDSEGVEKLVQLMLPERNEKKIDLVGRAILAGFVAATDKFDCLSRFVQLRGLPVFDEWLQEVHKGKVGDGGSPKDSDRLVDDFLLVLLRALDKLPVNLNALQTCNIGKSVNHLRSHKNSEIGKKARSLVDTWKKRVEAEMDAKSGSNQGVSWPGRLSHGGRHSGGSAEANKTSSSHLHASKSVSVKQQVENNLKCVATSPGSTRSAPSPGSGGNVSKDGQQRNAGAGGVSEVLAAVKDEKSSSSSQSHNNSQSCSSEHAKTGNLCGKEDARSSTAGSTLKKCSGGSSRHRKSNNVFQGSSSSASPRGAGLSRSFSSHRNVPSEKISQSSLTSEKTLEVPLTEGSGNKLIVKLPNRGRSPAQSVSGGSLEDPAPVNSRVSSPVHAVKQELCDNNGREKNHSYRPNVSSVLNAESWQSNELKDILTGSQEAAGSPLVAGDERGGDLKDSDKASGNVKGTSSLGNEFKSGERHGGTLSSMNALIESCVRYSETNASLAGSDDVGMNLLASVAADEMSKSPVASPSVSQPPNSVMNENSTVGNNTKLMASDGLPHEQHQAVCTSVSTEQGEQHVSSSGTQLESEIKNESKTGDRDKSSNSDTEDLQRLVDQCLESNDNSDGVVASPALPTKAVKEKILNDSDSGELKDIKTDVKSEADCTSDSTKRVASSMLTECRDVSKKVDSVAVEQTPLEGVDDDKKEEKPPTALSSELVKKVEEDVPVSSGISRDMDAVSIGRPITEMVNNVAFNHMDQKDVKKIKQDCDTSVGAIKDTSAGLDSSVTKGKVEPVEGNLENSEVKERYSGLRATPGLSPKEAEDLERPNGPKTSDADGDEAGECTSAARDASSVSAAASAGSEMDARVEFDLNEGFDGDDAKHGDSNNFSGSVFLTPTPLQPVKTLPFPVAPVSSGTRASITVAAAAKGPFVPPEDLLRNKGAVGWRGSAATSAFRPAEPRKPQDVLLSINNTSTSDASTSAGKQTRTFLDFDLNVPDERVLEDLASQRSGNPTNCTSDITNSFDQVRSGVMGSALDHSSGGLDLDLNKVDDSTDMISYTMNSSHRLDSSFQQVKLPSTGGRRDFDLNDGPVGDDAAVEPSMVLNQHSRSGLPSQPSLSGIRVNGENMASFSTWFPAANAYSAVSMPPIMPERGDQPFPMIATRGPQRMLGPTTGVSSFTPEGYRGPVLSSSPAMPFQSTTFQYPVFPFGNSFPVTSANFPGASTAHMDSSSSGRACFPGVNSQILGPGVPVPSNYPRPYIVGLPNGGSNGGVLDNGAKWFRSGLDLNSGPGGHETEGRDESTLVARQLSSSASLPLKEDQARMYQMSGGVLKRKEPEGGWDGYRQSSWQ

SEQ ID NO: 199 - protein, 360 aa, Arabidopsis thaliana
  Clone ID: AT_F21P8.C1.p10.tg
MEQRKRKKESEEMLLNKKAKLEWRPEDYAQAIGLSHKCTGKGEKKKCHYKTFQFHANKYGLEDSVLLVPEDGEKPYVAIIKDIYTQRKEGHVKLEVQWLYRPEEVEKKYVGNWKSKGSRDLFYSFHRDEVFAESVKDDCIVHFVQENKQIPNRRKHPGFIVQHVYDNVKKKLRKLTFNGFDLQQKREIDHFVEKTILRIGHLRDIVKEQKTLISRSKRTVPQSYIIKAVETSRESNNVVNSILESFDLLTGDSDRDKSLEELLEVVKPKCRTSRKKQAGDYDSFWPNDVVSVVSALEQALYDSLKDDIAKYSNKVEILVGKLKRGFTFDELKVDLEEPILKDDASSSISKSVGRKDSFEE

SEQ ID NO: 200 - protein, 640 aa, Arabidopsis thaliana
  Clone ID: AT_MAC12.C1.p23.tg
MVVKRKLNCGGSNGFDFPNIPKAPRSSRRKVSGKRSDDESEICAIDLLASLAGKLLEESESSSTSTYASEADNLDHLGGLIKQELEDGYTTKPCKSEFFDPGNPASKSTSENTSVTCLPFSSFENDCILEQTPVSDCKRASGLKSLVGSITEETCVVNEDAGSEQGANTFSLKDPSQLHSQSPESVLLDGDVKLAPCTDQVPNDSFKGYRNHSKLVCRDDDENYCKYYKFSDKCKSYRPLSRVGNRRIMQSVRAISKLKCFEDTRTDGRLKALYRKRKLCYGYNPWKRETIHRKRRLSDKGLVVNYDGGLSSESVSNSPEKGESENGDFSAAKIGLLSKDSRVKFSIKSLRIPELVIEVPETATVGLLKRTVKEAVTALLGGGIRIGVLVQGKKVRDDNNTLSQTGLSCRENLGNLGFTLEPGLETLPVPLCSETPVLSLPTDSTKLSERSAASPALETGIPLPPQDEDYLINLGNSVENNDELVPHLSDIPADEQPSSDSRALVPVLALESDALALVPVNEKPKRTELSQRRTRRPFSVTEVEALVSAVEEVGTGRWRDVKLRSFENASHRTYVDLKDKWKTLVHTASISPQQRRGEPVPQELLDRVLGAHRYWTQHQMKQNGKHQVATTMVVEAGSSM

SEQ ID NO: 201 - protein, 622 aa, Arabidopsis thaliana
  Clone ID: AT_F28P22.C1.p16.tg
MGTVVGTVEDRRDMFEGNAQTRITPFSSTNQIGNPVAYKLVRVSGDGSLVPATDEEILEVNDTDMHIPSDTCQTIGYLATDEENVEVDETDMHIASDACQTIGYLPAEGIPSRLSQIESSEAINSGLLHSDNVQPYTDQVKSRSEYNEEMLQKVEQEERLENVHGSQMPSTPADANIQCSNENNFFEEDQVHHEALLQDECKMNESDMMERCSNAVASPKETALSAAAQKPDFSRVRGEICLDNLPIKALQETFRATFGRDTTVKDKTWLKRRIAMGLINSCDVPTTNLRVKDNKLIGNQEKSNDVTNAIRKEMGDDVRATKMKDAPSSTDHVNGHSNGGNHYYASEDYSSEQRAAKRVRKPTRRYIEELSETDDKQQNDKSVIPSKDQRLSEKSEVRSISVSSGKRVTVTRMVSLAGSEIEVPYVSHVRRSRPRENIMALLGCHSSYLEDKASAAESNLNLSPSQLSSEVVNRDSVEKYDTVSHCFIGLRMQFATSDENNVEHILSEVDQEMEPEHIDSSGNSSDENNIGVPIMQGGALRRKHHRAWTLSEIAKLVEGVSKYGAGKWSEIKKHLFSSHSYRTSVDLKDKWRNLLKTSFAQSPSNSVVPPSLSLSLSLSLSL

SEQ ID NO: 202 - protein, 697 aa, Arabidopsis thaliana
  Clone ID: AT_F1L3.C1.p21.tg
MEGDVLSGFGDRHNMDGKLLQSFQKSFVDVQDILDQNRLLINEINQNHESKQPDNLGRNVGLIKELNNNIRRVASLYGDLSHSFARSVDASSEGESSGTLKSDGKANQKRFRSGDGSLVPATDEEMLEVKNLLEKNEQDMPVLPDPIQTEEYIPDEGSPSQFLQLENFEGKTYCIHAKTDRISLGLHDKGIYWVTCNVGAINFTPPLKLLQSKEELMNGSQMLFVLPDTKFQISTELSGNVELVPSKVLLQEPILFSSNGCSINQSTDVLNATASPKEPALSTAASKPDFSRVPGEISLANLSIKELQETFRATFGRETTSKDKRWLKRRIKMGLINSCVVPTTTLTINDSKLIGGDQDAIDAFSKGTVDEETATESIDTPASPDGIKGHSNDFGHSPVETFVDHYSGNEDFEGEDGSAKRVRKPTRRYIEETNEKQQIDGSMIPSKDPSSIQAVSSEGRVVVTRMVSLAGSRIQVPYVSHVRRSRPRENIMALGEFRSKSWEVKAAPEEGNLNLSPPQLSNDVNRVPGVKSASRCVQKESDKDHLKPIFTDVDQEMMEPELLDSSGDSSDDNFVDAPITQSASGRKLHRAWTISEVEKLVEGVSKYGVGKWTEIKKLSFSPYTHRTTVDLKDKWRNLQKASSSNRMEGGLKKHGSMAIPTHIMLQVRELAQKQSPISRVVSKARVVKRSRSRNGFL

SEQ ID NO: 203 - protein, 619 aa, Arabidopsis thaliana
  Clone ID: AT_T2E22.C1.p112.tg
MVFKRKLDCLSVGFDFPNIPRAPRSCRRKVLNKRIDHDDDNTQICAIDLLALAGKILQESESSSASSNAFEEIKQEKVENCKTIKSESSDQGNSVSKPTYDISTEKCVVNSCFSFPDSDGVLERTPMSDYKKIHGLMDVGCENKNVNNGFEQGEATDRVGDGGLVTDTCNLEDATALGLQFPKSVCVGGDLKSPSTLDMTPNGSYARHGNHTNLGRKDDDEKFYSYHKLSNKFKSYRSPTIRRIRKSMSSKYWKQVPKDFGYSRADVGVKTLYRKRKSCYGYNAWQREIIYKRRRSPDRSSVVTSDGGLSSGSVSKLPKKGDTVKLSIKSFRIPELFIEVPETATVGSLKRTVMEAVSVLLSGGIRVGVLMHGKKVRDERKTLSQTGISCDENLDNLGFTLEPSPSKVPLPLCSEDPAVPTDPTSLSERSAASPMLDSGIPHADDVIDSRNIVDSNLELVPYQGDISVDEPSSDSKELVPLPELEVKALAIVPLNQKPKRTELAQRRTRRPFSVTEVEALVQAVEELGTGRWRDVKLRAFEDADHRTYVDLKDKWKTLVHTASISPQQRRGEPVPQELLDRVLRAYGYWSQHQGKHQARGASKDPDMNRGGAFESGVSV

SEQ ID NO: 204 - protein, 400 aa, Arabidopsis thaliana
  Clone ID: AT_F5K20.C1.p90.tg
MVDCGVDIYQLPVVPRACRSPRGRRLKIMRKQRSEFEVLAQVAGRFSGERKNRIVIGSLAHETKETKDDNVVVNNFLETMEVEVKPQPGLENLSQVLLSKDWLALGPSMPNSPITQEENFDSRSKIDSKRKVSHLKERGSCISQESQNMYPLKKRKLFYQNHSSESHDTPCTVKFGIKSLNISELLVDVPESATVGSLKLAVLEAVTQILKGGLNIGVLFQGKTIVDDSKTLLQIGIPYDDDDDENLGSLGFMLEPQKSETTTITTFTTVSPRTRLRQNQVLGSVDSTEAVAAKSVVPVRMKPAWQPEMVQRRIRRPFTVSEVEALVQAVERLGTGRWRDVKSHAFNHVNHRTYVDLKDKWKTLVHTAKISARQRRGEPVPQDLLDRVLAAHAFWSDRTG

SEQ ID NO: 205 - protein, 622 aa, Arabidopsis thaliana
  Clone ID: AT_F22G5.C1.p6.tg
MVLQKRPDYGFNGYEVPHTPRAARSPRKSAFKKKSENHQISSFDLLAAVAGKLLLEGGNSSSSSNNTSGNNEDQCAVKKEPLNGGDIMVEEETTNSDHDNNNAERSFFVSEILQKSHEMQSFNRSPSPLKEFHFGSSSGITSDSSEKFETQELAYDESKINNGDCYRSESNDKKSMLGGLNFEAKLSRNVVGKDEKHIGSGFRKPIPQNPSTCSDDVDLHGKENDDGENFSACYRTKSFRSTLRIGDRRIRKVWASKYCKVPPKLKDTTVTNSDLDLKSDYYSKKHCLKSLRSERNYPIKKRRYFDGYTASQSEETNKNEGQSGSPRKAFLSSIACQKQPAAFQSPRDSNNVKLGIKSFRVPELFIEIPETATVGSLKRTVLEAVTSILGGGLRIGVLVHGKKVRDDSKMLLQTGLSLDTLSDTLGFCLEPNPPQSTKPLSPEDSDFARPCNVPHTLTRSVSIQSNSVESDLDSKPSAPNRGKTIYSRALIPVSPLHAQALTVVPPRKTKRSEVAQRRIRRPFSVAEVEALVQAVERLGTGRWRDVKLRAFDNAKHRTYVDLKDKWKTLVHTARISPQQRRGEPVPQELLDRVLTAHAYWSQQQGKHQLLEGPQQLETSLGL

SEQ ID NO: 206 - protein, 578 aa, Arabidopsis thaliana
  Clone ID: AT_f2o15.C1.p90.tg
MVSHKCVEEFGYASYLVPSNARAPRSARKRRSIEKRISKEDDNMCAIDLLATVAGHLSFESGSSLMSIDKLIEDHRVKEEFPEEEKPLMPVALSPYRGSLSPCGFSSVINGKVENEVDGFSYSGGSDACQVGNFSQDVKPDIDGDAVVLDARPNVVVSLGSSSRTEVPSIGNCVSHGVRDDVNLFSRDDDENFSKYIHPRVTKHSPRTVPRIGDRRIRKILASRHWKGGSRHSDTKPWRNYYLHQQRSYPIKKRKNFDHISDSVTDDYRMRTKMHRGSRKGQGASFVASDSHVKLRIKSFRVPELFIEIPETATVGSLKRMVMEAVSTLLSDGHRVGLMVQGKKVRDDNKTLHQTGISQDNSHLDSLDFSLEPSSEMPQLLTSHPLGHACEELLPVCQATKIDNVLESDHHDSALFPSDSLGNNNVTEDSKAMISVALNELSSQSQPPSRKSRRSEQQQQQAAQRRIRRPFSVAEVEALVQAVEKLGTGRWRDVKLCAFEDADHRTYVDLKDKWKTLVHTAKISPQQRRGEPVPQELLNRVLNAHGYWTQQQMQQLQQNVNKLEQETQSQTTEGLLLL

SEQ ID NO: 207 - protein, 553 aa, Arabidopsis thaliana
  Clone ID: AT_F12A12.C1.p110.tg
MVSHKVLEFGDDGYKLPAQARAPRSLRKKRIYEKKIPGDDKMCAIDLLATVAGSLLLESKSPVNACLVVQNTVKNEYPADENPVKAVPYSESPSLFDNGKCGFSSVITNPNHLLVGDKVGKEVEGFSSLGVSGDVKPDVVASIGSNSSTEVGACGNGSPNESRDDVNLFSRNDDDENFSGYIRTRMTRPVPRIGDRRIRKILASRHWKGGSKNNTDAKPWYCSKRSYYLHHHQRSYPIKKRKYFDSVYDSNSDDYRLQGKTHKGSRTISSMKSRNASFVSRDHHVKLRIKSFRVPELFVEIPETATVGSLKRMVMEAVTTILGDGLRVGLMVQGKKVRDDGKTLLQTGISEENNHLDSLGFSLEPSLETTPQPLLSSYLSDHACDDVTLCHDNALDSSHEPEPSPADSFGKLGTSDHSRALIPVASAAMLAPRPPNRKFKRTEQQLAAQRRIRRPFSVTEVEALVQAVEKLGTGRWRDVKVRAFEDADHRTYVDLKDKWKTLVHTARISPQQRRGEPVPQELLDRVLKAHAYWSQHLMHQLQTEPPSTQVEAL

SEQ ID NO: 208 - protein, 1576 aa, Arabidopsis thaliana
  Clone ID: AT_K7J8.C1.p10.tg
MALRKNTPKGDSVSLPMKPLNFSRKLPGNVQIPDPDIVQSVAPNIDLDLREVYFLMLHLLSSGPCQKTYALLRHELLEHELLPRRYHAWYSRSGLPSGDENDDGNSFPLNYTELAKRYSHVKKDHLVELLKQLVFVSNRPNPSRGIGDGNKMIGAGVPTLLGTGSFSLLSSDKEIVGSDLKPPPIGMRWPHMHADQVRGISLREIGGGFARHHRAPSIRAACYVIAKPSSMVQKMQNIKRLRGHRNAVYCAILDRSGRYVITGSDDRLVKVWSMDTAYCLASCRGHEGDITDLAVSSNNIFIASASNDCVIRVWRLPDGLPVSVLRGHTGAVTAIAFSPRPGSSDDGTCRIWDARGAQFAPRIYVPRPPSPDGDCFTFIVKLFCVDLLEAVWSANKTNTDDPEQPNHEMDVLAGHENDVNYVQFSGCAAGSKFSVTDYSKDENVPKFKNSWEKAADGHEHIISRFHLRPCPLNLLEGGHVKGSYLHPTYVMDVHPFNPRIAMSAGYDGKTIVWDIWEGIPIQIYDISHYKLVDGKFSPDGTSIILSDDVGQLYILSTGQGDSQKDAKYDQFFLGDYRPLIQDTYGNVLDQESQLQPYRRNMEDPLCDSGMIPYEEPYQTTFQKRRLGALGKEWRPSSLKLAVGPDITLDRDYQMPPLADLDLAEPLPEFIDVMEWEPEVDILSDENDSEYNVPEEYSSGKEQECLNSSTSGESGSSSGESYEDDDHQNSLRRSKRKKHKKEAGIMTSSGRRVKKRNFDELEGAPSNKKRTRKSRSGRKESKRKSSKSKSSRPRRAAARNALSWFSKITGTSKDAEEEEVSELSDSSESESTTQDSGTGDSELEVALLNGHGKQSKGKTILVCDSDDGAQQCDIRETHTAERRRLVLRFPVRNSDKLTLLENLPGSSCDVPSPTLGNGCTEDSRIPGNQFEGLDVSKVKWGMVKARTTKRIRGEAISSHELMGSDPEGKENNVKEDSNHRGNGVTAPSCLELKTDIDDMAVDTDTVISNGLPNGGKRYPELDGSPSRVADDKASNSSQNVTHRHDLIDSLPPISTTLKIRSKRVSRAPDTSLRQEGKSLSIDQETGGSDALNDGFEDAKCDLTLDCQKDGVVGTEISLRNDCVLELNPQICDALSIANDVPVSHSHPKRMFDFVYRRKSRKHKNNLDRDAALTKEVSPGSCSQDHGSGSKSHEGASNGFHGTELNGLEKSEGSLTHIQDKISDSRGNQNSQEELRSASGATLRLRSTRNRKSTYPFSETKPIETKKPQQLIENVSWLTLSIHEEGSRYIPQMGDEVAYLRQGHQEYLNFSSLREVAPWTSIKGGNIKAVEICKVESLEYATLPGSGDSCCKMILKVIDPNSEVFNKAFKLTLPEVVTFPDFLVERSRYEAAIQRNWTCRDKCKVWWRDEGEEDGSWWEGRILAVKPKSPDFPDSPWERYTVKYKSDPAETHLHSPWELFDADTKWEQPHIDDEQRNRLLSALTKLETSDKRTQDSFGLRKLNQTVGNSSYSNRFPVPLSLEVIRSRLENNYYRSVEALRHDVSVMLSNAETFFGRNKSVAAKISNLSNWFDRTLPSS

SEQ ID NO: 209 - protein, 352 aa, Arabidopsis thaliana
  Clone ID: AT_T15J14.C1.p7.tg
MTSLSRRCEKRNFDELEGAPSSKNTYIDGMAVDTFSVVFNGFTNGERQYLELNDGESNGSQDVTSRLNDVADSSMWVSRAPGGTDELNDGFEDIKYDLTLDCQKDCVVGAEISLRYDCVGISNPHISDSLSSGSVFLCHGSIRRNQTGLLLTQELSSCSQDQSSGAKSHDVGPFEILKPQQLKEKLSWLTLSIHEEDCRYILQKEDEVANLRQQTFKLTLPDLVTFPDFLVKRSRYEGAIQRKWTCRDKCKVWWRNKGEEDGRWWEGGILAVKPKSTHFLDSPWERFPVPLSLEVIRSRIENNYYRSMEALRHDVSVMLSNAETFFDLNKCVGVAVKISDLSQWFDRTLSSL

SEQ ID NO: 210 - protein, 1389 aa, Arabidopsis thaliana
  Clone ID: AT_T30B22.C1.p29.tg
MDWIHKSTPFMEPSNLAKLVQGNVPLQPHDSHSSLTDLDMDLREVYFLILHFLSIGPCERTFGHLRDEILEKGLLPRRYHSWWSRSGIYSGRADDDGISLPLSYDNLIERYPHIEKDHLVKLLKQLILNPSFPSHMRVEGNAPNAADVPTLLGSGTFSLVDRSNNIESQKARHVASYLRWPHMHADQVRGLSLREIGGGFRKHHRAPSILSACHAIAKPSTMVQKMQNIKKLRGHRNAVYCAIFDRSGRYVITGSDDRLVKIWSMETALCLASCRGHEGDITDLAVSSNNALVASASNDFVIRVWRLPDGMPISVLRGHTGAVTAIAFSPRQASSDDGTCRIWDARYSQWLPRIYVPSPSDANTGSLEVSLLGESTFTSSNTGSTSNASQSHQILCCAYNANGTIFVTGSSDSNARVYCRICVWNAADGSLVHCLTGHSESSYVLDVHPFNPRIAMSAGYDGKTIIWDIWEGIPIKVYEIGRFKLVDGKFSQDGTSIVLSDDVGQIYFLNTGQGESQKNAKYDQFFLGDYRPLIRDTNGHVLDQETQLLPHRRNLQDLLCDSSMIPYPEPDQTMFQQRRLGALGVEWRPSSIKFSVGPDFSLGQDYIMPPLADLDRLIEPLPEFIDAMYWEPEHEVLSDDNDSEYNAEVSSDGARASPCSNSSNELECSSEDSDVENIHESSYHWKRRRKHPKVNVSTSSGRRDKRILDENDSSNSGIKRTKNRRIVVKASKRKHSDVKASRPQRAAAQNARSLLSKISGSSSDEVDDDNDSSNSESDRSIPTLRQLDKPSQMLESLSNDKQKKRLIVKISVKKPAESMGSKGDVINQADLEQLSSKPLEENHRVIGIYSREPGSSSVDAKGDSGCQSIPYSMNTPQREKADNQLIRSSDQDQNMCKWREEIPVCEPTELTAPENIEEAQPFYGDEADEILPKKVRRLRLKLRHPNSPRKLEPDEVADDLADGGDGFASIAPSFMNPIMDSEPVIDSVRDSSAHNFEFGEATADVIRRKRSIRSESSTRNSALRIRLGSGSVDKIKKQGIPSTSVYDDASLEEWPSTSKAGSRSRSASVSKPSLHTGIRLNSVSGKISWLLLSEHEEGCRYIPQLGDEVIYFKQGHQEFLKTKELNDRDRSRYLPRNLGAVEICKVEKLNYDTYPGSGDSCCKMTLRVLDSSSSHASRKEFQLTLPELINFPDFIVEKTRYDAAIQTNWKIGNECRVWWRDATGEGGAWWEGRIESSQVKSTDFPESPWERYRVVYETGETSLHSPWEFDNPEFPWEKSTIEDERREKLLSLFAGLVKSISKHQDSYGIQKLNEAAQKMDFCNRFPVPLYPELIHERLENQYYRSIESFKHDVDAMLSNAELYFVRSAHMLSKIKRLRDKLTKTLRKLI

SEQ ID NO: 211 - protein, 461 aa, Arabidopsis thaliana
  Clone ID: AT_T18K17.C1.p19.tg
MASGPIAGGGVSKTKHKWSDSGNKSQKRSKPTVANSNSLGLEDNHQMMKISLSSISKLEVRNLKRKLQAELEEVRSLIKRLEPQGNNFAPVPNKKLKTANGGKKGGVHGAAADKGTVQILKSCNNLLTKLMKHKSGWIFNTPVDVVTLGLHDYHNIIKEPMDLGTVKTRLSKSLYKSPLEFAEDVRLTFNNAMLYNPVGHDVYHMAEILLNLFEEKWVPLETQYELLIRKQQPVRDIDFHAPVSTNTHNVEALPLPAPTPSLSPPPPPKVVENRTLERAESMTNPVKPAVLPVVPEKLVEEASANRDLTFDEKRQLSEDLQDLPYDKLEAVVQIIKKRTPELSQQDDEIELDIDSLDLETLWELFRFVTEYKESLSKKKEEQGLDSERDAESFHNSVHESNTLVTGLESSKVTELGHVASTVRQEVNVGGSSSSNSSSSGSGSGSSGSDSDSSGHESDTGN

SEQ ID NO: 212 - protein, 1919 aa, Arabidopsis thaliana
  Clone ID: AT_F6N18.C1.p20.tg
MAESNGKGSHNETSSDDDDEYEDNSRGFNLGFIFGNVDNSGDLDADYLDEDAKEHLSALADKLGSSLPDINLLAKSERTASDPAEQDYDRKAEDAVDYEDIDEEYDGPEVQVVSEEDHLLPKKEYFSTAVALGSLKSRASVFDDEDYDEEEEQEEEQAPVEKSLETEKREPVVLKEDKALEYEEEASILDKEDHMDTEDVQEEEVDELLEGTLDDKGATPLPTLYVEDGMVILQFSEIFAIHEPPQKRDRRENRYVTCRDKYKSMDISELVEDDEEVLLKSHGRIDTHVEQADLIQLDVPFPIREGLQLVKASTIGGITPESREFTKLGRDSCIMGELLKQDFIDDNSSLCQSQLSMQVFPLDQHEWERRIIWEHSPEISGNSGEIFEPGLEPEGMLVKGTNSETEQESLNVVNSRVQVQADNNMFVPFSANLLESFGSRGSQSTNESTNKSRHHPQLLRLESQWDENHLSGNDEAGVKKIKRLEKDALGRFSRLVLRERDLGDEAWLDSIIWDSEKELSRSKLIFDLQDEQMVFEIFDNEESKNLQLHAGAMIVSRSSKSKDETFQEGCESNSGWQFNLSNDKFYMNGKSSQQLQANTNKSSVHSLRVFHSVPAIKLQTMKSKLSNKDIANFHRPKALWYPHDNELAIKQQGKLPTRGSMKIIVKSLGGKGSKLHVGIEESVSSLRAKASRKLDFKETEAVKMFYKGKELDDEKSLAAQNVQPNSLVHLIRTKVHLWPWAQKLPGENKSLRPPGAFKKKSDLSTKDGHVFLMEYCEERPLMLSNAGMGANLCTYYQKSSPEDQRGNLLRNQSDTLGNVMILEPGDKSPFLGEIHAGCSQSSVETNMYKAPIFPQRLQSTDYLLVRSPKGKLSLRRIDKIVVVGQQEPRMEVMSPGSKNLQTYLVNRMLVYVYREFFKRGGGEHPIAADELSFLFSNLTDAIIKKNMKIIACWKRDKNGQSYWTKKDSLLEPPESELKKLVAPEHVCSYESMLAGLYRLKHLGITRFTLPASISNALAQLPDEAIALAAASHIERELQITPWNLSSNFVACTNQDRANIERLEITGVGDPSGRGLGFSYVRAAPKAPAAAGHMKKKAAAGRGAPTVTGTDADLRRLSMEAAREVLIKFNVPDEIIAKQTRWHRIAMIRKLSSEQAASGVKVDPTTIGKYARGQRMSFLQMQQQAREKCQEIWDRQLLSLSAFDGDENESENEANSDLDSFAGDLENLLDAEEGGEGEESNISKNDKLDGVKGLKMRRRPSQVETDEEIEDEATEYAELCRLLMQDEDQKKKKKKMKGVGEGMGSYPPPRPNIALQSGEPVRKANAMDKKPIAIQPDASFLVNESTIKDNRNVDSIIKTPKGKQVKENSNSLGQLKKVKILNENLKVFKEKKSARENFVCGACGQHGHMRTNKHCPRYRENTESQPEGIDMDKSAGKPSSSEPSGLPKLKPIKNSKAAPKSAMKTSVDEALKGDKLSSKTGGLPLKFRYGIPAGDLSDKPVSEAPGSSEQAVVSDIDTGIKSTSKISKLKISSKAKPKESKGESERRSHSLMPTFSRERGESESHKPSVSGQPLSSTERNQAASSRHTISIPRPSLSMDTDQAESRRPHLVIRPPTEREQPQKKLVIKRSKEMNDHDMSSLEESPRFESRKTKRMAELAGFQRQQSFRLSENSLERRPKEDRVWWEEEEISTGRHREVRARRDYDDMSVSEEPNEIAEIRRYEEVIRSEREEEERQKAKKKKKKKKLQPEIVEGYLEDYPPRKNDRRLSERGRNVRSRYVSDFERDGAEYAPQPKRRKKGEVGLANILERIVDTLRLKEEVSRLFLKPVSKKEAPDYLDIVENPMDLSTIRDKVRKIEYRNREQFRHDVWQIKYNAHLYNDGRNPGIPPLADQLLEICDYLLDDYEDQLKEAEKGIDPND

SEQ ID NO: 213 - protein, 369 aa, Arabidopsis thaliana
  Clone ID: AT_T25B15.C1.p50.tg
MADSVPGHVAGGGLQGFSVDAECIKQRVDEVLQWVDSLEHKLKEVEEFYSSIGVSNSGSIGKDTEKGRHVVGIRKIQQEAARREAVAAKRMQDLMRQFGTIFRQITQHKCAWPFMHPVNVEGLGLHDYFEVIDKPMDFSTIKNQMEAKDGTGYKHVMQIYADMRLVFENAMNYNEETSDVYSMAKKLLEKFEEKWAHFLPKVQEEEKIREEEEKQAAKEALLAKEASHIKTTRELGNEICHANDELEKLMRKVVERCRKITIEEKRNIGLALLKLSPDDLQKVLGIVAQANPSFQPRAEEVSIEMDILDEPTLWRLKFFVKDALDNAMKKKKEEETKTRELSGAQKKEVSKKRNATTKLAERKTKRSRI

SEQ ID NO: 214 - protein, 487 aa, Arabidopsis thaliana
  Clone ID: AT_F2H15.C1.p2.tg
MSSEHISGGGASKTKKHKWSSSQNRPKPMGVSRQERSVPLVSPSNSFASEDDHHMLKISLSSISKLEVRNLKRKLKSELDEVRSLIKRFDPEANPGGSMAKSGVVGRSKKVKTGNGGGKKSGHGADKGTVQIFKNCNSLLTKLMKHKSAWVFNVPVDAKGLGLHDYHNIVKEPMDLGTVKTKLGKSLYKSPLDFAEDVRLTFNNAILYNPIGHDVYRFAELLLNMFEDKWVSIEMQYDNLHRKFKPTRDIEFPAPAPSIAPIVEPLPAIVPSPSPSSPPPPPPPPVAAPVLENRTWEREESMTIPVEPEAVITAPEKAEEEEAPVNNRDLTLEEKRRLSEELQDLPYDKLETVVQIIKKSNPELSQKDDEIELDIDSLDINTLWELYRFVTGYKESLSKKNEAHGFGSERDAESVHNSIQEPTTLVSGTTTSRVTESGKAIRTSSPARQENNASGSSSSNSSSSDSGSCSSDTDSDSSSGRGSDNGN

SEQ ID NO: 215 - protein, 813 aa, Arabidopsis thaliana
  Clone ID: AT_K17E12.C1.p8.tg
MVESAAFPGGYYRNTFEAPEESEGSGSSAQIDTEVTASENSSTPARKCIMLNSNDEDPYGVQRQVISLYNMSQSERKDLIYRLKLELEQTKIVLKNAELQRMNPAAVSSTSDRVGFSTGQKISSRVSNSKKPSDFAVGSGKKVRHQNGTSRGWNRGTSGKFESSKETMTSTPNITLMKQCDTLLRKLWSHPHSWVFQAPVDVVKLNIPDYLTTIKHPMDLGTVKKNLASGVYSSPHEFAADVRLTFTNAMTYNPPGHDVHIMGDILSKLFEARWKTIKKKLPPCSMQTLPAVTLEPNDERKAAISVPPAKKRKMASPVRESVPEPVKPLMTEVERHRLGRQLESLLDELPAHIIDFLKKHNSNGGEIAEDEIEIDIDVLSDEVLVTLRNLLDEYIQNKEAKQTNVEPCEIELINGSRPSNSSLQRGNEMADEYVDGNEPPISRSSSDSDSGSSEDQSDDAKPMVQGDSSKMPETANSEAQRDENTRIDDLFVGSQSTGALEQMDICSQQKLSSDESDGQHEGNILETPASSEKRYRAALLKNRFADIILKAREKPLPQNGIKGDPERLRKEREELVLQKKKEKARLQAEAEAAEDARRQAEAEAAAEAAAEAKRKRELEREAARQALLKMEKTVEINENSRFLEDLEMLSSSAPEQLPSSAEETSPERPLDALGSFNLRGSNPLEQLGLYMKQDDDEEEPEAPAVPKPDETSTERPLDALGSFKLGECNPLEQLGLYMKQDDGEEEEPEAPVVPKPNETSLERPVDAFGSFNLKGSNPLEQLGLYMKQDDDEEEPEAPAVPNLANDVEEGEID

SEQ ID NO: 216 - protein, 1700 aa, Arabidopsis thaliana
  Clone ID: AT_K13E13.C1.p16.tg
MGAMMKSMMGLSFKASVFDDEDYDEQGGQEKEHVPVEKSFDSEEREPVVLKEEKPVKHEKEASILGNKNQMDTGDVQEVSKNDFEATLDEKRVTPLPTLYLEDDGMVILQFSEIFAIQEPQKKRQKREIRCITYRDKYISMDISELIEDDEEVLLKSHGRIDTHGKKTDQIQLDVPLPIRERSQLVKSGIVRDTTSESREFTKLGRDSCIMGELLKQDLKDDNSSLCQSQLTMEVFPLDQQEWEHLILWEISPQFSANCCEGFKSGLESAGIMVQVRASNSVTEQESLNVMNSGGQTQGDNNNMLEPFFVNPLESFGSRGSQSTNESTNKSRHHPQLLRLESQWDEDHYRENGDAGRENLKQLNSDARGRLSGLALQDRDMWDESWLDSIIWESDKDLSRSKLIFDLQDEQMIFEVPNNKERKYLQLHAGSRIVSRSSKSKDGSFQEGCGSNSGWQFNISNDKFYMNGKSAQKLQGNAKKSTVHSLRVFHSAPAIKLQTMKIKLSNLGGKGSLLTVGREESVSSLKAKASRKLDFKETEAVKMFYMGKELEDEKSLAEQNVQPNSLVHLLRTKVHLWPWAQKLPGENKSLRPPGAFKKKSDLSNQDGHVFLMEYCEERPLMLSNAGMGANLCTYYQKSSPEDQHGNLLRNQSDTLGSVIILEHGNKSPFLGEVHGGCSQSSVETNMYKAPVFPHRLQSTDYLLVRSAKGKLSLRRINKIVAVGQQEPRMEIMSPASKNLHAYLVNRMMAYVYREFKHRDRIAADELSFSFSNISDATVRKYMQVCSDLERDANGKACWSKKRKFDKIPLGLNTLVAPEDVCSYESMLAGLFRLKHLGITRFTLPASISTALAQLPDERIAAASHIARELQITPWNLSSSFVTCATQGRENIERLEITGVGDPSGRGLGFSYVRVAPKSSAASEHKKKKAAACRGVPTVTGTDADPRRLSMEAAREVLLKFNVPDEIIAKQTQRHRTAMIRKISSEQAASGGKVGPTTVGMFSRSQRMSFLQLQQQAREMCHEIWDRQRLSLSACDDDGNESENEANSDLDSFVGDLEDLLDAEDGGEGEESNKSMNEKLDGVKGLKMRRWPSQVEKDEEIEDEAAEYVELCRLLMQAKDPLLNESLTGGAYLDENDKKKKKLKDVGEGIGSFPPPRSNFEPFIDKKYIATEPDASFLIVNESTVKHTKNVDKATSKSPKDKQVKEIGTPICQMKKILKENQKVFMGKKTARANFVCGACGQSTGKPSSSDLSGEVWLTPIDNKKPAPKSATKISVNEATKVGDSTSKTPGSSDVAAVSEIDSGTKLTSRKLKISSKAKPKASKVESDSPFHSLMPAYSRERGESELHNPSVSGQLLPSTETDQAASSRYTTSVPQPSLSIDKDQAESCRPHRVIWPPTGKEHSQKKLVIKRLKEITDHDSGSLEETPQFESRKTKRMAELADFQRQQRLRLSENFLDWGPKDDRKWRKEQDISTELHREGKVRRAYDDSTVSEERSEIAESRRYREVIRSEREEEKRRKAKQKKKLQRGILENYPPRRNDGISSESGQNINSLCVSDFERNRTEYAPQPKRRKKGQVGLANILESIVDTLRVKEVNVSYLFLKPVTKKEAPNYLEIVKCPMDLSTIRDKVRRMEYRDRQQFRHDVWQIKFNAHLYNDGRNLSIPPLADELLVKCDRLLDEYRDELKEAEKGIVDSSDSLR

SEQ ID NO: 217 - protein, 652 aa, Arabidopsis thaliana
  Clone ID: AT_F2D10.C1.p13.tg
MGEVADTMTKKKKKGRPSLLDLQKRAIKQQQQQLQQQQQQHKNNHQDDDDHHHNNNNRSGSKNPNSLNHRSKRRNPNSNDGDSPWIKDEGEDNDDDERREKKHKLLHGLNSHSHRHSPNSQSDLNLDQTPEPSFNRRNLSAAASGSDYHTGEKASKATDILQGSPVESGPTTPLPDKKLLLFILDRLQKKDTYGVYSDPVDPEELPDYFEIIKNPMDFSTLRNKLDSGAYSTLEQFERDVFLICTNAMEYNSADTVYYRQARAIQELAKKDFENLRQDSDDEEPQSQQQQQQQPKVARRGRPPKKHPEPSSIDRTASEISADALIPGDSSNKFSGAYNLRKAPPSYKFRQAESSVRINHNSETQSGWSVDWESEFPSSVVKAVNKYGMKHFNVDDNRRDTYNHLSTSTQEPSVLTTLEDELKQLIPVGLNMEYGYAKSLARYAANLGPVAWKIASRRIETVLPSGIKFGQGWVGENPAGPEEDDSQKQNILMSSGKQKCSNDLASDDHSNRILSPTASVSSAFIGNRHASSQAIEETTPPPARVLNPEIDHPSSSSHQAGLLIKTESSNGLIRGFNHNANQMLGIARQQQPNVSNEATPVSQQQGSLFPYPKQEFHRFPPDLNARLVSPNSPGSNQQTGSSSSQHPDLALQL

SEQ ID NO: 218 - protein, 145 aa, Arabidopsis thaliana
  Clone ID: AT_K13P22.C1.p4.tg
MLHFLCYFVFRALIIMTNLISQSALVVVLVVLGNQCDHSSETTPILDKKSLELILDKLQKKDIYGVYAEPVDPEELPDYHDMIEHPMDFSTVRKKLANGSYSTLEELESDVLLICSNAMQYNSSDTVYYKQVNHVFIFSPIFFLC

SEQ ID NO: 219 - protein, 631 aa, Arabidopsis thaliana
  Clone ID: AT_T24P15.C1.p6.tg
MAKPENDVTLTEKQTWSTWEELLLACAVHRHGTESWNSVSAEIQKLSPNLCSLTASACRHKYFDLKSRFTQELPVPESVAEISTAPWLEELRKLRVDELRREVEQYDLSISTLQSKVKQLEEEREMSFIKPDTETENLDLERKKERSDSGEPVPNPPVQLMNETISPDPKEIGSENTEREEEMAGSGGGESKLAGEDSCRGSCESVEKEPTTNSERVEPVSVTELIESEDGASRGEEITSDVQSSASLPRKGTSEPDKEDQSPTSAKDFTVESQPLISFVEILLSHPCGSHFSRRLERQETIEYGTIIREHVDFEIIRKRVEGGLYKSWRINFFRDLLLLVNNARVFYHRGSSEFKFAEQLHQLVKKQMTTTLKGLSNRDEISISPPKEEVVAIPSSKPVSSKPRMSVPNIVACRKRSALAAKPLLLLPPGPDKKAKKTDHVVDYDEKPVSDKDGEASGKDDDDSLIVKIMTRGRTSSTGKVANRNDKNRDSSLNVDDSKDKVKKTDEEKKGGSKKKRAASFLRRMKVGSSDDTLKRSSAADSSTTGKGGGAEQRKNNSNKADNKKTPIPKIRQTNKKASPVKRSNNGRNSEREAAPSSSSYPILAKRSRDAGEKEEASSYSPRLKKRARR

SEQ ID NO: 220 - protein, 703 aa, Arabidopsis thaliana
  Clone ID: AT_F18O22.C1.p60.tg
MTERNGGFPGDYCFEAPGGDYDEGSDSPRVSEGSNCSKRKVGETFGVSKMVLPLSGLSSSDRKELIRRLRQELEQIRVFQKNFELSRTVALTSSSASGLTRVKSFGMSRCSTGPGKTVNPISAASKPTPVTTAVMLLMKQCEALLKRLMSHQYGWVFNTPVDVVKLNILDYFNVIEHPMDLGTVKNKLTSGTYSCPSEFAADVRLTFSNAMTYNPPGNDVYVMADTLRKFFEVRWKTLEKKLSGTKVHTEPSNLDAHKEKHIVIPVPMAKKRKTTAVDCENVVDPAKRVMTDEDRLKLGKDLESLTEFPAQLINFLRDHNSNEGGIGDDEIEIDINDLSDHALFQLRDLLDEHLREIQNKKSSVEPCEIELLHGSVPGNSSMQHCDGSELDDEVVDIGENEHPTSSISPVTIEKDLVLGNSNDYPLGCTTDCSSFDAYNLGNSLGSVSGDPKMSSLPRASKGLGTIDLEPMLDGATSASPTRGSSVGGLDQLESASPEKISSVEADCQQDGNSAQNEKQLPPEKSYRAAILKNRFADIILKAREKPLNQNDTRDPEKLQREREELELQKKKEKARLQAEAKAAEEARRKAEAQAAAEAAAEAKRKLELEREAARQALMESVELNENAKFLEDLELLKTVDTDHLTNTIEEEDGPDVGLRSFSFGGSNPLEQLGLFMKQDEDEEEADPLTSPAPEIDIEEGEID

SEQ ID NO: 221 - protein, 477 aa, Arabidopsis thaliana
  Clone ID: AT_K9H21.C1.p3.tg
MGKARKHSRGRPSGFVPDYMQAVEPDEFVYSERMNSEASPPLKRRRFGLNGDNNGVSKEVLSLSKMSRSERKNLVHKLKMELQQVRDLSKKIASFSSDTVLLSPYNDHSCSDGPRRPPPENFATFVGSQGKKRPPVRSDKQRNKKGPSRLNVPTSYTVASVMKECETLLNRLWSHKSGWPFRTPVDPVMLNIPDYFNVIKHPMDLGTIRSRLCKGEYSSPLDFAADVRLTFSNSIAYNPPGNQFHTMAQGISKYFESGWKSIEKKIPMSKPPVIPLTSSASLESEIPFEVAPMRKKEAAMNDNKLRVEPAKLVMTDGEKKKLGQDLMALEEDFPQKIADLLREQSGSDGQSGEGEIEIDIEALSDEILFMVRKLLDDYLREKKKSMEKSEPCEMEIVHDSGFSNSPLQPSKGDLQIDEDVDIVGGNDPSVSSHPPLKIEKDAACRNNESSSSSSSSSESGSSSSGSCLCEPSSISLE

SEQ ID NO: 222 - protein, 556 aa, Arabidopsis thaliana
  Clone ID: AT_F15M4.C1.p12.tg
MGEVADNNTLMKRKKKGRPSLLDLQKRALKQQQLLQRRNPNEENEEELRSSSRNPNFSNRSNRRRNSNSEDDDDERRDKKHRLLHGLNSHEGRDSSNSKSGGGDLDSDARNRRKIDGSDNTGEKASKATDILLQRGSLVESTPLPDKKLLFFILDRVQKKDTYGVYSDPADPEELPDYYEIIKNPMDFTTLRKKLESGAYTTLEQFEASLQDVFLICTNAMEYNSADTVYYRQARAMLELAKKDFGNLRQESDGEEPVSLSQQPKVVKRGRPPGSGLKKQLEQSLIDRTTSDISADAAAFTYAGDSSRLSGSYNLRKNPPSYGFRHAETSAVNKYGMKNVDENRRDTYNQNSASLQDSSIFTLLDDNLKQLTPVGLKAEYGYARSLARYAANIGPVAWTFANVRIEKLLPTGTEFGPGWVGENPENPPQQQNLMSGKQKCSNDYASDDHHQSSRIMSPSTSVSSSIIGNIHSSHESKESVQVLNQETEINGLVRGSSGFNHKPNQMLETAGSQQGNIKQEFQRLPPDLNARLSSPNSPGSNHQAGSSQHPDLALQL

SEQ ID NO: 223 - protein, 632 aa, Arabidopsis thaliana
  Clone ID: AT_T10K17.C1.p190.tg
MEELLLACAVHRHGTDSWDSVASEVHKQNSTFRTLTAIDCRHKYNDLKRRFSRNLVSPGSADEETLAAEISSVPWLEELRKLRVDELRREVERYDLSISSLQLKVKTLEDEREKSLKTENSDLDRIAETKENHTESGNNSGVPVTELKNSPDPNDNSPGTGSENTNRAVKIAEPVDEEPNRIGGEDNDEKPAREDSGRGSCESVAKESDRAEPKREGNDSPELVESMDESKGEEDTKETSDGQSSASFPRKETVDQDQPDNKDQSLTVNKIFVESQPLSDFIEILQSHPIGSHFSRRLETQETSDYYRIIRQHIDFEMIRSRVEEGYYKTARTKFFRDLLLLINNVRVFYGEPSPEFNAAKQLYQLIKKQMSFKIPKQTLPPPKEDALVTSKEEVKVSSLKPTLSVPIIACRKRSSLAVRSPASVTETLKKKTRVVPTVDEKQVSEEEEGRPSDKDEKPIVSKKMARGAAPSTAKKVGSRNVKTSLNAGISNRGRSPNGSSVLKKSVQQKKGINTSGGSKKQSAASFLKRMKGVSSSETVVETVKAESSNGKRGAEQRKSNSKSEKVDAVKLPAGQKRLTGKRPTIEKGSPTKKNSGVASKRGTASLMAKRDSETSEKETGSSTRPKKRSKR

SEQ ID NO: 224 - protein, 643 aa, Arabidopsis thaliana
  Clone ID: AT_K21L13.C1.p15.tg
MMPPIFFLIIIDHLPKNPLFIPFSEALKFFSSPIAGIFAGDLEKSENPRNDLAIRMAPAVFATLNEPSYQEQCGAVFMRKFTNQSVTENTNNLPLFNPNPNPNFERSNSSKQCDDSSEFGSYATFNLAGYTSSQLRELKKRFTSELKQIRILRERIESGTFETQQGYTIPEVPAVRSAPLNNFTGEKNDLGPKKKKQKKNVSGLKRSNQFGPSDPESEKLLAGMLNTCSQILVKLMKHKWAWVFNTPVDVVGLGLHDYHQVVKKPMDLGTVKLNLDKGFYVSPIDFATDVRLTFDNAMTYNPKGQDVYFMADKLLDHFDGMFNPAFKKFEAQQLKLTGSSSRPEPDFKPDFKQRQWNQNPPMVANPRKGTEQISIAKKLDSVKPPQPTLPPQLVEPSRVQSPSPPPPPPVIQPELPQPQPPPPQLEIEVEAPPDVSEVSKGRKGKLPKPKAKDPNKRLMTMEEKSKLGMNLQDLPPEKLGQLLQILRKRNGHLAQDGDEIELDIEAVDNETLWELDRFVTNYKKMASKIKRQGFIRNVSTPPRNMASVAEMGSAEKRTRRGDAGEEDVDIGEDIPIEDYPSVEIERDGTAVAAAASSGSSSSGSSSSSGGSSSSSGSGGSSSGSDSDADSVQSPFVEAKEAQC

SEQ ID NO: 225 - protein, 646 aa, Arabidopsis thaliana
  Clone ID: AT_F4I1.C1.p24.tg
MRKEEEEEAGSYNMNVDDTNNNNNYICTDNDYIEEDEDNSNTKKSQTQAWGTWEELLLACAVKRHGFGDWDSVATEVRSRSSLSHLLASANDCRHKYRDLKRRFHEQEKTDVTATVEEEEEEEERVGNNIPWLEQLRNLRVAELRREVERYDCSILSLQLKVKKLEEEREVGEEKPDLENERKEERSENDGSESEHREKAVSAAEESDRENRSMNESNSTATAGEEERVCGDEPSQTREDDSGNDKNPDPDPVNKDATAAEEEEGSVSRGSEASHSDELGESGTSESKWKRKRRKQGGAGEIRSAESKSQPLISLLDLIRSHPRGSLFERRLRSQEAKDYKSMVKQHLDIETIQRKLKQGSYDSSSLIFYRDLQLLFTNAIVFFPLSSSESMAAHELRAVVSQEMRKETGKAGPRLIKQEASGMRSGKADAETSDSSLSRQKSSGPLVVCKKRRSVSAKASPSSSSFSQKDDTKEETLSEEKDNIATGVRSSRRANKVAAVVANNTKTGKGRNKQKQTESKTNSSNDNSSKQDTGKTEKKTVSADKKKSVADFLKRLKKNSPQKEAKDQNKSGGNVKKDSKTKPRELRSSSVGKKKAEVENTPVKRAPGRPQKKTAEATASASGKRGRDTGSTGKDNKQPKKRIRK

SEQ ID NO: 226 - protein, 506 aa, Arabidopsis thaliana
  Clone ID: AT_F10E10.C1.p2.tg
MFAYRFLFVLVRMVAIPNIKIKFGPQGSVRTFQTLSDSSKKIEHVVTEDLSQSSEKSKKRGGPKELDEVQPKKKQRLDCDWSSQCLALLRFLMEHRGGWLFKEPVDPVKMEIPDYFNVIQKPMDLGTVKSKLLKNVYSNADEFAADVRLTFANAMHYNPLWNEVHTIAKEINEIFEVRWESLMKKKVLRLSWNEVREGYKRQPVERDCSRRSSTGTSASSGVGLTKPAKENSEKGSLSSKPVKVQSKKNTPAVTPKALATCKCGRIICICLKSCSSFGSDVCSLTDCQLKNISGAQASELDPQSNGSDTSKKERNGSLKSQLDKPSNSDLLGNELKTAFPALPPVPPEKALRAAILKAQYAGTIIKAKHRIVLGQNNKADLIRIQIEKEQMERAQREEKARIEAEMRAAKVAERMRAQDELKQKRESQRLEIAKMKKGFDFERNNHSKLKKKFVKVCGCFSLTKARLLLEELGLVLKNDYCPELEVIGSEKFDAMRMDDLEEGEIL

SEQ ID NO: 227 - protein, 644 aa, Arabidopsis thaliana
  Clone ID: AT_T2O9.C1.p90.tg
MKEDEEEEAVISNGMNDDDDTNNINNSSTEFDNNRIGDGDDNSNLNQIKQVWGTWEELVLTCAVKRHAFSDWDSVAKEVQARSRSSLIVSAVNCRLKYQDLKRRFQDSVDVGDENTEAAANEEDEVGEISWLEQLRSLHMADSAVRFNDVTTRYCTEKSLQLKVKKLEEEKDGDDGDNKPDLKNDETKPVRVNRETTESDRDDNRSMNESNSTASVDKIADHDRLDGDKMVKANENSRNPDPDPVNKAETPEEEERTVSKRSEMSNSGELDESGTSNCLGKRKGQKYRSGGGGGGVKSAGDKSQPLIDIIKLIRSHPRGSVFESRLRSQDTKDYKRLIRQHLDMKTIEKKMEKGSYVSSSLSFYRDLKLLFTNAIVFFPTSSSESIAAQELRTLVSNEMKKRTGKLGHCVIKSEAESSVSRQKSSVLSLVPCKKKSSALKKTSPSSSSRQKDEKKSQEVSEEKIVTTTATTSARSSRRTSKEIAVVAKDTKTGRAKNNIKKQTDTKTESSDDDDDEKEENSKTEKKTVADKKKSVADFLKRIKKNSPQKGKETTSKNQKKNDGNVKKENDHQKKSDGNVKKENSKVKPRELRSSTGKKKVEVENNNSKSSSKRKQTKETAEVATGKRGRESGKDDKQPRKRSRR

SEQ ID NO: 228 - protein, 1069 aa, Arabidopsis thaliana
  Clone ID: AT_T20M3.C1.p16.tg
MDAELAPRREGLRPRRSTTIANKRLKTESGADQDTSEEKDGQDETENGNELDDADDGENEVEAEDEGNGEDEGDGEDEGEEDGDDDEEGDEEQEGRKRYDLRNRAEVRRMPTGEINKQQQPRSPRRVLHQGMGTRVGRDGRRGGSRPHKRHRFTRTDDSDDSLLVDELDQGPAIPWARGGNRSGAPWLFGGLDTYGSSSLGLNVGASGWGHQSDGLAALTSGVQTAGPSSKGGADIQPLQINEDINFDDIGGLSEYINDLKEMVFFPLLYPEFFASYSITPPRGVLLCGPPGTGKTLIARALACAASKAGQKVSFYMRKGADVLSKWVGEAERQLKLLFEEAQRNQPSIIFFDEIDGLAPVRSSKQEQIHNSIVSTLLALMDGLDSRGQVVLIGATNRVDAIDGALRRPGRFDREFNFSLPGCEARAEILDIHTRKWKHPPTRELKEELAATCVGYCGADLKALCTEAAIRAFREKYPQVYTSDDKYAIDVGLVNVEKSHFVEAMSAITPAAHRGSVVQSRPLSPVVLPCLHRHLLESMSLISDIFPSSATSSELTKLSILTFGSAIPLVYRPRLLLLGGEGVGLDHLGPAILHELEKFPIHSLGLPSLLSDPGAKTPEEALVHIFSEARRTTPSILYIPMFNNWWENAHEQLRAVFLTLLEELPSNLPILLLATSYGELSDMEEQSVFDNRSVYTVDKPSSEDRSLFFDRLIEAALSVISGLNGKPDGPQPLPELPKVPKEPTGPKPAEVKAKVEAEQHALRRLRMCLRDVCNSAFHFPVTDEDAPNYRSIIQIPMDTATLLQRVDTGQYLTCTPFLQDVDLIVRNAKAYNGDDYAGARIVSRAYELRDVVHGMLSQMDPALLTYCDKIAAEGGPSLIPDDLSGSILGLAPVVQMGTVTRTSARLRNVQPEVNLDRDYEGLKKPKKTTDAVSIDSAADKSQNQDSGQEMPSPDAANPQSAAPSPTDGDREDQSEPPSKEASAEDMSGDSCKGPAAKSDKEISSRTESVKGVFMERTDNYSIPQMERLYTRIMKGVLETLDKGLRDDDNNPKHSILRFLSEFAQHQANF

SEQ ID NO: 229 - protein, 601 aa, Arabidopsis thaliana
  Clone ID: AT_F28J7.C1.p10.tg
MTVRNGGFPGDYNRNSFDSPGGCDDSPNASKDDETFGVPRIVLPLSDLSSSERRKWIHTLRQELEQLRSFQKSVGDLLPISKIVTSTPASNVSRPKSFGMSRCSTGPGKRVLPFTATKPEPVTTSTMLRMKQCESLLKRLMSQQHCWLFNTPVDVVKLNIPDYFTIIKHPMDLGTVKSKLTSGTYSSPSEFSADVRLTFRNAMTYNPSDNNVYRFADTLSKFFEVRWKTIEKKSSGTKSEPSNLATLAHKDIAIPEPVAKKRKMNAVKRNSLLEPAKRVMTDEDRVKLGRDLGSLTEFPVQIINFLRDHSSKEERSGDDEIEIDINDLSHDALFQLRDLFDEFLRENQKKDSNGEPWSELEDEDVDIGNYEHPISHISTVRTEKADSVGGLNQMEDASRGKLSLIEGADGHQDGNSAPKEKELPPEKRYRAALLKNRFADIILKAQEITLNQNEKRDPETLQREKEELELQKKKEKARLQAEAKEAEEARRKAEAQEAKRKLELEREAARQALLEMEKSVEINENTRFLKDLELLKTVNTDQLRNLRDVGSESDGLAVFGFGGSNPLEQLGLFMKHEEDEDESDMLAFPDPGNEVEEGEID

SEQ ID NO: 230 - protein, 215 aa, Arabidopsis thaliana
  Clone ID: AT_F5G3.C1.p23.tg
MATQTNQDHFSGDLRRSWQKIGKLTYGSRQWIVMMASRSAVLKKMLESDEFKTSAKQVGTITLLEMKQEELEAFVEFLYSDGSMLSSKVKQHARALYRAADKYEILRLRELCRSELISSLNSTNSLNLLELAQIPFDKVLNDAALSYIKTNELMFPSFDEFKLFVDNYPNLAVEVMMASLTRTPSTSCSRCGLITYHNQTGTSCCSCGFDYPRRS

SEQ ID NO: 231 - protein, 582 aa, Arabidopsis thaliana
  Clone ID: AT_F17O14.C1.p13.tg
MGSDSTLSLPSSSPPCNNRSSVPPTFTTRIFSDVAGDIIVVVDGESFLLHKFPLVARSGKMRKMVRDLKDSSSMIELRDFPGGPSTFELTMKFCYGINFDITAFNVVSLRCAAGYLEMTEDYKEQNLIFRAENYLDQIVFRSFHESVLVLCSCETQEIAETYEIPDRCVEAIAMNACRKQLVSGLSEELKGRDCLEMWTEELSALGIDYYVQVVSAMARLSVRSESIVASLVHYAKTSLKGIIDRNCQEQRKIVEAMVNLLPNDEKGSYSLSIIPLGFLFGMLKVGTIIDIEISCRLELERRIGHQLETASLDDLLIPSVQNEDSMYDVDTVHRILTFFLERIEEEDDECGYDSDSTGQHSSLLKVGRIMDAYLVEIAPDPYLSLHKFTAIIETLPEHSRIVDDGIYRAIDMYLKAHPLLTEEERKKLCNFIDCKKLSQEASNHVAQNDRLPVQMVVRVLYTEQLRLKKALSGDSEEGSWVLPSGVQSRAVSPRDTYAALRRENRELKLEISRMRVRVSELEKEHNLMKHEMMEKSGNNGGTFLTSLSKGIGRIATFGGETRQKVNRKSRSVSERKSSRSGR

SEQ ID NO: 232 - protein, 625 aa, Arabidopsis thaliana
  Clone ID: AT_MIF21.C1.p2.tg
METFSLKDCSSVASSPISSPNISTLLKIKVLSWSKETGLPASVHVRVCNKSFNLHKSLLCAKSGYFKEREDQLSEIEIPQEFPGGAETFEKIMLFIYGCPTLIHPFNIAGLRCAAQFLEMTEQHSTGNLCERFDLYLNQVVLQNWDDTLVVLKKCQDLVPWSEDLLIVSRCIESLAFTACMEILDPERRREKPVIMLEGMVNQPWEYTNIERIINQDTWIKDLTDLPFEFFKKIIGSLRRQGMKERYVSPLVALYASKSVIPEGQTNTDILQRALDLLLTRDKAYRFVPVGFYFACLAHNLKHDTVLKLQDQIVSLLHTAQPENFIYPKAGNRQVAFSQELLTMESLFSVYVSTESERHLTSSSSNVRVGKLWDIFLSRLPYDQEMKTTRFIELIETVPMSFRESHDQLYLAVNAFLQVHTNISQEEKGSICSYLNCQKLSQEASLELVKNEKMPLRLVVQALFIQQLNTHQAFKDCSDSFRFTNSADFSGSVVPSSRPLTSQQSPCTDDETGPRNRPLCFLMQKDATLDEFESTSFRIHNLEEQLVSLKKSLHSHDNLKKPNCLGKRSASRNKNTFGQVTTACIGSVSFTSQRKYANRLLQILRRVNLFGSRKTNRSKAGESER

SEQ ID NO: 233 - protein, 365 aa, Arabidopsis thaliana
  Clone ID: AT_MDC12.C1.p13.tg
MAITATQNDGVSLNANKISYDLVETDVEIITSGRRSIPAHSGILASVSPVLTNIIEKPRKIHGGSSKKVIKILGVPCDAVSVFVRFLYSPSVTENEMEKYGIHLLALSHVYMVTQLKQRCTKGVGERVTAENVVDILQLARLCDAPDLCLKCMRFIHYKFKTVEQTEGWKFLQEHDPFLELDILQFIDDAESRKKRRRRHRREQNLYLQLSEAMECIEHICTEGCTLVGPSSNLDNKSTCQAKPGPCSAFSTCYGLQLLIRHFAVCKKRVDGKGCVRCKRMIQLLRLHSSICDQSESCRVPLCRQYKNRGEKDKKMVEDTKWKVLVRRVASAKAMSSLSQSKKKKSEVLFKEEAEDLIRIRNKLM

SEQ ID NO: 234 - protein, 591 aa, Arabidopsis thaliana
  Clone ID: AT_MSH12.C1.p6.tg
MASLKLGSKSEVFHLSGHTWLCKTGLKPDVMIQVVDESFHLHKFPLLSRSGYLETLFSKASETTCVAQLHDIPGGPETFLLVAKFCYGVRIEVTPENAVSLRCAAEYLQMSENYGDANLIYLTESFLNDHVFVNWEDSIKALEKSCEPKVLPLAEELHIVSRCIGSLAMKACAEDNTSFFNWPISLPEGTTTTTIYWNGIQTKATSENWWFNDVSSFLDLPMYKRFIKTVESRGVNAGIIAASVTHYAKRNLPLLGCSRKSGSPSEEGTNYGDDMYYSHEEQRSLLEEIVELLPGKKCVTSTKFLLRLLRTSMVLHASQVTQETLEKRIGMQLDEAALEDLLIPNMKYSGETLYDTDSVQRILDHFMLTFDSSIVEEKQMMGDSHPLKSITKVASLIDGYLAEVASDENLKLSKFQALGALIPEDVRPMDDGIYRAIDIYIKAHPWLTESEREQLCLLMNCQKLSLEACTHAAQNERLPLRVIVQVLFFEQMRLRTSIAGWLFGSEENNDTSGALEGNKNTNANMVMHGMRERVFELEKECMSMKQDLDKLVKTKEGRNFFSKIFGSRSKTKTSPCGKGGEDALVIPETKN

SEQ ID NO: 235 - protein, 597 aa, Arabidopsis thaliana
  Clone ID: AT_K1F13.C1.p23.tg
MASEKSTSKGQAWFCTTGLPSDIEIEVDDMTFHLHKFPLMSKSRKLHRLITEQETKNGYPHIKLEDFPGSSESFEMVAKFCYGVKMDLSASTVVPLRCAAEHLEMTEEYSPDNLISKTERFLSHSVYKSLRESIKALKACESVSPLAGSLGITEQCIDSIVSRASSADPSLFGWPVNDGGGRGNISATDLQLIPGGAAKSRKKPSRDSNMELWFEDLTQLSLPIFKTVILSMRSGDLSSDIIESCLICYAKKHIPGILRSNRKPPSSSSTAVSENEQRELLETITSNLPLDKSSISSTTRFLFGLLRTAIILNAAEICRDLLERKIGSQLERATLDDLLVPSYSYLNETLYDVDLVERILGHFLDTLEQSNTAIVEVDGKSPSLMLVGKLIDGFLAEIASDANLKSDKFYNLAISLPDQARLYDDGLYRAVDVYLKAHPWVSEAEREKICGVMDCQKLTLEACTHAAQNERLPLRAVVQVLFFEQLQLRHAIAGTLLAAQSPSKRQVDAGKWKKTVRENQVLRLDMDTMRTRVHRLERECSNMKKVIAKIDKEGSSPATTTDRPRSWSITKKFGCKFKTQVCDSHEATMVDHRSRRS

SEQ ID NO: 236 - protein, 481 aa, Arabidopsis thaliana
  Clone ID: AT_F21P24.C1.p11.tg
MKFMKLGTKPDSFLSKGDNVRYVTNELETEIIIIIGNVKFYLHKFPLLSKSGFLQKHIATSKNEEEKKNQIDEIDISEIPGGSVAFEICVKFCYGITVTLNAYNVVAVRCAAEFLEMNETFEKSNLVYKIDVFLNSTIFRSWKDSIIVLQTTKDLLSDDSEELVKRCLGSIASTASIDTSKVKWSYTYNRKKKLEKVRKPEDGVPKDWWVEDLCELHIDLYKQAIKAIKNRGKVPSNVIGEALHAYAIRRIAGFSKESMQLIDRSLINTIIELLPDEKGNISSSFLTKLHRASIFLGCEETVKEKLKKRVSEQLEETTVNDILMYDLDMVQSLVKEFMNRDPKTHSKVSVAKLIDGYLAEKSRDPNLPLQNFLSLAETLSSFPRHSHDVLYRAIDMFLKEHSGISKSEKKRVCGLMDCRKLSAEACEHAVQNERLPMRVIVQVLFFEQIRANGSSTGYSTPELTTTTLNTEDDEWDHEKEF

SEQ ID NO: 237 - protein, 661 aa, Arabidopsis thaliana
  Clone ID: AT_F28D10.C1.p10.tg
MSPVAKVSEFHREGNDWYKPLSLSHYLHLRDLKVCSFIQFFTCQVISKILLKETGIGIFRFCKTGLSSDITVVVDDVKFHLHKFPLVSKCGKLARMYEDSKSTDKQSLWTTVLEEFPGGADNFLIVARFCYGARVDITSKNLVSIHCAAEYLEMTNEYGEDNLISQVETFLHKHVLRNWKDCILALQSSSPVLKSAEKLQMIPKLMNAVSTMVCTDPSLFGWPMMMYGTLQSPGGSILWNGINTGARMRSSGSDWWYEDISYLSVDLFKRLIKTMETKGIRAESLAGAMMYYARKYLPGLGRWQSGTSDSSKSRRRVVSFNLAKASSPSSMPPLDQIALLETILSLLPEKRGRSFCKFLLGLLRVAFILGVDGNCVKKLEKRIGMQLELATLDNLLILNYSDSETLYNVDCVERIVRHFWRLVDSYMAEVASDVNLKPDKMRSLAAALPESSRPLYDGLYRAFDIYFKEHPWLSDRDKEQLCNIMDYQRLSIDACAHASHNDRLPLRVVLQVLFFEQMHLRTALAGGLNVANTETAHAVTIPGGRTGQEIVQRDGWVTVVRQNQVLKVDMQKMRSRVGELEEEFQSIKQEMKKRVSKSSSSMSSPRLVKLGCKFLLPRASDAKNDTVQNSVSSTPRSATADHTLPRSSRHSKHRKSFSFFG

SEQ ID NO: 238 - protein, 849 aa, Arabidopsis thaliana
  Clone ID: AT_F19P19.C1.p16.tg
MASSKGGNTTAHINTLHHRLYHALNLGFRVCDEKEKKWKCTDIEIQRHVVKSISAFLDCFSRATANNRLIKDSISDIAGALVFILGSKNRAVVGLAANVVIRLIRIVPPSILHSYSLDLVESLSPLLCCQQFDVSLPCAVALNAILVNVRETKEKEVWKILEDEKTVVSVVGNLQIFSEGSMSVEWFQEMALLLSTIMLKWPQSRYSVWNNPALMGVLESVSQKPDMGLTVATLKLYSSLALCGHGANELLDNGKPMLDMMISCMEESSSQNARIEGLKLAQRLAATVRTMGKWFLSSGKLELDQMSLLVEACKLALITRWEGQHHIYFWKYRISEALLSLVVENFHSQSLDGYVSLEEEVLVAEKRVSIKSSANDDMFSLQIHIIEGPSYPVIYPRRRCWYQRNWENIGASSFAPSSQSITEKRICCWVCTEDWDNKDAFLLYALLALAELVNHSFFGQNHAEELSMKSGNLKDRLCTTLKEIRDGTYGSGPRWYAAHILSYFGYYGFEHKLGKRLMCAYEDEEYSDMRLLFASGNSASVNKVIIAVRCPMLLPPKEGAHSSSTISTEKSQRTVQEIRMSANVDILALVKLLEFAYSGYVEVESTTLKKLKPLAKHCKAKVLLQMLCRRRPKWGSSIPEIDIPLALTPKLIHFSDVILVPKETNVACFNCRMCSLTSPHAHSHRVILSSGCEYLRALFRSGMQESHLDRLNVPVSWLGLTKLVSWFYSDELPKPPSGCKWNNMDTEAKLDELQAYVEIYSLSEWWIMEELQNDCAHVILSCLESARELSIKTIELAASFSMWKLVEAAANHAAPIYHQLRDSGELDELDDELVNLIRTAAVQFSQQGG

SEQ ID NO: 239 - protein, 665 aa, Arabidopsis thaliana
  Clone ID: AT_F26G16.C1.p7.tg
MACMKLGSKSDAFQRQGQAWFCTTGLPSDIVVEVGEMSFHLHKFPLLSRSGVMERRIAEASKEGDDKCLIEISDLPGGDKTFELVAKFCYGVKLELTASNVVYLRCAAEHLEMTEEHGEGNLISQTETFFNQVVLKSWKDSIKALHSCDEVLEYADELNITKKCIESLAMRASTDPNLFGWPVVEHGGPMQSPGGSVLWNGISTGARPKHTSSDWWYEDASMLSFPLFKRLITVMESRGIREDIIAGSLTYYTRKHLPGLKRRRGGPESSGRFSTPLGSGNVLSEEEQKNLLEEIQELLRMQKGLVPTKFFVDMLRIAKILKASPDCIANLEKRIGMQLDQAALEDLVMPSFSHTMETLYDVDSVQRILDHFLGTDQIMPGGVGSPCSSVDDGNLIGSPQSITPMTAVAKLIDGYLAEVAPDVNLKLPKFQALAASIPEYARLLDDGLYRAIDIYLKHHPWLAETERENLCRLLDCQKLSLEACTHAAQNERLPLRIIVQVLFFEQLQLRTSVAGCFLVSDNLDGGSRQLRSGGYVGGPNEGGGGGGGWATAVRENQVLKVGMDSMRMRVCELEKECSNMRQEIEKLGKTTKGGGSASNGVGSKTWENVSKKLGFGFKLKSHQMCSAQEGSVSKSNNENVKIEKLKDVKERRGKHKKASSISSER

SEQ ID NO: 240 - protein, 567 aa, Arabidopsis thaliana
  Clone ID: AT_F18B3.C1.p120.tg
MVKKNKTLIFFNSLPSDIEIEVDDITFHLHKFPLMSKSKKLHQLITEQEQSKVYSHIKLENFPGGSEIFEMVIKISYGFKVDISVSTAVPLRCAAEYLEMTEEYSPENLISKTEKFLSEFVFTNVQESIKALKACESVSSLAESLCITEQCIDSIVFQASSTDPSSFYGWPINNGGIFTVDRKKQSKDSKTELWFEDLTELSFPIFRRVILSMKSSVLSPEIVERSLLTYAKKHIPGISRSSSASSSSSSSSTTIASENQQRELLETITSDLPLTATTTRSLFGLLRAAIILNASENCRKFLEKKIGSNLEKATLDDLLIPSYSYLNETLYDIDLVERLLRRFLENVAVSSSSLTVVGRLIDGVLGEIASDANLKPEQFYNLAVLLPVQARVYDDGLYRAVDIYFKTHSWILEEEKEKICSVMDCRKLTVEGCTHAAQNERLPLRAVVQVLFLEQLQLRQVITGTLLTEEDGDKTVVDLGRWKEAVKENQVLRLDMDTMRTRVNQLEKECLYLKKVIAKIDKESLLKAKHGAGKWSIGKKFGCKFSAQVCDSQEATMVDRRSRRFLS

SEQ ID NO: 241 - protein, 612 aa, Arabidopsis thaliana
  Clone ID: AT_F17O14.C1.p4.tg
MQSRIDFLLIRCIKDSFLPYINCSIFSDVAGDITIVVDGESFLLHKFPLVARCGKIRKMVAEMKESSSNLSHTELRDFPGGSKTFELAMKFCYGINFEITISNVVAIRCAAGYLEMTEDFKEENLIARTETYLEQVAFRSLEKSVEVLCSCETLYPQDIAETAHIPDRCVEAIAVNACREQLVLGLSRLNRGTESGELKRGDSPEWWIEDLSALRIDYYARVVSAMARTGLRSESIITSLMHYAQESLKGIRNCKERTKLDSGTFENEQRNVLEAIVSLFPNDNVPLSFLFGMLRVGITINVAISCRLELERRIAQQLETVSLDDLLIPVVRDGDSMYDVDTVHRILVCFLKKIEEEEEYDEDCCYENETENLTGSMCHSSLLKVGRIMDAYLAEIAPDPCLSLHKFMALIEILPDYARVMDDGLYRAIDMFLKGHPSLNEQECKSLCKFIDTQKLSQEACNHVAQNDRLPMQMVVRVLYSEQLRMKNVMSGESGEGLLLSSQKHSSENPSRAVSPRDTYASLRRENRELKLEISRVRVRLTELEKEQILMKQGMMEKSGHGGTLLTSLSKGIGRISIFGGGPTEGKLRNANRKSKSRLERKTVRSRPESMF

SEQ ID NO: 242 - protein, 925 aa, Arabidopsis thaliana
  Clone ID: AT_mqj2.C1.p140.tg
MRNLKLFERFKSTQVHAFTTQDSPSTSSNGSPRMMKFLGHPKSKSRSLLPHGFPTTDLLEPPLDSYLKPIDLVESLSNLYRRIESSSESEASMLYLEQYAVLRSLGDAKLLRRCLLNARRHAIDVPCKVVFSAWLRFFRREHELVGVESMDCNGLASECPKTSLTHGCDLNVDDEGCECSTVCEDEFGSDDVKISKADEFSGLDEVSDISFCVGSEKAKCVRSRIAALSRPFEAMLYGSFVESTTSEIDFSENGISIEAMLALNIYSRIKRVDLFRVETVFELLQLASKFCCDDLKSECEARLAASVTDLDKALTFVEYALEERTTLLLSACLQVFLRELPQSLHNPKVMRFFCSSEAKEQLAFLGSECVFLLYYFLSQVGMEEKLTTDTMLILLERTREFARTNWQKALSLHQMGCVLFERKDYKAAQFHFRLASSLGHVYSLAGVSRTEYKQGKRYSAYRLMNFLISNHKPHGWMYQERSLYNVGVEKLKDLATATELDPTLSFPYKYRAVMKFEQKQIKEAFQEIDRLIQFKLSPECLELRAWLYLATGDRESCLRDLRAVLSLEPNYVVFGGKMRDDLVEALTAQCIEVESEADCWVRLFDRWSAVDDVASLAVVHQMLQNDPSKNFLRFRQSLLLLRLNCQGAAMRCLRMAWNLATSEAERLVYEGWLLYDMGYVEETLTKAEEAISIQRSFEAFFLKAYALADKNLDADEISCVVQVLEEALKCPSDGLRKGQALNNLGSIYINLGMLDQAETAYKNAIEIKHIRARQGLARVYFLKNQRKEACEEMTKLIEKSCSKAAAYEKRSEYCEREKAKEDLDMATTLDPLRTYPYRYRAAVLMDDQRETEAVEELSKAIAFRPELQTLHLRAAFHEATGNLSLATQDCEAALCLDPNHTETLHLYSRSKDQASSIDNTIFGLD

SEQ ID NO: 243 - protein, 614 aa, Arabidopsis thaliana
  Clone ID: AT_K24G6.C1.p13.tg
MDKHHHQHLLLQHHQHLHHHQKLSLAKSSRQSCSEWIFRDVPSDITIEVNGGNFALHKFPLVSRSGRIRRIVAEHRDSDISKVELLNLPGGAETFELAAKFCYGINFEITSSNVAQLFCVSDYLEMTEEYSKDNLASRTEEYLESIVCKNLEMCVQVLKQSEILLPLADELNIIGRCIDAIASKACAEQIASSFSRLEYSSSGRLHMSRQVKSSGDGGDWWIEDLSVLRIDLYQRVMNAMKCRGVRPESIGASLVSYAERELTKRSEHEQTIVETIVTLLPVENLVVPISFLFGLLRRAVILDTSVSCRLDLERRLGSQLDMATLDDLLIPSFRHAGDTLFDIDTVHRILVNFSQQGGDDSEDEESVFECDSPHSPSQTAMFKVAKLVDSYLAEIAPDANLDLSKFLLIAEALPPHARTLHDGLYRAIDLYLKAHQGLSDSDKKKLSKLIDFQKLSQEAGAHAAQNERLPLQSIVQVLYFEQLKLRSSLCSSYSDEEPKPKQQQQQSWRINSGALSATMSPKDNYASLRRENRELKLELARLRMRLNDLEKEHICMKRDMQRSHSRKFMSSFSKKMGKLSFFGHSSSRGSSSPSKQSFRTDSKVLMERTCASTD

SEQ ID NO: 244 - protein, 579 aa, Arabidopsis thaliana
  Clone ID: AT_K8K14.C1.p18.tg
MKFMKLGSKPDSFQSDEDCVRYVATELATDVVVIVGDVKFHLHKFPLLSKSARLQKLIATTTTDEQSDDDEIRIPDIPGGPPAFEICAKFCYGMAVTLNAYNVVAVRCAAEYLEMYESIENGNLVYKMEVFLNSSVLRSWKDSIIVLQTTRSFYPWSEDVKLDVRCLESIALKAAMDPARVDWSYTYNRRKLLPPEMNNNSVPRDWWVEDLAELSIDLFKRVVSTIRRKGGVLPEVIGEALEVYAAKRIPGFMIQNDDNDDEEDVMEQRSLLETLVSMLPSEKQSVSCGFLIKLLKSSVSFECGEEERKELSRRIGEKLEEANVGDLLIRAPEGGETVYDIDIVETLIDEFVTQTEKRDELDCSDDINDSSKANVAKLIDGYLAEISRIETNLSTTKFITIAEKVSTFPRQSHDGVYRAIDMFLKQHPGITKSEKKSSSKLMDCRKLSPEACAHAVQNERLPLRVVVQILFFEQVRATTKPSLPPSGSHGSSRTTTEEECESVTATEETTTTTRDKTSSSEKTKAKGVVMSRIFSKLWTGKDKDGVGDVSSSDTSESPGSVTTVGDKSTPSTRRRRSSS

SEQ ID NO: 245 - protein, 592 aa, Arabidopsis thaliana
  Clone ID: AT_F15A17.C1.p280.tg
MAFMRLGSKSEAFHREGQTWLCTTGLVSDVTIEVGDMKFHLHKFPLLSRSGLLERLIEESSTDDGSGCVLSLDEIPGGGKTFELVTKFCYGVKIELTAFNVVSLRCAAEYLEMTDNYGEGNLVGMTETFLNEVFGNWTDSIKALQTCEEVIDYAEDLHIISRCVDSLAVKACADPSLFNWPVGGGKNATSGQNTEDESHLWNGISASGKMLQHTGEDWWFDDASFLSLPLFKRLITAIEARGMKLENIAMAVMYYTRKHVPLMNRQVNMDEQVIETPNPSEEDQKTCLEEIVGLLPSKKGVNPTKFLLRLLQTAMVLHASQSSRENLERRIGNQLDQAALVDLLIPNMGYSETLYDVECVLRMIEQFVSSTEQAGIVPSPCIIEEGHLVKDGADLLTPTTLVATLVDGYLAEVAPDVNLKLAKFEAIAAAIPDYARPLDDGVYHAIDVYLKAHPWITDSEREHICRLMNCQKLSLEASTHAAQNERLPLRVIVQVLFFEQLRLRTSVSGWFFVSENLDNPDNQHGANGGLLKPRGENVRERVSELEKECMNMKQELHKLVRTKRSWKNFTRKLNFKKKSECCKPKDQATPAI

SEQ ID NO: 246 - protein, 888 aa, Arabidopsis thaliana
  Clone ID: AT_T10P11.C1.p24.tg
MRTFYPSDSCKESQLDSLNPQSWLQVERGKLSSSASSSAPLCRESFIKVPEPQILPHYKPLDYVEVLAQIHEELDTCPLQERSILYLLQYQVFRGLGETKLRRRSLQSAWQEATTVHEKVVFGSWLRYEKQGEEVITDLLSSCGKYSEEFVPLDIASYFPATTASSPEAASVKTNRSVSKNVVFKIGEEKIACQRRKIASLSAPFHAMLYGNFTESLLDEIDMSENHVSSSAMRVVRDFSVVGVLIGVSKNLLLEVLVFANKFCCERLKDACDRELASLISSMECAIELMDFALEENSPILASSCLQVFLYEMPDSLNDERVVEVLTRVNRSQVSTMAGKAPFSLYSCLSEVSMCIDPRSDRTLGFLEKLVDFAENDRQQVLGFHRLGCMRLLRKEYREAEEAFETAFNLGHVYSATGLARLGYIQGHRLWAYEKLSSVISSVSPPLGWMYQERSFYCEGDKKLEDLEKATELDPTLTYPYMYRAVTRMSKQNAKAALEEINRILGFKLALECLEIRFCLYLGMDDYEAALRDIQAALTLCPDYRMFDGKVAGRQLQTLVYEHVENWTTADCWMQLYEKWSNVDDIGSLSVIYQMLESDACKGVLYFRQSLLLLRLNCPEAAMRSLQLAREHASSDHERLVYEGWILYDTGHCEEGLQKAKESIGIKRSFEAYFLQAYALAESSLDPSSSSTVVSLLEDALKCPSDRLRKGQALNNLGSVYVDCEKLDLAADCYINALKVRHTRAHQGLARVHFLRNDKAAAYEEMTRLIEKAQNNASAYEKRSEYCDRELAKSDLEMVTRLDPLRVYPYRYRAAVLMDSRKEREAITELSRAIAFKADLHLLHLRAAFHEHIGDVTSALRDCRAALSVDPNHQEMLELHSRVNSHEP

SEQ ID NO: 247 - protein, 87 aa, Arabidopsis thaliana
  Clone ID: AT_MOD1.C1.p18.tg
MASQTNKELFVGGLARILKEQRQVDVRLKAGDSDQKGVSISAHKLVLSARSEVFKMILETEEIKATTTLDTITLSELKHTELVALVE

SEQ ID NO: 248 - protein, 588 aa, Arabidopsis thaliana
  Clone ID: AT_F20C19.C1.p23.tg
MKFMELGFRPDTFYTVESVRSVSSDLLNDLVIQVKSTKYLLHKFPMLSKCLRLKNLVSSQETETSQEQQVIQLVDFPGETEAFELCAKFCYGITITLCAHNVVAVRCAAEYLGMTEEVELGETENLVQRLELFLTTCVFKSWRDSYVTLQTTKVLPLWSEDLGITNRCIEAIANGVTVSPGEDFSTQLETGLLRNRSRIRRDEILCNGGGGSKAESLRWWGEDLAELGLDLYRRTMVAIKSSHRKISPRLIGNALRIYASKWLPSIQESSADSNLVLESVISLLPEEKSSVPCSFLLQLLKMANVMNVSHSSKMELAIKAGNQLDKATVSELLIPLSDKSGMLYDVDVVKMMVKQFLSHISPEIRPTRTRTEHRRSRSEENINLEEIQEVRGSLSTSSSPPPLLSKVAKLVDSYLQEIARDVNLTVSKFVELAETIPDTSRICHDDLYNAIDVYLQVHKKIEKCERKRLCRILDCKKLSVEASKKAAQNELLPLRVIVQILFVEQARATLATTRNNITTNETAVLKRSFTTRREEGGQEEEERDETKPSGGFLQSTPSRFMALCAIPRQPKKLLCKLLSISRSLSQRI

SEQ ID NO: 249 - protein, 192 aa, Arabidopsis thaliana
  Clone ID: AT_T24H24.C1.p21.tg
MGTQTNKGFFYDEFLKVLKEQQVDVRLMARDSEKDAAISAHKRILSARSEVFEEMFESDKYKASSKLETITLSEMKHEVLEAFVDFTYSDGSMLSEKAKQHAMSLYSAAKDYEIPRLWCLCRKELIASLNMSNALRVLQLAQIPYDESLSVAAFTTIKNSKLKLSSSTKVKVFVVNHPNGPLEITRAIFPRN

SEQ ID NO: 250 - protein, 329 aa, Arabidopsis thaliana
  Clone ID: AT_F20N2.C1.p5.tg
MTDSAYRVDTISRLAQWRIHNLSSSTYRKSDPFKMGLWNWHLSVEKSKMLLNVKLYPEVSNLTRENPPVASFALRVVSSTGERKALSHPEVIDKRIKTNEDFIWTIEVPLTGKIIIDVEFLDLKVLSQDSGELYSIWANGSTENQSQVTAVTSLGRMLTESIYTDITINASDGSIGAHRAVLAARSPVFRSMFLHDLKEKELSEINVLDMPLDACQAFLSYIYGNIQNEDFLIHRLALLQAAEKYDIADLKEACHLSLLDDIDTKNVLERLQNAYLYQLPELKASCMRYLVKFGKIFEIRDEFNIFMQCADRDLISEIFHEVLSTWKGF

SEQ ID NO: 251 - protein, 411 aa, Arabidopsis thaliana
  Clone ID: AT_F23N14.C1.p80.tg
MTRTSGSSSPNTIPDQIESPTSSRSVTQTTNGSHQFVIQGYSLAKGIGVGKHIASDNFSVGGYQWTIFVYPDGKNPEDNSSYVSVFIVLASECTEVRALFELSLVDQSGKGKHKVHSHFNRSLDGGPYTLKYRGSMWGYKRFFRRSLLETSDYLKDDCLKINCTVGVVVSEMHCPRLLSIHVPDSELGSHFGKLLDTLQGSDVTFDVAGEKFQAHKLVLAARSQFFRSMFYNTLAENNSDVVISDLEPKVFKALLHFMYKDSLPGDVEPLTAHSFDLLRPSEIDDTLIVKLLAAAEMYNLSRLRLLCESHICKGISISSVSKILALSDKYNASELKSVSLKFTAENLAAVLQTKAYEDLKDDCPNLQSELLKAVAGYDDTSSSGGGKSQSVWAQLSNGGETSSRRVRQRTT

SEQ ID NO: 252 - protein, 282 aa, Arabidopsis thaliana
  Clone ID: AT_F18O21.C1.p190.tg
MDCSICTTMPSILRPPRNTICGSCYEGARTTIALLKKLEGSKEDRHDKSNHNSTINNGSSISSSPLFSCEPQPLEKVIKWMKNMKETEEEQKKRIVFLSSFVSGFKEQLHADILLKPGDDGPPIPAHRALLASKSEIFKNILDSDGCKTAPEYAITLQELNSEQLQALLEFLYTGTLASDKLEKNVYALFIAADKYMIHYLQELCEQYMLSSLDISSVLNVLDVSDLGSSKTLKEACVGFVVRNMDDVVFSDKYEPFSQKNQHLCVEITRAFLMETRSKRRD

SEQ ID NO: 253 - protein, 546 aa, Arabidopsis thaliana
  Clone ID: AT_T3F17.C1.p9.tg
MDSNFSRHGSSSEGDFGFAFNDSNFSDRLLRIEILGGPSDSRSDAEGCTSIADWARHRKRRREDNKKDNGVAISDIVACAEEQILTDNNQPDMDDAPGGDNLDDEGEAMVEEALSGDDDASSEPNWGIDCSTVVRVKELHISSPILAAKSPFFYKLFSNGMRESEQRHVTLRISAQEEGALMELLNFMYSNSLSVTTAPALLDVLMAADKFEVASCMRYCSRLLRNMPMTPDSALLYLELPSSVLMAEAVQPLTDAAKQFLASRYKDITKFHDEVMALPLAGIEAILSSDDLQIASEDAVYDFVLKWARGQYSSLEDRREILGSRLALYIRFPYMTCRKLKKVLTCSDFEHEVASKQVLEALFFKAEAPHRQRILAAEGSDSMNRRFIERAYKYRPVKVVEFELPRPQCVVYLDLKREECAGLFPSGRVYSQAFHLGGQGFFLSAHCNMDQQSSFHCFGLFLGMQEKGAVSFGVDYEFAARDKSTKEEYVSKYKGNYTFTGGKAVGYRNLFGIPWTSFIAEDSQHFINGILHLRAELTIKRSSDLH

SEQ ID NO: 254 - protein, 553 aa, Arabidopsis thaliana
  Clone ID: AT_F22D1.C1.p170.tg
MSESVIQGSNPDRVLSPTSSKSVTQTVNGSHQFVIQGYSLAKGMGIGKHIASDNFSVGGYQWGIFFYPDGKNPEDNSSYVSVFIALASEGTEVRALFELALVDQSGKGKHKVHSHFERSLDGGPYTLKYRGSMCFSIDESWAYLEVTAIADRGYKRFFRRSILETSDYLKDDCLIINCTVGVVVSEILCPQLHSVHVPDSELGSHFGVLLDSMEGSDITFNIAGEKFLAHKLVLAARSPFFKSKFFSEFEANNTEVTINDLEPKVFKALLQFMYKDSLPEDVEPATAHTFERLKLSEIYETLIVKVLAAADKYDLIRLRLLCESHICKGVSVKSVAKILALADRYNAKELKGVCLKFTAENLAAVLETDAYQQMKDECVTLQSELLKAVAGHEEADMLDNEPPRASKYASFPQVNSSHREVQQPPAIIEEVGWLFTGGVGSLSNVGQFSLRQRWLRSTVWLAPLVCGMFSAFYAMVSAFVSGHSTVIFPVVLASYVPVLDPFRLLYTGEKSEESMSIVIGCDSFFTGIGARTTKEEVGSLLGFSSHTYRSFSY

SEQ ID NO: 255 - protein, 526 aa, Arabidopsis thaliana
  Clone ID: AT_F3A4.C1.p50.tg
MLEKLSFLLHKFPLVSKCGFIKKLASESSNDSNIIRIPDFPGGAEGFELVIKFCYDISFEINTENIAMLLCAAEYLEMTEEHSVENLVETIEVYLNEVILKSLSKSVKVLQKSQDLLPIAERVRLVDRCIDSIAYAICQESQSNEDIVDWWADDLAVLKIDMFRRVLVAMIARGFKRYSLGPVLKLYAEKALRGLVRFLNFLTEQCDIFGKEAKKMEAEQEHEKRLILETIVSLLPRERNSVSVSFLSILLRAAIYLETTVACRLDLEKRMGLQLRQAVIDDLLIPYYSFNGDNTMLDVDTVQRILMNYLEFEVEGNSADFASDIGELMETYLAEIASDRNINFAKFIGFAECIPKQSRMYRAIDIFLKTHPNISEVEKKKVCSLMDCKKLSRDVYAHAAQNDRFQENLSNSDSPAPATAEKTLSPPELSSYKNELSKLNRENQYLKLELLKVKMKFKELEKEKAFEVMSGSDCSSSVSTASVAKPRLPRKSFINSVSQKLGKLINPFGLKQGQTKQPKSRRHSIS

SEQ ID NO: 256 - protein, 322 aa, Arabidopsis thaliana
  Clone ID: AT_F3F20.C1.p14.tg
MSSSTKNIPKPPPLPCITYQRFQSSTRKPSSLMRLVPKEALETWDKLFKEGSGADTYVETDNKSHFPAHSSVLAAASPVIATLLNQSRDKNGNTYLKIHGVPCEAVYMFIRFLYSSCYEEEEMKKFVLHLLVLSHCYSVPSLKRLCVEILDQGWINKENVIDVLQLARNCDVTRICFVCLSMVIKDFKSVSSTEGWKVMKRSNPLLEQELIEAVIESDSRKQERRRKLEEREVYLQLYEAMEALVHICREGCGTIGPRDKALKGSHTVCKFPACKGLEGALRHFLGCKSRASCSHCKRMWQLLQLHSCICDDSNSCKVSLCW

SEQ ID NO: 257 - protein, 408 aa, Arabidopsis thaliana
  Clone ID: AT_T5I7.C1.p6.tg
MSTVGGIEQLIPDSVSTSFIETVNGSHQFTIQGYSLAKGMSPGKFIQSDIFSVGGYDWAIYFYPDGKNPEDQSSYISLFIALASDSNDIRALFELTLMDQSGKGKHKVHSHFDRALEGGPYTLKYKGSMWGYKRFFKRSALETSDYLKDDCLVINCTVGVVRARLEGPKQYGIVLPLSNMGQGLKDLLDSEVGCDIAFQVGDETYKAHKLILAARSPVFRAQFFGPIGNNNVDRIVIDDIEPSIFKAMLSFIYTDVLPNVHEITGSTSASSFTNMIQHLLAAADLYDLARLKILCEVLLCEKLDVDNVATTLALAEQHQFLQLKAFCLEFVASPANLGAVMKSEGFKHLKQSCPTLLSELLNTVAAADKSSTSGQSNKKRSASSVLGCDTTNVRQLRRRTRKEVRAVS

SEQ ID NO: 258 - protein, 365 aa, Arabidopsis thaliana
  Clone ID: AT_F19F18.C1.p100.tg
MDDFSPENVLAPPPPPPPMKKSTDLFMQRSNSFVSKATRDSWDRMFDEAHGADVLIHTDDNGLIYAHSNVIGMASDVIRGMMKQHKRKSHRKSISILGVPHHALRVFIRFLYSSCYEKQDMEDFAIHLLVLSHVYVVPHLKRVCESEFESSLLNKENVIDVFQLALLCDAPRLGLLCHRMILNNFEEVSTSEGWQAMKESHPRLQKELLRSVAYELNSLKQRNRKQKEIQTYTQLYEAMEAFVHICRDGCREIGPTKTETPHMSCGFQACNGLEQLLKHLAGCKLRSIPGGCSRCKRMWQLLELHSRICVDSEQCKVPLCSSLKERMKTQSRKDEKRWKLLVRNVLSTKRIGGSPFFLQAIDVTL

SEQ ID NO: 259 - protein, 706 aa, Arabidopsis thaliana
  Clone ID: AT_T19L5.C1.p20.tg
MENHPKRQRTTRLAARNLKRKLSHNTDGAPIVTQLIDIDDEPIDLVVAIRRHVEVLNSSFSDPDFDHEAVKEAAADIADLAKIDENVEIIVENGAIPALVRYLESPLVVCGNVPKSCEHKLEKDCALALGLIAAIQPGYQQLIVDAGAIVPTVKLLKRRGECGECMFANAVIRRAADIITNIAHDNPRIKTNIRVEGGIAPLVELLNFPDVKVQRAAAGALRTVSFRNDENKSQLNALPTLVLMLQSQDSTVHGEAIGAIGNLVHSSPDIKKEVIRAGALQPVIGLLSSTCLETQREAALLIGQFAAPDSDCKVHIAQRGAITPLIKMLESSDEQVVEMSAFALGRLAQDAHNQAGIAHRGGIISLLNLLDVKTGSVQHNAAFALYGLADNEENVADFIKAGGIQKLQDDNFTVQPTRDCVVRTLKRLQNKIHGPVLNQLLYLMRTAEKTVQIRIALALAHLCDPKDGKLIFIDNNGVEFLLELLYFSSNKQQRYSSSALYELAKKATSFAPEDSAPCSPTQQVFLGEKFVNNPTMSDVTFLIDGKQFYAHKIGLVASSDIFRAMFDGLYKERNAQNVEIPNIRWEVFELMMKFIYSGRINIAKHLAKDLLVAADQYLLEGLKRQCEYTIAQEICLDNIPEMYELADTFNASALRRACTLFVLEHFTKLSSQLWFAKFVKQIIPEIRSYMTDILTRPVEASPPTVV

SEQ ID NO: 260 - protein, 636 aa, Arabidopsis thaliana
  Clone ID: AT_F7K24.C1.p80.tg
MDQQPERREGRSFPERKGQKRKLEEGAAAVEDREISAVSTDGGQALLSEVAAQVSVLNSAFSWQESDRAAAKRATQVLAELAKNAEDLVNVIVDGGAVPALMTHLQAPPYNDGDLAEKPYEHEVEKGSAFALGLLAIKPEYQKLIVDKGALPHLVNLLKRNKDGSSSRAVNSVIRRAADAITNLAHENSSIKTRVRVEGGIPPLVELLEFSDSKVQRAAAGALRTLAFKNDDNKNQIVECNALPTLILMLGSEDAAIHYEAVGVIGNLVHSSPHIKKEVLTAGALQPVIGLLSSCCPESQREAALLLGQFASTDSDCKVHIVQRGAVRPLIEMLQSPDVQLKEMSAFALGRLAQDAHNQAGIAHSGGLGPLLKLLDSRNGSLQHNAAFALYGLADNEDNVSDFIRVGGIQKLQDGEFIVQVLRHLLYLMRISEKSIQRRVALALAHLWLELLLGLLGSLNTKQQLDGAAALYKLANKSMALSPVDAAPPSPTQRVYLGEQYVNNATLSDVTFLVEDAFRAMFDGGYREKDARDIEIPNIKWEVFELMMRFIYTGSVDITNEISKDLLRAADQYLLEGLKRLCEYTIAQYLTKSDTVTLNMKGYYVGKYRRHVRAIRSIPCDVAEASLYHVHPGAFR

SEQ ID NO: 261 - protein, 527 aa, Arabidopsis thaliana
  Clone ID: AT_F2N1.C1.p11.tg
MDLSLSGGDFRFAFNNVNFSDRLLRIEITQSSGEGEVICSSIVDWARDRKRRREDVTNHTNDATCHVESDLNKNSCEIVNENSNNKTQVLVTAAEQEPKSGGEDENERLTNNNTSVLSVQELHISSAILAAKSPFFYKLFSNGMLESEQKQMTLKIDASEETAVMELLKFMYSNSLSVTASSALLDVLMVADKFEVASCMKYCSQLLLKMPMTLESSLLLLDLPSSLLMADSVKPLTNAARQFIASRYKNMSKITMEELMALPLVGIEAILASDGLEIQSEDVVYEVVLKWVKSHYSVLEARQEVLGSHLARYIRFPHMTTDRLKKILTSNDFRPSVASKLVVEALFFKTESLAHQHVLLAHEQPASTSRRFAKRAYVHRPIKIVEFAVPRPQCIIYLDLKRKECESIYPSSRISSQQFTLGGQGFFLSAQCNMDHLCLIHCFGLFIGMQENGSASASVTVDYDFSVRSKPTMEFVGKFKGIYTFTRGKAVGCRNLLGIPWDIFTAKNCPYFINDVLHLRADLSIRL

SEQ ID NO: 262 - protein, 545 aa, Arabidopsis thaliana
  Clone ID: AT_F2A19.C1.p200.tg
MDPDFTRHGSSSDGDFGFAFNDSNFSDRLLRIEIMGGPSDSRSEVEGCTSIADWARHRKRRREDIKKESGVTISDIVACPEEQILTDEQPDMDGCPGGENPDDEGGEAMVEEALSGDEEETSSEPNWGMDCSTVVRVKELHISSPILAAKSPFFYKLFSNGMRESEQRHVTLRINASEEAALMELLNFMYSNAVSVTTAPALLDVLMAADKFEVASCMRYCSRLLRNMPMTPESALLYLELPSSVLMAKAVQPLTDAAKQFLAARYKDITKFHEEVMSLPLAGIEAILSSDELQIASEDAVYDFILKWARAQYPCLEERREILGSRLALSIRFPFMTCRKLKKVLTCSDFEHEIASKLVLEALFFKAEAPHRQRSLASEESASLNRRLIERAYKYRPVKVVEFELPRPQCVVYLDLKREECGGLFPSGRVYSQAFHLGGQGFFLSAHCNMDQQSSFHCFGLFLGMQEKGSVSFGVDYEFSARSKPAEDFISKYKGNYTFTGGKAVGYRNLFGVPWTSFIAEDSQYFINGILHLRAELTIKRSTDP

SEQ ID NO: 263 - protein, 224 aa, Arabidopsis thaliana
  Clone ID: AT_MJE7.C1.p15.tg
MATPTNKEHFSGGLAKVLAEKWQVDVMLKAKNSDEGSAISAHKLILASRSEVFKNMFELDEFKTSTKHVETITLSEMKHEELEAFVEFICSDGSMLSANVKQHARSLYLAADKYEILHLRDLCRTELISSLSLLNSLDLLVLAQIPFDKVLNDESFSYIKNNISTIASSDEFKLFVAGNPNLAVEIMKVSLITLTLRCSSCGSNHSLQGMYCCNCCRYGTLRLI

SEQ ID NO: 264 - protein, 207 aa, Arabidopsis thaliana
  Clone ID: AT_T1N6.C1.p2.tg
MTEAEQKAAFLGGLVVSFKEQMHTDVLVKPGEEAPPIPTHKAVLAARSKVFRNMLDSDECKTSPEESITLPDLSHDELKSLLEFLYSGNLKAPYNQYRSLYLAADKYDISYLQDVCRNHFIASLSSRNVLDILELASIPCDTILKDAAINHIVKHMEEVVVPMKYETFVQRNPDLSVEITRAYLRETKAKAKDHGAPLNGNTRPRIW

SEQ ID NO: 265 - protein, 372 aa, Arabidopsis thaliana
  Clone ID: AT_K9I9.C1.p4.tg
MVTGCVDLHQSFKSADSSSVPIPPPLPSKSDGLKKKLGHSSVSTATRDMWDRLFNDGYKADVVIYTDNGSIIYAHANILGTASTVIKGMLKQAKRHGKWHTISIRGVPHDAVRVFIRFLYSSCYEKEEMNEFIMHLLLLSHAYVVPQLKRVCEWHLEHGLLTTENVVDVFQLALLCDFPRLSLISHRMIMKHFNELSATEAWTAMKKSHPFLEKEVRDSVIIEANTRKERMRKRNDQRIYSQLYEAMEALVHICRDGCKTIGPHDKDFKPNHATCNYEACKGLESLIRHFAGCKLRVPGGCVHCKRMWQLLELHSRVCAGSDQCRVPLCRNLKEKMEKQSKKDESRWKLLVKNVLGSKKIGGSPFFLPVTNC

SEQ ID NO: 266 - protein, 326 aa, Arabidopsis thaliana
  Clone ID: AT_F8K7.C1.p22.tg
MGDTKVETISRLAQWRIENFGPCSFKKSDPFKVGIWNWHLSIERNRYLSVRLFPELSRVSKEQPPVAKFVLRVSNVGPNRRFYISPVYEKLLRTTDDCVWHVDSSFHGRFTIDVEFLDLKICPVNGGEASPVWPTDATMQSISTQTTLKCLSRMLEESILTDVIIHTADGTLSAHKAILSASSTVFKSMFHHDLMEKESSTIHIDDMSRESCMALLSYLYGNITQEEFWKHRLALLGAANKYDITDLKAACEESLMEDINSSNVLERLQEAWLYQLEKLKKGCLMYLFDFGKIYDVREEISSFFRQADRELMLEMFQEVLSVWKPV

SEQ ID NO: 267 - protein, 406 aa, Arabidopsis thaliana
  Clone ID: AT_F28L1.C1.p13.tg
MDTIRVSKEVPGSSKSTAQSLTESTSRTETINGSHEFKISGYSLVKGMGIGKYVASDTFMVGGYSWAIYFYPDGKSPEDNSVYVSLFIALASEGADVRALFELTLVDQSGNERHKVHSHFGRTLESGPYTLKYRGSMWGYKRFFKRSLLESSDYLKDNGLLVRCCVGVVKSRTEGPRCYNIPVPVSGLGQQFGKLLESGKGADVTFEVDGETFPAHKLVLAARSAVFRAQLFGPLRSENTNCIIIEDVQAPIFKMLLHFIYWDEMPDMQDLIGTDLKWASTLVAQHLLAAADRYALERLRTICESKLCEGISINTVATTLALAEQHHCFQLKAACLKFIALPENLKAVMETDGFDYLKESCPSLLSELLEYVARLSEHSLTSSGHRKELFADGCDLNGRRVKQRLH

SEQ ID NO: 268 - protein, 367 aa, Arabidopsis thaliana
  Clone ID: AT_T29H11.C1.p120.tg
MEAVLVAMSVPATTEDDGFSLITDKLSYNLTPTSDVEIVTSDNRRIPAHSGVLASASPVLMNIMKKPMRRYRGCGSKRVIKILGVPCDAVSVFIKFLYSSRLVCLTEDEMERYGIHLLALSHVYMVTQLKQRCSKGVVQRLTTENVVDVLQLARLCDAPDVCLRSMRLIHSQFKTVEQTEGWKFIQEHDPFLELDILQFIDDAESRKKRRRRHRKEQDLYMQLSEAMECIEHICTQGCTLVGPSNVVDNNKKSMTAEKSEPCKAFSTCYGLQLLIRHFAVCKRRNNDKGCLRCKRMLQLFRLHSLICDQPDSCRVPLCRQFRKRGEQDKKMGEDTKWKLLVTRVVSAKAMTSLCQSKKNKCEQAQGV

SEQ ID NO: 269 - protein, 209 aa, Arabidopsis thaliana
  Clone ID: AT_T2P4.C1.p20.tg
MATQSNKEAFLGGFKKLLNEQWQADVRLKAGDSDETTSIFAHKLVLVARSEVFKKILESDEFKASSKQMETVTLSEMKHEELEAFVEFIYRVDGSICSASLKKHARSLFHAADKYEIPHLRDLCRNELISSLNSSNALSILELAQIPFDKALNDPAFTTIITNISTIASGDEFKLFVANHPNLAVDIMKASITRLSTSRKICGYCNRYY

SEQ ID NO: 270 - protein, 194 aa, Arabidopsis thaliana
  Clone ID: AT_T2P4.C1.p21.tg
MATETNKELFVGGFAKILKEQRQVDVRLKAGDSGDEGASTSAHKLVLSARSEVFKKMLESDEIKASAQLETITLCEMKHEELEAFIEFIYSDGSMLSAKEKQHKMANKIEFIDSFAKYWKEKVGVDVLLKAGDQTDPIPAHKIILAASSEVLKQMIDSTSSASDPITFSEMTHDELYIPLLSSCTKVTFRIQNC

SEQ ID NO: 271 - protein, 185 aa, Arabidopsis thaliana
  Clone ID: AT_T6B20.C1.p13.tg
MATEGKNPINMNSMSSSLARTGQWVFSQDIPTDVVVEVGEANFSLHKFMLVAKSNYIRKLIMESKDSDVTRINLSDIPGGPEIFEKAAKFCYGVNFEITVQNVAALHCAAEFLQMTDKYCDNNLAGRTQDFLSQVALSSLSGAIVVLKSCEILLPISRDLGIVRRCVDVVGAKVLFYSELILTSL

SEQ ID NO: 272 - protein, 586 aa, Arabidopsis thaliana
  Clone ID: AT_T6B20.C1.p5.tg
MVAAKENKFLTVAPFECAWSDDLKFREAGRGCVAFDAFAHNDVTVVFRENVGTQHYHYKKDNSPHYIVIIGSNRNRRLKIQVDGKSVVDEEASDLCRCSLEFQSYWISIYDGLISIGKGRYPFQNLVFKWQDPKPNCNVQYVGLSSWDKHVGYRNVSVFPVTHNHILLWKQVDCREVRGDESGDEKVVEEGTGYDYEQWGLGNFLESWQLSDTVFLVGEEEMDVPAHKVILQASGNFPLRSSDGDVIQLRGVSYPILHALLQYIYTGRTQILESELAPLRDLSSKFEVMSLVRQCEESIDHFKLSKTAFDSCRKVKLLCPISHPLSGFMFPSAFPVDVGKLVKLYSTGEYSDIKIYLSDHSLTFQSHKVILSLWSVAFAKMFTNGMSESHSSTIYLTDVSPEAFKAMMNFMYSGELNMEDTVNFGTELIHLLFLADRFGVVPLHQECCKMLLECLSEDSVCSVLQVVSSISSCKLIEEMCKRKFSMHFDYCTTASLDFVLLDQTTFSDILESADLTVTSEEKILNAVLMWCMKAEESHSWGVIDEMMNYADPKSLFKERLQSLDDLLPHVRFSLLPYELLKRVSGS

SEQ ID NO: 273 - protein, 442 aa, Arabidopsis thaliana
  Clone ID: AT_T16G12.C1.p40.tg
MGTTRVCSEVSSGSSKSLSQSLTVSTSTTETVNGFHEFKICGYSLAKGVGVGKYVASDTFMVGGYSWAIYFYPDGKSPEDNSSYVSLFIALASEGADVRALFELTLVDQSGNGKHKVHSHFGRALDSGPYTLKYRGSMWGYKRFFRRSSLESSDYLKENSLLVRCRVGVVKSVTEGPRYYNIPVPVSNLGQQLGNLLESGKGCDVVFQVDGETFNAHKLVLATRSPVFNAQLFGPLGDRNTKCITIEDMEAPIFKVLPLTLLLIVYSRMYHPGSSPGALLLFSSLLTRDKVLLHFIYWDELPDMQELIGTDSTLASTLVAQHLLAAADRYALERLKAICESKLCEGVAINTVATTLALAEQHHCLQLKAVCLKFVALPENLKAVMQTDGFDYLKESCPSLLTELLQYVARLSEHSVIVSGHRKEIFADGCDASGRRVKPRLH

SEQ ID NO: 274 - protein, 465 aa, Arabidopsis thaliana
  Clone ID: AT_F20H23.C1.p23.tg
MKSVIFTEEKNLQRQNPLQKSEQQRRNFEMPSPPTTTSLSVTQTINGSHSFTIKGYSLAKGIGIGKHIASDTFTVGGYQWAIYFYPDGKNPEDNSAYVSVFIALASDGTDVRALFELSLLDQSGKGKHKVHSHFDRALESGPYTLKYRGSMWGYKRFFRRLMLETSDFLKDDCLKINCTVGVVVSEIDCPRLHSIHVPASDIGSHFGMLLENEDGSDITFNVSGEKFRAHRLVLAARSPVFESEFLDVTGEEDRDIEVTDMEPKVFKALLHYIYKDALIEDAESSSSSGSSVGPSASDTLAAKLLGAADKYKLPRLSLMCESVLCKDISVDSVANILALADRYNASALKSVCLKFAAENLIAVMRSDGFDYLREHCPSLQSELLKTVAGCEEELSGGGGKTRSVWGQFSDGGAETNGRQAQTWGDINGGAERSQSVWVEVVNANGSGRNNNDNNNSDDPMAELED

SEQ ID NO: 275 - protein, 330 aa, Arabidopsis thaliana
  Clone ID: AT_F28J15.C1.p112.tg
MADTSSRTDVSTDGDTDHRDLGSDRGHMHAAASDSSDRSKDKLDQKTLRRLAQNREAARKSRLRKKAYVQQLENSRLKLTQLEQELQRARQQGVFISSSGDQAHSTGGNGALAFDAEHSRWLEEKNRQMNELRSALNAHAGDTELRIIVDGVMAHYEELFRIKSNAAKNDVFHLLSGMWKTPAERCFLWLGGFRSSELLKLLANQLEPMTERQVMGINSLQQTSQQAEDALSQGMESLQQSLADTLSSGTLGSSSSDNVASYMGQMAMAMGQLGTLEGFIRQADNLRLQTLQQMLRVLTTRQSARALLAIHDYSSRLRALSSLWLARPRE

SEQ ID NO: 276 - protein, 300 aa, Arabidopsis thaliana
  Clone ID: AT_MHK10.C1.p10.tg
MTQHWPDFSSQKLSPFSTPTATAVATATTTVQNPSWVDEFLDFSASRRGNHRRSISDSIAFLEAPTVSIEDHQFDRFDDEQFMSMFTDDDNLHSNPSHINNKNNNVGPTGSSSNTSTPSNSFNDDNKELPPSDHNMNNNINNNYNDEVQSQCKMEPEDGTASNNNSGDSSGNRILDPKRVKRILANRQSAQRSRVRKLQYISELELLSPRVAFLDHQRLLLNVDNSALKQRIAALSQDKLFKDAHQEALKREIERLRQVYNQQSLTNVENANHLSATGAGATPAVDIKSSVETEQLLNVS

SEQ ID NO: 277 - protein, 273 aa, Arabidopsis thaliana
  Clone ID: AT_F12A4.C1.p11.tg
MENNISPPNNMHHHSASLDDLFTEDQPAWLDELLSEPASPKINKGHRRSASDTAAYLNSALMPSKENHVAGSSWQFQNYDLWQSNSYEQHNKLGWDFSTANGTNIQRNMSCGALNMSSKPIEKHVSKMKEGTSTKPDGPRSKTDSKRIKHQNAHRARLRRLEYISDLERTIQVLQVEGCEMSSAIHYLDQQLLMLSMENRALKQRMDSLAEIQKLKHVEQQLLEREIGNLQFRRHQQQPQQNQKQVQAIQNRYNKYQPPVTQEPDAQFAALAI

SEQ ID NO: 278 - protein, 836 aa, Arabidopsis thaliana
  Clone ID: AT_F5F19.C1.p21.tg
MAMSCKDGKLGCLDNGKYVRYTPEQVEALERLYHDCPKPSSIRRQQLIRECPILSNIEPKQIKVWFQNRRCREKQRKEASRLQAVNRKLTAMNKLLMEENDRLQKQVSQLVHENSYFRQHTPNPSLPAKDTSCESVVTSGQHQLASQNPQRDASPAGLLSIAEETLAEFLSKATGTAVEWVQMPGMKPGPDSIGIIAISHGCTGVAARACGLVGLEPTRVAEIVKDRPSWFRECRAVEVMNVLPTANGGTVELLYMQLYAPTTLAPPRDFWLLRYTSVLEDGSLVVCERSLKSTQNGPSMPLVQNFVRAEMLSSGYLIRPCDGGGSIIHIVDHMDLEACSVPEVLRPLYESPKVLAQKTTMAALRQLKQIAQEVTQTNSSVNGWGRRPAALRALSQRLSRGFNEAVNGFTDEGWSVIGDSMDDVTITVNSSPDKLMGLNLTFANGFAPVSNVVLCAKASMLLQNVPPAILLRFLREHRSEWADNNIDAYLAAAVKVGPCSARVGGFGGQVILPLAHTIEHEEFMEVIKLEGLGHSPEDAIVPRDIFLLQLCSGMDENAVGTCAELIFAPIDASFADDAPLLPSGFRIIPLDSAKEVSSPNRTLDLASALEIGSAGTKASTDQSGNSTCARSVMTIAFEFGIESHMQEHVASMARQYVRGIISSVQRVALALSPSHISSQVGLRTPLGTPEAQTLARWICQSYRGYMGVELLKSNSDGNESILKNLWHHTDAIICCSMKALPVFTFANQAGLDMLETTLVALQDISLEKIFDDNGRKTLCSEFPQIMQQGFACLQGGICLSSMGRPVSYERAVAWKVLNEEENAHCICFVFINWSFV

SEQ ID NO: 279 - protein, 842 aa, Arabidopsis thaliana
  Clone ID: AT_mup24.C1.p100.tg
MEMAVANHRERSSDSMNRHLDSSGKYVRYTAEQVEALERVYAECPKPSSLRRQQLIRECSILANIEPKQIKVWFQNRRCRDKQRKEASRLQSVNRKLSAMNKLLMEENDRLQKQVSQLVCENGYMKQQLTTVVNDPSCESVVTTPQHSLRDANSPAGLLSIAEETLAEFLSKATGTAVDWVQMPGMKPGPDSVGIFAISQRCNGVAARACGLVSLEPMKIAEILKDRPSWFRDCRSLEVFTMFPAGNGGTIELVYMQTYAPTTLAPARDFWTLRYTTSLDNGSFVVCERSLSGSGAGPNAASASQFVRAEMLSSGYLIRPCDGGGSIIHIVDHLNLEAWSVPDVLRPLYESSKVVAQKMTISALRYIRQLAQESNGEVVYGLGRQPAVLRTFSQRLSRGFNDAVNGFGDDGWSTMHCDGAEDIIVAINSTKHLNNISNSLSFLGGVLCAKASMLLQNVPPAVLIRFLREHRSEWADFNVDAYSAATLKAGSFAYPGMRPTRFTGSQIIMPLGHTIEHEEMLEVVRLEGHSLAQEDAFMSRDVHLLQICTGIDENAVGACSELIFAPINEMFPDDAPLVPSGFRVIPVDAKTGDVQDLLTANHRTLDLTSSLEVGPSPENASGNSFSSSSSRCILTIAFQFPFENNLQENVAGMACQYVRSVISSVQRVAMAISPSGISPSLGSKLSPGSPEAVTLAQWISQSYSHHLGSELLTIDSLGSDDSVLKLLWDHQDAILCCSLKPQPVFMFANQAGLDMLETTLVALQDITLEKIFDESGRKAICSDFAKLMQQGFACLPSGICVSTMGRHVSYEQAVAWKVFAASEENNNNLHCLAFSFVNWSFV

SEQ ID NO: 280 - protein, 342 aa, Arabidopsis thaliana
  Clone ID: AT_MUK11.C1.p16.tg
MSRPAPLPPRCPIPKKLSLSPVADTFYSSSSPIESYIGQYKSSTQDSRLEDQPAWLDELLCDKTDGLLTRGGPLRRSASDSVVLLGDISATFSGFDQSEDEESLSSEACGDLESACVYGPNSPRAKNNSSFSNNPIASAFSDYGSQTPPQNLDDTVKGINRSPVAENACGSMGIPNAKRSRYIGFWFLVGILMTTKLAEICVCVHKSALRMPIRNPGQRSRVRKLQYIAELERTVGMLQTVEADLSVRVASLLQTRATLSLENSQLKQQMAILKQDKLIREGEYQLLKKEAQRLKSGLGYLGSTNNSNRLVRSYSAGSNVAPRTASSHLDWNLLDLTKLNLN

SEQ ID NO: 281 - protein, 295 aa, Arabidopsis thaliana
  Clone ID: AT_F13A11.C1.p5.tg
MAEEFGSIDLLGDEDFFFDFDPSIVIDSLPAEDFLQSSPDSWIGEIENQLMNDENHQEESFVELDQQSVSDFIADLLVDYPTSDSGSVDLAADKVLTVDSPAAADDSGKENSDLVVEKKSNDSGSEIHDDDDEEGDDDAVAKKRRRRVRNRDAAVRSRERKKEYVQDLEKKSKYLERECLRLGRMLECFVAENQSLRYCLQKGNGNNTTMMSKQESAVLLLESLLLGSLLWLLGVNFICLFPYMSHTKCCLLRPEPEKLVLNGLGSSSKPSYTGVSRRCKGSRPRMKYQILTLAA

SEQ ID NO: 282 - protein, 423 aa, Arabidopsis thaliana
  Clone ID: AT_T21E18.C1.p21.tg
MDKEKSPAPPPSGGLPPPSGRYSAFSPNGSSFAMKAESSFPPLTPSGSNSSDANRFSHDISRMPDNPPKNLGHRRAHSEILTLPDDLSFDSDLGVVGAADGPSFSDDTDEDLLYMYLDMEKFNSSATSTSQMGEPSEPTWRNELASTSNLQSTPGSSSERPRIRHQHSQSMDGSTTIKPEMLMSGNEDVSGVDSKKAISAAKLSELALIDPKRAKRIWANRQSAARSKERKMRYIAELERKVQTLQTEATSLSAQLTLLQRDTNGLGVENNELKLRVQTMEQQVHLQDALNDALKEEVQHLKVLTGQGPSNGTSMNYGSFGSNQQFYPNNQSMHTILAAQQLQQLQIQSQKQQQQQQQHQQQQQQQQQQFHFQQQQLYQLQQQQRLQQQEQQSGASELRRPMPSPGQKESVTSPDRETPLTKD

SEQ ID NO: 283 - protein, 278 aa, Arabidopsis thaliana
  Clone ID: AT_M4E13.C1.p100.tg
MEDGELDFSNQEVFSSSEMGELPPSNCSMDSFFDGLLMDTNAACTHTHTCNPTGPENTHTHTCFHVHTKILPDESDEKVSTDDTAESCGKKGEKRPLGNREAVRKYREKKKAKAASLEDEVARLRAVNQQLVKRLQNQATLEAEVSRLKCLLVDLRGRIDGEIGSFPYQKPMAANIPSFSHMMNPCNVQCDDEVYCPQNVFGVNSQEGASINDQGLSGCDFDQLQCMANQNLNGNGNGSFSNVNTSVSNKRKGDTFILYLRVFSVNRSGLEPEVVYSL

SEQ ID NO: 284 - protein, 329 aa, Arabidopsis thaliana
  Clone ID: AT_F9D24.C1.p30.tg
MAQLPPKIPTMTTPNWPDFSSQKLPSIAATAAAAATAGPQQQNPSWMDEFLDFSATRRGTHRRSISDSIAFLEPPSSGVGNHHFDRFDDEQFMSMFNDDVHNNNHNHHHHHSINGNVGPTRSSSNTSTPSDHNSLSDDDNNKEAPPSDHDHHMDNNVANQNNAAGNNYNESDEVQSQCKTEPQDGPSANQNSGGSSGNRIHDPKRVKRILANRQSAQRSRVRKLQYISELERSVTSLQTEVSVLSPRVAFLDHQRLLLNVDNSAIKQRIAALAQDKIFKDAHQEALKREIERLRQVYHQQSLKKMENNVSDQSPADIKPSVEKEQLLNV

SEQ ID NO: 285 - protein, 297 aa, Arabidopsis thaliana
  Clone ID: AT_T8M16.C1.p180.tg
MDSQRGIVEQAKSQSLNRQSSLYSLTLDEVQNHLGSSGKALGSMNLDELLKSVCSVEANQPSSMAVNGGAAAQEGLSRQGSLTLPRDLSKKTVDEVWKDIQQNKNGGSAHERRDKQPTLGEMTLEDLLLKAGVVTETIPGSNHDGPVGGGSAGSGAGLGQNITQVGPWIQYHQLPSMPQPQAFMPYPVSDMQAMVSQSSLMGGLSDTQTPGRKRVASGEVVEKTVERRQKRMIKNRESAARSRARKQAYTHELEIKVSRLEEENERLRKQKEVEKILPSVPPPDPKRQLRRTSSAPF

SEQ ID NO: 286 - protein, 411 aa, Arabidopsis thaliana
  Clone ID: AT_T10P11.C1.p9.tg
MNSIFSIDDFSDPFWETPPIPLNPDSSKPVTADEVSQSQPEWTFEMFLEEISSSAVSSEPLGNNNNAIVGVSSAQSLPSVSGQNDFEDDSRFRDRDSGNLDCAAPMTTKTVIVDSDDYRRVLKNKLETECATVVSLRVGSVKPEDSTSSPETQLQPVQSSPLTQGELGVTSSLPAEVKKTGVSMKQVTSGSSREYSDDEDLDEENETTGSLKPEDVKKSRRMLSNRESARRSRRRKQEQTSDLETQVNDLKGEHSSLLKQLSNMNHKYDEAAVGNRILKADIETLRAKVKMAEETVKRVTGMNPMLLGRSSGHNNNNRMPITGNNRMDSSSIIPAYQPHSNLNHMSNQNIGIPTILPPRLGNNFAAPPSQTSSPLQRIRNGQNHHVTPSANPYGWNTEPQNDSAWPKKCVD

SEQ ID NO: 287 - protein, 433 aa, Arabidopsis thaliana
  Clone ID: AT_MLD14.C1.p1.tg
MGTHINFNNLGGGGHPGGEGSSNQMKPTGSVMPLARQSSVYSLTFDELQNTLGGPGKDFGSMNMDELLKSIWTAEEAQAMAMTSAPAATAVAQPGAGIPPPGGNLQRQGSLTLPRTISQKTVDEVWKCLITKDGNMEGSSGGGGESNVPPGRQQTLGEMTLEEFLFRAGVVREDNCVQQMGQVNGNNNNGFYGNSTAAGGLGFGFGQPNQNSITFNGTNDSMILNQPPGLGLKMGGTMQQQQQQQQLLQQQQQQMQQLNQPHPQQRLPQTIFPKQANVAFSAPVNITNKGFAGAANNSINNNNGLASYGGTGVTVAATSPGTSSAENNSLSPVPYVLNRGRRSNTGLEKVIERRQRRMIKNRESAARSRARKQAYTLELEAEIEKLKKTNQELQKKQAEMVEMQKNEQKAMLEKDINRTMVKDEATRTDEPDS

SEQ ID NO: 288 - protein, 457 aa, Arabidopsis thaliana
  Clone ID: AT_MKP6.C1.p16.tg
MSLQRPNGNSSSSSSHKKHKTEESDEELLMVPDMEAAGSTCVLSSSADDGVNNPELDQTQNGVSTAKRRRGRNPVDKEYRSLKRLLRNRVSAQQARERKKVYVSDLESRANELQNNNDQLEEKISTLTNENTMLRGMLPLLALSAVAEYYRLPWKPPVTASLLAANTLVYLRPAFIDPVIPHISEVWFNPHLIFKHKDLKRLFLSAFYHVNEPHLVYNMMSLLWKGIKLETSMGSSEFASMVFTLIGMSQGVTLLLAKSLLLLFDYDRAYYNEYAVGFSGVLFAMKVVLNSQAEDYSSVYGILVPTKYAAWAELILVQMFVPNASFLGHLGGILAGIIYLKLKGSYSGSDPVTMAVRGVSRLVTWPLRFLNGMVRSRRRRITGRGRVGRGQTGIAGPGIWRCQSCTYDNSGWLSACEMCGSGRARGNGWSLNQGPALSSSNDLPLDELRRRRVERFS

SEQ ID NO: 289 - protein, 206 aa, Arabidopsis thaliana
  Clone ID: AT_mae1.C1.p80.tg
MESSSVHRSHCFDILDGVPLHDDHFNSAFLPNTDFNVHLQSNVSTRINNQSHLDPNAENIFHNEGLAPEERRARRMVSNRESARRSRMRKKKQIEELQQQVEQLMMLNHHLSEKVINLLESNHQILQENSQLKEKVSSFHLLMADVLLPMRNAESNINDRNVNYLRGEPSNRPTNSPFASSTMIDAMYATSDYYSSNYLLAFVCRY

SEQ ID NO: 290 - protein, 370 aa, Arabidopsis thaliana
  Clone ID: AT_MBD2.C1.p11.tg
MDSYWRLKNLVNDLPVSTSLSRQGSIYSWTVDQFQTSLGLDCGSMNMDELVKHISSAEETQEGSQRQGSTTLPPTLSKQNVGEVWKSITEEKHTNNNGGVTNITHLQGQQTLGEITLEEFFIRAGARGGNTNGGSIHDSSSSISGNPHTSLGVQIQPKAMVSDFMNNMVPRSHDSYLHQNVNGSMSTYQPQQSIMSMPNGYSYGKQIRFSNGSLGSGNQSLQDTKRSLVPSVATIPSEAITCSPVTPFPTLNGKQKINGESSLLSPSPYISNGSTSTRGGKINSEITAEKQFVDKKLRRKIKNRESAARSRARKQAQTMEVEVELENLKKDYEELLKQHVELRKRQMEPGMISLHERPERKLRRTKSDIK

SEQ ID NO: 291 - protein, 227 aa, Arabidopsis thaliana
  Clone ID: AT_T20K9.C1.p6.tg
MMSTVPAFTFTEPGLVNQLSDFQTGFTPWELNCSDLFSTIHLEPVVPSPCSGESDAGSVKINTDFNGFDESCIGSIKTNSGSDDSNLFHGVPSPQSDELDSKNTKIRSNATNHNRNKLNRSVLQVTDDRKRKRMESNRESAKRSRMRKQRHIDNLKDEANRLGLENRELANRLRIVLYNIALMCTDNNQLLSEQEILRRRFLEMRQILIFRQLQLNPSLIINHHHMI

SEQ ID NO: 292 - protein, 157 aa, Arabidopsis thaliana
  Clone ID: AT_F4F15.C1.p70.tg
MNEEEDKDQDRVTRGCSHTHSCNPPGPEDASHSHTCFHAHTHLIISQDQQENDHSDSSNKKRLCGNREAVRKYREKKKARTAYLEDEVMRLQSLNEQFLRKLQSQEMVETELIRLRALLVEMQGKIEVELCSFSFQKQCNGSGFVFKEGDFSYYLVY

SEQ ID NO: 293 - protein, 143 aa, Arabidopsis thaliana
  Clone ID: AT_T30E16.C1.p6.tg
METVHNCFNDATITGDEIIDILAFLQSDESDNPSGINEVVPVDDKKRRRTISNRESAKRSRMKKKKRFEELTEEVNRLNIRNQELKNRLANVVSCGNFISRENNRLKTESVCLEIRLLELYRFLVAMQSPISTSVNYITTLEI

SEQ ID NO: 294 - protein, 277 aa, Arabidopsis thaliana
  Clone ID: AT_F6A4.C1.p10.tg
MDNHTAKDIGMKRSASELALQEYLTTSPLDPCFDLMNRDYTCELRDSLLWSEGLFPAGPFRDAQSSICENLSADSPVSANKPEVRGGVRRTTSGSSHVNSDDEDAETEAGQSEMTNDPNDLKRIRRMNSNRESAKRSRRRKQEYLVDLETQVDSLKGDNSTLYKQLIDATQQFRSAGTNNRVLKSDVETLRVKVKLAEDLVARGSLTSSLNQLLQTHLSPPSHSISSLHYTGNTSPAITVHSDQSLFPGMTLSGQNSSPGLGNVSSEAVSCVSDIWP

SEQ ID NO: 295 - protein, 382 aa, Arabidopsis thaliana
  Clone ID: AT_F14J22.C1.p17.tg
MGTHIDINNLGGDTSRGNESKPLARQSSLYSLTFDELQSTLGEPGKDFGSMNMDELLKNIWTAEDTQAFMTTTSSVAAPGPSGFVPGGNGLQRQGSLTLPRTLSQKTVDEVWKYLNSKEGSNGNTGTDALERQQTLGEMTLEDFLLRAGVVKEDNTQQNENSSSGFYANNGAAGLEFGFGQPNQNSISFNGNNSSMIMNQAPGLGLKVGGTMQQQQQPHQQQLQQPHQRLPPTIFPKQANVTFAAPVNMVNRGLFETSADGPANSNMGGAGGTVTATSPGTSSAENNTWSSPVPYVFGRGRRSNTGLEKVVERRQKRMIKNRESAARSRARKQAYTLELEAEIESLKLVNQDLQKKQAEIMKTHNSELYCHFDDTQFTDTST

SEQ ID NO: 296 - protein, 261 aa, Arabidopsis thaliana
  Clone ID: AT_F2J6.C1.p5.tg
MSVDSEETSSNGVVPPNSLPPKPEARFGRHVRSFSVDSDFFDDLGVTEEKFIATSSGEKKKGNHHHSRSNSMDGEMSSASFNIESILASVSGKDSGKKNMGMGGDRLAELALLDPKRAKRILANRQSAARSKERKIRYTGELERKVQTLQNEATTLSAQVTMLQRGTSELNTENKHLKMRLQALEQQAELRDALNEALRDELNRLKVVAGEIPQGNGNSYNRAQFSSQQSAMNQFGNKTNQQMSTNGQPSLPSYMDFTKRG

SEQ ID NO: 297 - protein, 173 aa, Arabidopsis thaliana
  Clone ID: AT_MQP15.C1.p3.tg
MQPQTDVFSLHNYLNSSILQSPYPSNFPISTPFPTNGQNPYLLYGFQSPTNNPQSMSLSSNNSTSDEAEEQQTNNNIINERKQRRMISNRESARRSRMRKQRHLDELWSQVMWLRIENHQLLDKLNNLSESHDKVLQENAQLKEETFELKQVISDMQIQSPFSCFRDDIIPIE

SEQ ID NO: 298 - protein, 620 aa, Arabidopsis thaliana
  Clone ID: AT_T5P19.C1.p310.tg
MAEPVLEDTYLTFSSDFDYIAIAPSPFDNFCNSNSDQVRNSISDLRFLIDDDDSFDDLYFPSENESFCIPPDATKREMSGDFTPASGISGDCVNEDTEKNTNGVLISTSSCYNRESPTDSDFSGTSQSLSFSGQDSAKRKTEIEEDSSDESRRLGKDGFASVIKVGGEEDDEKKKNVRLVRNRESAHLSRQRKKHYVEELEDKVKNMHSTISELSSKMSYFVAENVTLRQQMGTRFSSGPPMVPIVYPWMQYPAYMVKPQGSQVALLPIPRLKPKHSVAKVKKFKKVASFSVFGFLFCMFLFGALVNISYGEYKSNYVTDGVYDQSRGRVLVVDSSRVHCGGDSDQGVGRNVSETENLGPPRNSSEPLVASLFVPRNEKLVKIDGNLIIHSVLASEKARDSETKNEEGKSVLATTTKTLSPALPLPDSTSPRTRDVSKHLYSETGKGLSSSGSDDASNDQLKSTIANGKMQQWFREGVAGPMFSSGMCTEVFQFDVSSNSGAIIPASPHTQQCKNTSDTQKGKKNRRILSGGLPVSDFNLTKEDHNSSSKDKFRETKPGPSMVVSVLVDPREGGNGDIDGMMGGTKPQSRVFIVVLVDGVKYITYSCVLPRPDVPHLMTS

SEQ ID NO: 299 - protein, 553 aa, Arabidopsis thaliana
  Clone ID: AT_T9A14.C1.p180.tg
MGDTEKCNSDMIQRLHSSFGTTSSSIPKNPISQLDLNPNFIRSSAPQFSKPFSDSGKRIGVPPSHPNLIPPTSPFSQIPTTRQPGSHNFNPGGANHSRSMSQPNSFFSFDSLPPLSPSPFRDHDVSMEDRDSGVFNSNHSLPPSPFTRCNSTSSSSLRVGESLPPRKSHRRSNSDIPSGFNSMPLIPPRPLERSFSGGECADWSKSNPFVKKESSCEREGVGEREAMDDLFSAYMNLENIDVLNSSEADDSKNGNENRDDMESSRASGTKTNGSDTEGESSSVNESANNNMNSSGEKRESVKRRAAGGDIAPTTRHYRSVSVDSCFMEKLSFGDESLKPPPSPGSMSRKVSPTNSVDGNSGAAFSIEFNNGEFTAAEMKKIMANDKLAEMAMSDPKRVKRNDPLFRILANRQSAARSKERKMRYIVELEHKVQTLQTEATTLSAQLTLLQRDMMGLTNQNNELKFRLQAMEQQARLRDALNEALNGEVQRLKLAIGESSQNESERSKMQSLNAEMFQQLNISQLRQQPQQMQQQSHQQNHQNGTMATKSESNE

SEQ ID NO: 300 - protein, 471 aa, Arabidopsis thaliana
  Clone ID: AT_F18O14.C1.p33.tg
MELEPISSSCCSSSSSSSGEENTAAANMTEMEAAEALADLAQLAIMREQVFESAASWGSKGKRVRKRVKTESPPSDSLLKPPDSDTLPTPDLAEERLVKEEEEEEEVEPITKELTKAPVKSEINGETPKPILASTLIRCSRSNGCGRSRQNLSEAEREERRIRRILANRESARQTIRRRQAMCEELSKKAADLTYENENLRREKDWALKEFQSLETINKHLKEQVLKSVKPDTKEPEESPKPSQVEMSTSSTPFYFYNQNPYQLFCWPHVTQSSNPMISPLEFPTSGGASAKTITTQEHENAADDNGQKTHFYVVPCPWFLPPPDHSNGVPFGLQDTQRGTFSNGHHIDDSSARPMDVTETPRSHLPTRIKEEDSGSPETRPLYDLNESATEVLSEGGDGFPVTQQAYSLKHEDVSETTNGVTLMPPGHHVLISLPEKKHGSLAAAEARKRRKELTRLKNLHGRQCRMQVG

SEQ ID NO: 301 - protein, 530 aa, Arabidopsis thaliana
  Clone ID: AT_T22D6.C1.p80.tg
MDDLLHQRVEQSQVTPPHDDSNIHGDFDNEATDESRSETCSVVIEGNCDMVIELGLESGSVIVENLGDSDIDVSNDFDEPDDDDFFVGRTDFGLEFRDIASSGNDIRLITVESGSDDDDGVENERELWGIDLNEEDVYVNDDDEYEDDDVSVTIPLCWDSLQLEDREVTADEFDWEEVGGGGGGGVDDEREIRSGFAQIDMNDESLISASPIISLEGLVTRERAEGSGNLGWEVLLNHTLEINFDVDNRELYIGGDHDDYVQDYDMLFEQFADAEVSVIGLPPTSKSFLNNLPVVLLEGENDDDGGLVCAVCKDEMNIGNKAVQLPCNHKYHSECIVPWLKVRNTCPVCRYELPTDDAEYEQRKTQRTTNTFGMPHNFNLLEGTPSRNNNFNSMFQQNLHDEDDVHVQDHVYNHDQYHHQQPNVVTDEEKRLRRMASNRESARRTRMRERMMKEGLQMQVKQLMAYNQFLYNKYISLLEYNHQILQENSQLKETVSSFHDQYTISYGNHEGILGNTNDFDLNQLSSYQPS

SEQ ID NO: 302 - protein, 255 aa, Arabidopsis thaliana
  Clone ID: AT_T24I21.C1.p18.tg
MDDGELEFSNSNMGGELPSCSMDSFFDELLRDSHACTHTHTCNPPGPENTHTHTCLHVHTKILPDKVSTDDTSESSGKKRPLGNREAVRKYREKKKAKAASLEDEVMRLKAVNNQLLKRLQGQAALEAEVTRLKCLLVDIRGRIDGEIGAFPYQKPAVTNVPYSYMMHPCNMQCDVDNLYCLQNGNNGEGASMNEQGLNGCEFDQLECLANQNLAGKEIPVCSNGIGTFTVNGSGVNKRKGDILVPLDLFPRGCP

SEQ ID NO: 303 - protein, 311 aa, Arabidopsis thaliana
  Clone ID: AT_T32B20.C1.p60.tg
MEKVFSDEEISGNHHWSVNGMTSLNRSASEWAFNRFIQESSAAADDGESTTACGVSVSSPPNVPVDSEEYRAFLKSKLNLACAAVAMKRGTFIKPQDTSGRSDNGGANESEQASLASSKATPMMSSAITSGSELSGDEEEADGETNMNPTNVKRVKRMLSNRESARRSRRRKQAHLSELETQLRVENSKLMKGLTDVTQTFNDASVENRVLKANIETLRAKVKMAEETVKRLTGFNPMFHNMPQIVSTVSLPSETSNSPDTTSSQVTTPEIISSGNKGKALIGCKMNRTASMRRVESLEHLQKRIRSVGDQ

SEQ ID NO: 304 - protein, 206 aa, Arabidopsis thaliana
  Clone ID: AT_T6D22.C1.p17.tg
MVSSKKPKEKKARSDVVVNKASGRSKRSSGSRTKKTSNKVNIVKKKPEIYEISESSSSDSVEEAIRGDEAKKSNGVVSKRGNGKSVGIPTKTSKNREEDDGGAEDAKIKFPMNRIRRIMRSDNSAPQIMQDAVFLVNKATEMFIERFSEEAYDSSVKDKKKFIHYKHLSSVVSNDQRYEFLADSVPEKLKAEAALEEWERGMTDAG

SEQ ID NO: 305 - protein, 153 aa, Arabidopsis thaliana
  Clone ID: AT_T22P11.C1.p150.tg
MDSGTKVKKGAAGRRSGGGPKKKPVSRSVKSGLQFPVGRIGRYLKKGRYSKRVGTGAPVYLAAVLEYLAAEVLELAGNAARDNKKNRIIPRHVLLAVRNDEELGTLLKGVTIAHGGVLPNINPILLPKKSEKAASTTKTPKSPSKATKSPKKS

SEQ ID NO: 306 - protein, 142 aa, Arabidopsis thaliana
  Clone ID: AT_T22H22.C1.p12.tg
MSSGAGSGTTKGGRGKPKATKSVSRSSKAGLQFPVGRIARFLKAGKYAERVGAGAPVYLSAVLEYLAAEVLELAGNAARDNKKTRIVPRHIQLAVRNDEELSKLLGSVTIANGGVLPNIHQTLLPSKVGKNKGDIGSASQEF

SEQ ID NO: 307 - protein, 297 aa, Arabidopsis thaliana
  Clone ID: AT_T2E22.C1.p121.tg
MVAVSSFDAYITIFQARIKKIMQADEDVGKIALAVPVLVSKSLELFLQDLCDRTYEITLERGAKTVSSLHLKHCVERYNVFDFLREVVSKVPDYGHSQGQGHGDVTMDDRSISKRRKPISDEVNDSDEEYKKSKTQEIGSAKTSGRGGRGRGRGRGRGGRAAKAAEREGLNREMEVEAANSGQPPPEDNVKMHASESSPQEDEKKGIDGTAASNEDTKQHLQSPKEGIDFDLNAESLDLNETKLAPATGTTTTTTAATDSEEYSGWPMMDISKMDPAQLASLGKRIDEDEEDYDEEG

SEQ ID NO: 308 - protein, 151 aa, Arabidopsis thaliana
  Clone ID: AT_T11P11.C1.p3.tg
MAPKAGKKPAEKKPAEKAPAEEEKVAEKAPAEKKPKAGKKLPKEAVTGGVEKKKKRVKKSTETYKIYIFKVLKQVHPDIGISSKAMGIMNSFINDIFEKLAQEASKLARYNKKPTITSREIQTAVRLVLPGELAKHAVSEGTKAVTKFTSS

SEQ ID NO: 309 - protein, 243 aa, Arabidopsis thaliana
  Clone ID: AT_T23G18.C1.p3.tg
MAPRKPKVVSVTKKKKVVEETIKVTVTEEGDPCVITETANDQETQDLTFSIPVGENVTTVEIPVEVPDERSLPVGENVTTVKIPVDDRDESSPQPPETPVEVRDEPSPQPPETPASKSEGTLKKTDKVEKKQENKKKKKKKKRDDLAGDEYRRYVYKVMKQVHPDLGITSKAMTVVNMFMGDMFERIAQEAARLSDYTKRRTLSSREIEAAVRLVLPGELSRHAVAEGSKAVSNFVGYDSRKR

SEQ ID NO: 310 - protein, 162 aa, Arabidopsis thaliana
  Clone ID: AT_T22D6.C1.p130.tg
MDPMDIVGKSKEDASLPKATMTKIIKEMLPADVRVARDAQDLLIECCVEFINLISSESNEVCNKEDKRTIAPEHVLKALQVLGFGEYVEEVYAAYEQHKYETMDSQRSVKMNSGAEMTEEEAAAEQQRMFAEARARMNGGVTVPQPEQLEEPQQQQQTSLQS

SEQ ID NO: 311 - protein, 205 aa, Arabidopsis thaliana
  Clone ID: AT_MNJ7.C1.p26.tg
MAEGSMRPPEFNQPNKTSNGGEEECTVREQDRFMPIANVIRIMRRILPAHAKISDDSKETIQECVSEYISFITGEANERCQREQRKTITAEDVLWAMSKLGFDDYIEPLTLYLHRYRELEGERGVSCSAGSVSMTNGLVVKRPNGTMTEYGAYGPVPGIHMAQYHYRHQNGFVFSGNEPNSKMSGSSSGASGARVEVFPTQQHKY

SEQ ID NO: 312 - protein, 187 aa, Arabidopsis thaliana
  Clone ID: AT_F14I23.C1.p70.tg
MENNNGNNQLPPKGNEQLKSFWSKEMEGNLDFKNHDLPITRIKKIMKYDPDVTMIASEAPILLSKACEMFIMDLTMRSWLHAQESKRVTLQKSNVDAAVAQTVIFDFLLDDDIEVKRESVAAAADPVAMPPIDDGELPPGMVIGTPVCCSLGIHQPQPQMQAWPGAWTSVSGEEEEARGKKGGDDGN

SEQ ID NO: 313 - protein, 186 aa, Arabidopsis thaliana
  Clone ID: AT_MBA10.C1.p4.tg
MENNNNNHQQPPKDNEQLKSFWSKGMEGDLNVKNHEFPISRIKRIMKFDPDVSMIAAEAPNLLSKACEMFVMDLTMRSWLHAQESNRLTIRKSDVDAVVSQTVIFDFLRDDVPKDEGEPVVAAADPVDDVADHVAVPDLNNEELPPGTVIGTPVCYGLGIHAPHPQMPGAWTEEDATGANGGNGGN

SEQ ID NO: 314 - protein, 191 aa, Arabidopsis thaliana
  Clone ID: AT_MXA21.C1.p30.tg
MEPVAPRSHNTMPMLDQFRSNHPETSKIEGVSSLDTALKVFWNNQREQLGNFAGQTHLPLSRVRKILKSDPEVKIYVNFQKISCDVPALFSKACEYFILEVTLRAWMHTQSCTRETIRRCDIFQAVKNSGTYDFLIDRVPFGPHCVTHQGVQPPAEMILPDMNVPIDMDQIEEENMMEERSVGFDLNCDLQ

SEQ ID NO: 315 - protein, 231 aa, Arabidopsis thaliana
  Clone ID: AT_F7G19.C1.p16.tg
MDQQDHGQSGAMNYGTNPYQTNPMSTTAATVAGGAAQPGQLAFHQIHQQQQQQQLAQQLQAFWENQFKEIEKTTDFKNHSLPLARIKKIMKADEDVRMISAEAPVVFARACEMFILELTLRSWNHTEENKRRTLQKNDIAAAVTRTDIFDFLVDIVPREDLRDEVLGSIPRGTVPEAAAAGYPYGYLPAGTAPIGNPGMVMGNPGGAYPPNPYMGQPMWQQQAPDQPDQEN

SEQ ID NO: 316 - protein, 212 aa, Arabidopsis thaliana
  Clone ID: AT_MBA10.C1.p2.tg
MEENNGNNNHYLPQPSSSQLPPPPLYYQSMPLPSYSLPLPYSPQMRNYWIAQMGNATDVKHHAFPLTRIKKIMKSNPEVNMVTAEAPVLISKACEMLILDLTMRSWLHTVEGGRQTLKRSDTLTRSDISAATTRSFKFTFLGDVVPRDPSVVTDDPVLHPDGEVLPPGTVIGYPVFDCNGVYASPPQMQEWPAVPGDGEEAAGEIGGSSGGN

SEQ ID NO: 317 - protein, 130 aa, Arabidopsis thaliana
  Clone ID: AT_MNL12.C1.p7.tg
MEEEEGSIRPEFPIGRVKKIMKLDKDINKINSEALHVITYSTELFLHFLAEKSAVVTAEKKRKTVNLDHLRIAVKRHQPTSDFLLDSLPLPAQPVKHTKSVSDKKIPAPPIGTRRIDDFFSKGKAKTDSA

SEQ ID NO: 318 - protein, 776 aa, Arabidopsis thaliana
  Clone ID: AT_F24J8.C1.p5.tg
MELLLPHPSNSTPLTVLGFLDRAASVYGDCPSILHTANTVHTWSETHNRCLRIASALTSSSIGIKQGQVVSVVGPNVPSVYELQFAVPMSGAILNNINPRLDAHALSVLLRHSESRLVFVDHRSISLVLEAVSLFTQHEKPHLVLLDDDQENDSSSASDFLDTYEEIMERGNSRFKWIRPQTEWQPMVLNYTSGTTSSPKGVVLSHRAIFMLTVSSLLDWSVPNRPVYLWTLPMFHANGWGYTWGTAAVGATNICTRRVDAPTIYNLIDKHNVTHMCAAPMVLNMLINYPLSTPLKNPVQVHEEKTGSLPVMTSGAPPPATIISRAESLGFNVSHSYGLTETSGPVVSCAWKPKWDHLDPLERARLKSRQGVRTLGFTEVDVRDRKTGKSVKHDGVSVGEIVFRGSSVMLGYYKDPQGTAACMREDGWFYSGDIGVIHKDGYLEIKDRSKDVIICGGENISSAEIETVLYTNPVVKEAAVVAKPDKMWGETPCAFVSLKCDNNGDGSVPVTEREIREFCKTKLPKYMVPRKVIFQEELPKTSTGKIQKFLLRQMAKTLVYVRKKKALSSDDLNGTKVLEATEGTGGEEVIEAASESGGLEAAQKRGSNTRPSDEWVLVPEKVLDTRYSAEGVLEALVQWQGLPTHETSWELNRVYVRKKKALSSDDLNGTKVLEATEGTGGEEVLEAASESGGLEAAQKRVNIDEHGRKSGGGGGDTGWRVAVGAETRECVPKKEDAGEVNDYEDSLFISISFKVQANSGASEEQARAVYAPVAFQ

SEQ ID NO: 319 - protein, 1499 aa, Arabidopsis thaliana
  Clone ID: AT_F28J9.C1.p18.tg
MVTTRSQEGDGKGKEVELEVPLDSRVTRLETTVAEQHKEMMKQFADLYAVLSRSTAGKMVDEQSTLDRSAPRSSQSMENRSGYLDPYRDARHQQVRSDHFNAYNNLTRLGKIDFPRFDGTRLKEWLFKVEEFFGVDSTPEDMKVKMAAIHFDSHASTWHQSFIQSGVGLEVLYDWKGYVKLLKERFEDDCDDPMAELKHLQETDGIIDYHQKFELIKTRVNLSEEYLVSVYLAGLRTDTQMHVRMFQPQTVRHCLFLGKTYEKAHLKKPANTTWSTNRSAPTGGYNKYQKEGESKTDHYGNKGNFKPVSQQPKKMSQQEMSDRRSKGLCYFCDEKYTPEHYLVHKKTQLFRMDVDEEFEDAREELVNDDDEHMPQISVNAVSGIAGYKTMRVKGTYDKKIIFILIDSGSTHNFLDPNTAAKLGCKVDTAGLTRVSVADGRKLRVEGKVTDFSWKLQTTTFQSDILLIPLQGIDMVLGVQWLETLGRISWEFKKLEMRFKFNNQKVLLHGLTSGSVREVKAQKLQKLQEDQVQLAMLCVQEVSESTEGELCTINALTSELGEESVVEEVLNEYPDIFIEPTALPPFREKHNHKIKLLEGSNPVNQRPYRYSIHQKNEIDKLVEDLLTNGTVQASSSPYASPVVLVKKKDGTWRLCVDYRELNGMTVKDSFPIPLIEDLMDELGGAVIFSKIDLRAGYHQVRMDPDDIQKTAFKTHSGHFEYLVMPFGLTNAPATFQGLMNFIFKPFLRKFVLVFFDDILVYSSSLEEHRQHLKQVFEVMRANKLFAKLSKCAFAVPKVEYLGHFISAQGIETDPAKIKAVKEWPQPTTLKQLRGFLGLAGYYRRFVRSFGVIAGPLHALTKTDAFEWTAVAQQAFEDLKAALCQAPVLSLPLFDKQFVVETDACGQGIGAVLMQEGHPLAYISRQLKGKQLHLSIYEKELLAVIFAVRKWRHYLLQSHFIIKTDQRSLKYLLEQRLNTPIQQQWLPKLLEFDYEIQYRQGKENVVADALSRVEGSEVLHMAMTVVECDLLKDIQAGYANDSQLQDIITALQRDPDSKKYFSWSQNILRRKSKIVVPANDNIKNTILLWLHGSGVGGHSGRDVTHQRVKGLFYSKGMIKDIQAYIRSCGTCQQCKSDPAASPGLLQPLPIPDTIWSEVSMDFIEGLPVSGGKTVIMVVVDRLSKAAHFIALSHPYSALTVAQAYLDNVFKLHGCPTSIVSDRDVVFTSEFWREFFTLQGVALKLTSAYHPQSDGQTEVVNRCLETYLRCMCHDRPQLWSKWLALAEYWYNTNYHSSSRMTPFEIVYGQVPPVHLPYLPGESKVAVVARSLQEREDMLLFLKFHLMRAQHRMKQFADQHRTEREFEIGDYVYVKLQPYRQQSVVMRANQKLSPKYFGPYKIIDRCGEVAYKLALPSYSQVHPVFHVSQLKVLVGNVSTTVHLPSVMQDVFEKVPEKVVERKMVNRQGKAVTKVLVKWSNEPLEEATWEFLFDLQKTFPEFEA

SEQ ID NO: 320 - protein, 1499 aa, Arabidopsis thaliana
  Clone ID: AT_T21B14.C1.p124.tg
MVTTRSQEGDGKGKEVELEVPLDSRVTRLETTVAEQHKEMMKQFADLYAVLSRSTAGKMVDEQSTLDRSAPRSSQSMENRSGYPDPYRDARHQQVRSDHFNAYNNLTRLGKIDFPRFDGTRLKEWLFKVEEFFGVDSTPEDMKVKMAAIHFDSHASTWHQSFIQSGVGLEVLYDWKGYVKLLKERFEDDCDDPMAELKHLQETDGIIDYHQKFELIKTRVNLSEEYLVSVYLAGLRTDTQMHVRMFQPQTVRHCLFLGKTYEKAHPKKPANTTWSTNRSAPTGGYNKYQKEGESKTDHYGNKGNFKPVSQQPKKMSQQEMSDRRSKGLCYFCDEKYTPEHYLVHKKTQLFRMDVDEEFEDAREELVNDDDEHMPQISVNAVSGIAGYKTMRVKGTYDKKIIFILIDSGSTHNFLDPNTAAKLGCKVDTAGLTRVSVADGRKLRVEGKVTDFSWKLQTTTFQSDILLIPLQGIDMVLGVQWLETLGRISWEFKKLEMRFKFNNQKVLLHGLTSGSVREVKAQKLQKLQEDQVQLAMLCVQEVSESTEGELCTINALTSELGEESVVEEVLNEYPDIFIEPTALPPFREKHNHKIKLLEGSNPVNQRPYRYSIHQKNEIDKLVEDLLTNGTVQASSSPYASPVVLVKKKDGTWRLCVDYRELNGMTVKDSFPIPLIEDLMDELGGAVIFSKIDLRAGYHQVRMDPDDIQKTAFKTHSGHFEYLVMPFGLTNAPATFQGLMNFIFKPFLRKFVLVFFDDILVYSSSLEEHRQHLKQVFEVMRANKLFAKLSKCAFAVPKVEYLGHFISAQGIETDPAKIKAVKEWPQPTTLKQLRGFLGLAGYYRRFVRSFGVIAGPLHALTKTDAFEWTAVAQQAFEDLKAALCQAPVLSLPLFDKQFVVETDACGQGIGAVLMQEGHPLAYISRQLKGKQLHLSIYEKELLAVIFAVRKWRHYLLQSHFIIKTDQRSLKYLLEQRLNTPIQQQWLPKLLEFDYEIQYRQGKENVVADALSRVEGSEVLHMAMTVVECDLLKDIQAGYANDSQLQDIITALQRDPDSKKYFSWSQNILRRKSKIVVPANDNIKNTILLWLHGSGVGGHSGRDVTHQRVKGLFYWKGMIKDIQAYIRSCGTCQQCKSDPAASPGLLQPLPIPDTIWSEVSMDFIEGLPVSGGKTVIMVVVDRLSKAAHFIALSHPYSALTVAHAYLDNVFKLHGCPTSIVSDRDVVFTSEFWREFFTLQGVALKLTSAYHPQSDGQTEVVNRCLETYLRCMCHDRPQLWSKWLALAEYWYNTNYHSSSRMTPFEIVYGQVPPVHLPYLPGESKVAVVARSLQEREDMLLFLKFHLMRAQHRMKQFADQHRTEREFEIGDYVYVKLQPYRQQSVVMRANQKLSPKYFGPYKIIDRCGEVAYKLALPSYSQVHPVFHVSQLKVLVGNVSTTVHLPSVMQDVFEKVPEKVVERKMVNRQGKAVTKVLVKWSNEPLEEATWEFLFDLQKTFPEFEA

SEQ ID NO: 321 - protein, 945 aa, Arabidopsis thaliana
  Clone ID: AT_T6B13.C1.p12.tg
MATNKDQLEQLETSQDMMQDEMQRMTVAMVDLKGDNEDRHRRLEEALAHLIEAVTQRESGGSAASRGSRRTERNQFQSTGNRGEPDNPFAAVTANNNNAIARPSKLDFPRFHGGDLTKWLSKAKQYFEYHEGPVEQAVRFTTFHLDGVANGWWQATLRRSATIGQTGSLSEYQHEFEWLQNKVYGWTQEVLVGAFMNGLYYSISNGIRMFQPRSLREVINLRVGWKGKSKDRRRKRATHHLHAVLSLTVWWCAKRQSNRRQRDSVRKNYERKGVWAYVSAVMKGENDDEAVEEESTEAEGKPEITLYALEGVDTTSTIRVRATIHRNRLIALINSGSTHNFIGEKAVRGMNLKATTTKPFTVRVVNGMPLVCRSRYEAIPVVMGGVVFPVTLYALPLMGLDLAMGVQWLSTLGPTLCNWKEQTLQFHWAGDEVRLMGIKPTGLRGVEHKTITKKARMGHTIFAITMAHNSSDPNTPDGEIKKLIEEFAGLFETPTQLPSERPIVHRIALKKGTDPVNVRPYRYAFYQKDEMSRAGIIRPSSSPFLSPVLLERFPIPTVDDMLDELNGAVYFTKLDLTAGYQQVRMHSPDIPKIAFQTHNGHYEYLVMPFGLCNAPSTFQALMNEIFWPLLSRSVAAKFVSHVVKLHGIPRSIVSDCDPIFMSLFWQEFWKLSRTKLWMSTAYHPQTDGQTEVVNRCIEQFLRCFVHYHPKQWSSFIPWAEYWYNTTFHASTGMTPFQALYGRPPSPIPAYELGSVVCGELNEQMAARDELLAELKQHLVTANNCMKQQADSRLRDVSFQVGDWVLLRIQPYRQKTLFRRSSQKLSHRFYGPFQVASKHGEVAYRLTLPEGTRIHPVFHVSLLKPWVGDGEPDMGQLPPLRNNGELKLQPTAVLEVRWRSQDKKRVADLLVQWEGLHIEDATWEEYDQLAASFPEFVLNLEDKVRL

SEQ ID NO: 322 - protein, 1067 aa, Arabidopsis thaliana
  Clone ID: AT_F11C18.C1.p100.tg
MANLLQRLRRRTGPKPDYIEDKLDEYIREEQVEETGGSNQDCPLGEIEKILDREWRPTASNNPNSSDNGTPTLVVVKQYLVKWKGLSYLHCSWVPEQEFEKAYKSHPHLKLKLRVTRFNAAMDVFIAENGAHEFIAIRPEWKTVDRIIACREGDDGEEYLVKYKELSYRNSYWESESDISDFQNEIQRFKDINSSSRRDKYVENERNREEFKQFDLTPEFLTGTLHTYQLEGLNFLRYSWSKKTNVILADEMGLGKTIQSIAFLASLFEENLSPHLVVAPLSTIRNWEREFATWAPHMNVVMYTGDSEARDVIWEHEFYFSEGRKRLKKDVLKDKVPPKKELILRVDMSSQQKEVYKAVITNNYQVLTKKRDAKISNVLMKLRQVCSHPYLLPDFEPRFEDANEAFTKLLEASGKLQLLDKMMVKLKEQGHRVLIYTQFQHTLYLLEDYFTFKNWNYERIDGKISGPERQVRIDRFNAENSNRFCFLLSTRAGGIGINLATADTVIIYDSDWNPHADLQAMARVHRLGQTNKVMIYRLIHKGTVEERMMEITKNKMLLEHLVVGKQHLCQDELDDIIKYGSKELFSEENDEAGRSGKIHYDDAAIEQLLDRNHVDAVEVSLDDEEETDFLKNFKVASFEYVDDENEAAALEEAQAIENNSSVRNADRTSHWKDLLKDKYEVQQAEELSALGKRKRNGKQVMYAEDDLDGLEEISDEEDEYCLDDLKVTSDEEEEADEPEAARQRKPRTVTRPYRKRARDNSEEIPLMEGEGRYLMVLGFNETERDIFLRTFKRYGILFLKHIAENPTDNSTNFKVITAMVYADGVPKEGISSDELLVSMTFMMLVKEKCQFLDNHPTAPVFSNYVISKYNLRNGAFSKEEHDRILIPAVSKHGYGRWVAIVEDEEIGFQEVACKDLNIPFPPDTKSARKRICDHVGKRVKKMEDAIKYEYAEKILAEQAKAETKGTSFVDAEKEMLKNDPITSKKNSATAVDNKQGRVEMAQSYDQSVNEKSGESFQTYLDIQPLNRMPRESFKPLEPINEEISTRLSVGTDHDVEMDAADNIIVLD

SEQ ID NO: 323 - protein, 2228 aa, Arabidopsis thaliana
  Clone ID: AT_K23L20.C1.p15.tg
MKQKRRKLPSILDILDQKVDSSMAFDSPEYTSSSKPSKQRLKTDSTPERNSSKRKGNDGNYFECVICDLGGDLLCCDSCPRTYHTACLNPPLKRIPNGKWICPKCSPNSEALKPVNRLDAIAKRARTKTKKRNSKAGPKCERASQIYCSSIISGEQSSEKGKSISAEESKSTGKEVYSSPMDGCSTAELGHASADDRPDSSSHGEDDLGKPVIPTADLPSDAGLTLLSCEDLSESKLSDTEKTHEAPVEKLEHASSEIVENKTVAEMETGKGKRKKRKRELNDGESLERCKTDKKRAKKSLSKVGSSSQTTKSPESSKKKKKKNRVTLKSLSKPQSKTETPEKVKKLPKEERRAVRATNKSSSCLEDTNSLPVGNLQVHRVLGCRIQGLTKTSLCSALSDDLCSDNLQATDQRDSLVQDTNAELVVAEDRIDSSSETGKSSRDSRLRDKDMDDSALGTEGMVEVKEEMLSEDISNATLSRHVDDEDMKVSETHVSVERELLEEAHQETGEKSTVADEEIEEPVAAKTSDLIGETVSYEFLVKWVDKSNIHNTWISEAELKGLAKRKLENYKAKYGTAVINICEDKWKQPQRIVALRVSKEGNQEAYVKWTGLAYDECTWESLEEPILKHSSHLIDLFHQYEQKTLERNSKGNPTRERGEVVTLTEQPQELRGGALFAHQLEALNWLRRCWHKSKNVILADEMGLGKTVSASAFLSSLYFEFGVARPCLVLVPLSTMPNWLSEFSLWAPLLNVVEYHGSAKGRAIIRDYEWHAKNSTGTTKKPTSYKFNVLLTTYEMVLADSSHLRGVPWEVLVVDEGHRLKNSESKLFSLLNTFSFQHRVLLTGTPLQNNIGEMYNLLNFLQPSSFPSLSSFEERFHDLTSAEKVEELKKLVAPHMLRRLKKDAMQNIPPKTERMVPVELTSIQAEYYRAMLTKNYQILRNIGKGVAQQSMLNIVMQLRKVCNHPYLIPGTEPESGSLEFLHDMRIKASAKLTLLHSMLKVLHKEGHRVLIFSQMTKLLDILEDYLNIEFGPKTFERVDGSVAVADRQAAIARFNQDKNRFVFLLSTRACGLGINLATADTVIIYDSDFNPHADIQAMNRAHRIGQSKRLLVYRLVVRASVEERILQLAKKKLMLDQLFVNKSGSQKEFEDILRWGTEELFNDSAGENKKDTAESNGNLDVIMDLESKSRKKGGGLGDVYQDKCTEGNGKIVWDDIAIMKLLDRSNLQSASTDAADTELDNDMLGSVKPVEWNEETAEEQVGAESPALVTDDTGEPSSERKDDDVVNFTEENEWDRLLRMRLEFPLSLSSASWLWSWQHIWEKYQSEEEAALGRGKRLRKAVSYREAYAPHTSGPVNESGGEDEKEPEPELKKEYTPAGRALKEKFTKLRERQKNLIARRNSVEESLPSGNVDQVTEVANQDEESPTSMDLDDSKASQQCDAQKRKASSSDPKPDLLSQHHHGAECLPSLPPNNLPVLGLCAPNFTQSESSRRNYSRPGSRQNRPITGPHFPFNLPQTSNLVEREANDQEPPMGKLKPQNIKEEPFQQPLSNMDGWLPHRQFPPSGDFERPRSSGAAFADFQEKFPLLNLPFDDKLLPRFPFQPRTMGTSHQDIMANLSMRKRFEGTGHSMQDLFGGTPMPFLPNMKIPPMDPPVFNQQEKDLPPLGLDQFPSALSSIPENHRKVLENIMLRTGSGIGHVQKKKTRVDAWSEDELDSLWIGIRRHGYGNWETILRDPRLKFSKFKTPEYLAARWEEEQRKFLDSLSSLPSKSSRTDKSTKSSLFPGLPQGIMNRALHGKYATPPRFQSHLTDIKLGFGDLASPLPLFEPSDHLGFRSEHFPPMANLCTDNLPGEPSAGPSERAGTSTNIPNEKPFPLNSLGMGNLGSLGLDSLSSLNTLRAEEKRDAIKRGKLPLFLDMPLPQMLDSSNNVFLGRSANPSFLHPNRGLNPSNPMGRDIMGISSSENKLPHWLRNVVTVPTVKSPEPPTLPPTVSAIAQSVRVLYGEDSTTIPPFVIPEPPPPAPRDPRHSLRKKRKRKLHSSSQKTTDIGSSSHNAVESSSQGNPQTSATPPLPPPSLAGETSGSSQPKLPPHNLNSTEPLSSEAIIIPPPEEDSVIAAAPSEAPGPSLEGITGTTKSISLESQSSEPETINQDGDLDPETDEKVESERTPLHSDEKQEEQESENALNKQCEPIEAESQNTNAEEEAEAQEEDEESMKMVTGNSLSDD

SEQ ID NO: 324 - protein, 299 aa, Arabidopsis thaliana
  Clone ID: AT_T13L16.C1.p11.tg
MEDQSAARSIGKVSWFSDGKGYGFITPDDGGEELFVHQSSIVSDGFRSLTLGESVEYEIALGSDGKTKAIEVTAPGGGSLNKKENSSRGSGGNCFNCGEVGHMAKDCDGGSGGKSFGGGGGRRSGGEGECYMCGDVGHFARDCRQSGGGNSGGGGGGGRPCYSCGEVGHLAKDCRGGSGGNRYGGGGGRGSGGDGCYMCGGVGHFARDCRQNGGGNVGGGGSTCYTCGGVGHIAKVCTSKIPSGGGGGGRACYECGGTGHLARDCDRRGSGSSGGGGGSNKCFICGKEGHFARECTSVA

SEQ ID NO: 325 - protein, 299 aa, Arabidopsis thaliana
  Clone ID: AT_T19K4.C1.p150.tg
MASEDQSAARSTGKVNWFNASKGYGFITPDDGSVELFVHQSSIVSEGYRSLTVGDAVEFAITQGSDGKTKAVNVTAPGGGSLKKENNSRGNGARRGGGGSGCYNCGELGHISKDCGIGGGGGGGERRSRGGEGCYNCGDTGHFARDCTSAGNGDQRGATKGGNDGCYTCGDVGHVARDCTQKSVGNGDQRGAVKGGNDGCYTCGDVGHFARDCTQKVAAGNVRSGGGGSGTCYSCGGVGHIARDCATKRQPSRGCYQCGGSGHLARDCDQRGSGGGGNDNACYKCGKEGHFARECSSVA

SEQ ID NO: 326 - protein, 396 aa, Arabidopsis thaliana
  Clone ID: AT_T24P13.C1.p16.tg
MWLSHLFMSLSKLTCNFSIFSVFMACGSIGMSQVRDTPVKLFGWTITPVSHDPYSSSSHVLPDSSSSSSSSSLSLRPHMMNNQSVTDNTSLKLSSNLNNESKETSENSDDQHSEITTITSEEEKTTELKKPDKILPCPRCNSADTKFCYYNNYNVNQPRHFCRKCQRYWTAGGSMRIVPVGSGRRKNKGWVSSDQYLHITSEDTDNYNSSSTKILSFESSDSLVTERPKHQSNEVKINAEPVSQEPNNFQGLLPPQASPVSPPWPYQYPPNPSFYHMPVYWGCAIPVWSTLDTSTCLGKRTRDETSHETVKESKNAFERTSLLLESQSIKNETSMATNNHVWYPVPMTREKTQEFSFFSNGAETKSSNNRFVPETYLNLQANPAAMARSMNFRESI

SEQ ID NO: 327 - protein, 232 aa, Arabidopsis thaliana
  Clone ID: AT_T13K14.C1.p200.tg
MDNFNVVANEDNQVNDVKPPPPPPRVCARCDSDNTKFCYYNNYSEFQPRYFCKNCRRYWTHGGALRNVPIGGSSRAKRTRINQPSVAQMVSVGIQPGSHKPFFNVQENNDFVGSFGASSSSFVAAVGNRFSSLSHIHGGMVTNVHPTQTFRPNHRLAFHNGSFEQDYYDVGSDNLLVNQQVGGYVDNHNGYHMNQVDQYNWNQSFNNAMNMNYNNASTSGRMHPSHLEKGGP

SEQ ID NO: 328 - protein, 298 aa, Arabidopsis thaliana
  Clone ID: AT_K19B1.C1.p4.tg
MLETKDPAIKLFGMKIPFPTVLEVADEEEEKNQNKTLTDQSEKDKTLKKPTKILPCPRCNSMETKFCYYNNYNVNQPRHFCKACQRYWTSGGTMRSVPIGAGRRKNKNNSPTSHYHHVTISETNGPVLSFSLGDDQKVSSNRFGNQKLVARIENNDERSNNNTSNGLNCFPGVSWPYTWNPAFYPVYPYWSMPVLSSPVSSSPTSTLGKHSRDEDETVKQKQRNGSVLVPKTLRIDDPNEAAKSSIWTTLGIKNEVMFNGFGSKKEVKLSNKEETETSLVLCANPAALSRSINFHEQM

SEQ ID NO: 329 - protein, 471 aa, Arabidopsis thaliana
  Clone ID: AT_MIJ24.C1.p130.tg
MADPAIKLFGKTIPLPELGVVDSSSSYTGFLTETQIPVRLSDSCTGDDDDEEMGDSGLGREEGDDVGDGGGESETDKKGFSFSVIGIKSLIPEEKDSECQEESLRNESNDVTTTTSGITEKTETTKAAKTNEESGGTACSQEGKLKKPDKILPCPRCNSMETKFCYYNNYNVNQPRHFCKKCQRYWTAGGTMRNVPVGAGRRKNKSPASHYNRHVSITSAEAMQKVARTDLQHPNGANLLTFGSDSVLCESMASGLNLVEKSLLKTQTVLQEPNEGLKITVPLNQTNEEAGTVSPLPKVPCFPGPPPTWPYAWNGVSWTILPFYPPPAYWSCPGVSPGAWNSFTWMPQPNSPSGSNPNSPTLGKHSRDENAAEPGTAFDETESLGREKSKPERCLWVPKTLRIDDPEEAAKSSIWETLGIKKDENADTFGAFRSSTKEKSSLSEGRLPGRRPELQANPAALSRSANFHESS

SEQ ID NO: 330 - protein, 253 aa, Arabidopsis thaliana
  Clone ID: AT_F11C1.C1.p250.tg
MPTSDSGEPRRIAMKPNGVTVPISDQQEQLPCPRCDSSNTKFCYYNNYNFSQPRHFCKACRRYWTHGGTLRDVPVGGGTRKSAKRSRTCSNSSSSSVSGVVSNSNGVPLQTTPVLFPQSSISNGVTHTVTESDGKGSALSLCGSFTSTLLNHNAAATATHGSGSVIGIGGFGIGLGSGFDDVSFGLGRAMWPFSTVGTATTTNVGSNGGHHAVPMPATWQFEGLESNAGGGFVSGEYFAWPDLSITTPGNSLK

SEQ ID NO: 331 - protein, 331 aa, Arabidopsis thaliana
  Clone ID: AT_F1N19.C1.p18.tg
MNEIVTNTCLKQQSNPPSPATPVERKARPEKDQALNCPRCNSLNTKFCYYNNYSLTQPRRYWTAGGSLRNIPVGGGVRKNKRSSSNSSSSSPSSSSSSKKPLFANNNTPTPPLPHLNPKIGEAAATKVQDLTFSQGFGNAHEVKDLNLAFSQGFGIGHNHHSSIPEFLQVVPSSSMKNNPLVSTSSSLELLGISSSSASSNSRPAFMSYPNVHDSSVYTASGFGLSYPQFQEFMRPALGFSLDGGDPLRQEEGSSGTNNGRPLLPFESLLKLPVSSSSTNSGGNGNLKENNDEHSDHEHEKEEGEADQSVGFWSGMLSAGASAAASGGSWQ

SEQ ID NO: 332 - protein, 247 aa, Arabidopsis thaliana
  Clone ID: AT_F22O6.C1.p180.tg
MERAEALTSSFIWRPNANANAEITPSCPRCGSSNTKFCYYNNYSLTQPRYFCKGCRRYWTKGGSLRNVPVGGGCRKSRRPKSSSGNNTKTSLTANSGNPGGGSPSIDLALVYANFLNPKPDESILQENCDLATTDFLVDNPTGTSMDPSWSMDINDGHHDHYINPVEHIVEECGYNGLPPFPGEELLSLDTNGVWSDALLIGHNHVDVGVTPVQAVHEPVVHFADESNDSTNLLFGSWSPFDFTADG

SEQ ID NO: 333 - protein, 399 aa, Arabidopsis thaliana
  Clone ID: AT_F24J1.C1.p25.tg
MSKSRDTEIKLFGRTITSLLDVNCYDPSSLSPVHDVSSDPSKEDSSSSSSSCSPTIGPIRVPVKKSEQESNKFKDPYILSDLNEPPKAVSEISSPRSSKNNCDQQSEITTTTTTSTTSGEKSTALKKPDKLIPCPRCESANTKFCYYNNYNVNQPRYFCRNCQRYWTAGGSMRNVPVGSGRRKNKGWPSSNHYLQVTSEDCDNNNSGTILSFGSSESSVTETGKHQSGDTAKISADSVSQENKSYQGFLPPQVMLPNNSSPWPYQWSPTGPNASFYPVPFYWGCTVPIYPTSETSSCLGKRSRDQTEGRINDTNTTITTTRARLVSESLRMNIEASKSAVWSKLPTKPEKKTQGFSLFNGFDTKGNSNRSSLVSETSHSLQANPAAMSRAMNFRESMQQ

SEQ ID NO: 334 - protein, 175 aa, Arabidopsis thaliana
  Clone ID: AT_F28N24.C1.p14.tg
MATQDSQGIKLFGKTITFNANITQTIKKEEQQQQQQPELQATTAVRSPSSDLTAEKRPDKIIPCPRCKSMETKFCYFNNYNVNQPRHFCKGCQRYWTAGGALRNVPVGAGRRKSKPPGRVGGFAELLGAATGAVDQVELDALLVEEWRAATASHGGFRHDFPVKRLRCYTDGQSC

SEQ ID NO: 335 - protein, 225 aa, Arabidopsis thaliana
  Clone ID: AT_K8A10.C1.p1.tg
MPSEFSESRRVPKIPHGQGGSVAIPTDQQEQLSCPRCESTNTKFCYYNNYNFSQPRHFCKSCRRYWTHGGTLRDIPVGGVSRKSSKRSRTYSSAATTSVVGSRNFPLQATPVLFPQSSSNGGITTAKGSASSFYGGFSSLINYNAAVSRNGPGGGFNGPDAFGLGLGHGSYYEDVRYGQGITVWPFSSGATDAATTTSHIAQIPATWQFEGQESKVGFVSGDYVA

SEQ ID NO: 336 - protein, 1409 aa, Arabidopsis thaliana
  Clone ID: AT_F16N3.C1.p38.tg
MVTARVTRKSTRSKSGTSSAARKSSRSTGVDESPPISPPVHKSNVSGASRVIAPPESVDPTQSPFFLHSADHPGLNIISHRLDETNYGDWNVAMLISLDAKNKSGFIDGTLPRPLESDKNFRLWSRCKSMVKSWLLNSVSPQIYRSILRMNDASDIWRDLHSRFNVTNLPRTYNLTQEIQDFRQGTLSLSEYYTRLKTLWDQLESTEELDDPCICGKAMRLQQKAEQAKIVKLLAGLNDSYAIIRRQIIAKKALPSLAEVYHILDQDNSQQGFSNVVAPPAAFQVSEAMMATNNDVNMLCSEWVGHIAERCYKKHGFPLGFTPKGKGGDKSQVIDSGAIHHVSHDKSLFLNLDTSVVSAVNLPAGPTVRISGVGTLRLNDDILLKNILFIPEFRLNLISISSLTDDIGSRVIFDKTSCEIQDPIKARMLGQGRRIANLYVLDIEDPIVSVNAVVDISMWHRRLGHASLQRLDVISDSLGTTKPKNKGSDYCHVCHLAKQRKLPFPSQNKVCNEIFDLLHIDIWGPFSVETVDGYKYFLTIVDDHSRATWIYLLRNKSEVLTVFPAFIEQVENQYKVRVKAVRSDNAPELKFTSLYQQKGIVSFHSCPETPEQNLVVERKHQHILNVSRALMFQSQVPLSLWGDCVLTAVFLINRTPSQLLSNKTPYEILTGTVPFYFAKKRHKFQPRSKACVFLGYPAGYKGYKLMDLESHTVFISRNVVFHEEVFPLAVDPKSESSLKLFTPMVPVSSEIGAMETTHTWEITTLPAGKKAVGCKWVFSLKFLADGSLERYKARLVAKGYTQKEGLDYTDTFSPVAKMTTIKLLLKISASKKWFLKQLDVSNAFLNGELEEEIYMKLPEGYAARKGITLPPNSVCRLKRSIYGLKQASRQWFKKFSASLLDLGFKKTHGDHTLFIKEYDGEFVIVLVYVDDIAIASTSEGAAIQLTQDLQQRFKLRDLGDLKYFLGLEIARTEAGISICQRKYALELLASTGMVNCKPVSVPMIPNVKMMKTDGDLLDDREQYRRIVGKLMYLTITRLDITFAVNKLCQFSSAPRTSHLQAAYRVLQYIKGSVGQGLFYSASADLTLKGFADSDWASCPDSRRSTTGFSMFVGDSLISWRSKKQHVVSRSSAEAEYRALALVTCELVWLHTLLMSLKASYLVPVLYSDSTTAIYIATNPVFHERTKHIELDCHTVREKLDNGELKLLHVRTEDQPSTAAYPPPNLAEPLPCPRCNSTTTKFCYYNNYNLAQPRYYCKSCRRYWTQGGTLRDVPVGGGTRRSSSKRHRSFSTTATSSSSSSSVITTTTQEPATTEASQTKVTNLISGHGSFASLLGLGSGNGGLDYGFGYGYGLEEMSIGYLGDSSVGEIPVVDGCGGDTWQIGEIEGKSGGDSLIWPGLEISMQTNDVK

SEQ ID NO: 337 - protein, 210 aa, Arabidopsis thaliana
  Clone ID: AT_T13K14.C1.p210.tg
MDNLNVFANEDNQVNGLKRPPPSRVCPRCDSDNTKFCFYNNYSESQPRYFCKNCRRYWTHGGALRNIPVGGSCRKPKRLKVDQSSISEMVSVENQPINHQSFRQTQENNEFVRSFDASSSATVTAVPNHFGYLSELHGVTNLLPIQSFRTMDCLDFGDESFQQGYYDVGSNDLIDNPLINQSIGGYVDNLTSYCINQVEPKLQPRYEHES

SEQ ID NO: 338 - protein, 194 aa, Arabidopsis thaliana
  Clone ID: AT_T13K14.C1.p190.tg
MNNLNVFTNEDNEMNVMPPPRVCPRCYSDQTRFSYFNNNKKSQPRYKCKNCCRCWTHGGVLRNIPVTGICDKSNLPKIDQSSVSQMILAEIQQGNHQPFKKFQENISVSVSSSSDVSIVGNHFDDLSELHGITNSTPIRSFTMDRLDFGEESFQQDLYDVGSNDLIGNPLINQSIGGYVDNHKDEHKLQFEYES

SEQ ID NO: 339 - protein, 361 aa, Arabidopsis thaliana
  Clone ID: AT_T19F6.C1.p50.tg
MDTAQWPQAKVFVLTFGRDVFFYFDDQEIVVKPLEEIVTNTCPKPQPQPLQPQQPPSVGGERKARPEKDQAVNCPRCNSTNTKFCYYNNYSLTQPRYFCKGCRRYWTEGGSLRNIPVGGGSRKNKRSHSSSSDISNNHSDSTQPATKKHLSDHHHHLMSMSQQGLTGQNPKFLETTQQDLNLGFSPHGMIRTNFTDLIHNIGNNTNKSNNNNNPLIVSSCSAMATSSLDLIRNNSNNGNSSNSSFMGFPVHNQDPASGGFSMQDHYKPCNTNTTLLGFSLDHHHNNGFHGGFQGGEEGGEGGDDVNGRHLFPFEDLKLPVSSSSATINVDINEHQKRGSGSDAAATSGGYWTGMLSGGSWC

SEQ ID NO: 340 - protein, 237 aa, Arabidopsis thaliana
  Clone ID: AT_f15l12.C1.p60.tg
MGLSYSSNPTPLDNDQKKPSPATAVTRPQPPELALRCPRCDSTNTKFCYYNNYSLTQPRYFCKSCRRYWTKGGTLRNIPVGGGCRKNKRSTSSAARSLRTTPEPASHDGKVFSAAGFNGYSNNEHIDLSLAFALLNKQHPGSSSQLGFHSELGSSHQSDMEGMFGTSQQKENATYAFGNGSSGLGDPSRVLWGFPWQMNGESFGMMNIGGGGGHVDQIDSGREMWTNMNYINSGALM

SEQ ID NO: 341 - protein, 245 aa, Arabidopsis thaliana
  Clone ID: AT_F20D10.C1.p120.tg
MTSSHQSNTTGFKPRRIKTTAKPPRQINNKEPSPATQPVLKCPRCDSVNTKFCYYNNYSLSQPRHYCKNCRRYWTRGGALRNVPIGGSTRNKNKPCSLQVISSPPLFSNGTSSASRELVRNHPSTAMMMMSSGGFSGYMFPLDPNFNLASSSIESLSSFNQDLHQKLQQQRLVTSMFLQDSLPVNEKTVMFQNVELIPPSTVTTDWVFDRFATGGGATSGNHEDNDDGEGNLGNWFHNANNNALL

SEQ ID NO: 342 - protein, 260 aa, Arabidopsis thaliana
  Clone ID: AT_F24J8.C1.p13.tg
MLPYIGHNSYQQHQFPLPEMEIPEKWKLSYEQEAITAPACPRCASSNTKFCYYNNYSLSQPRYFCKGCRRYWTKGGSLRNIPVGGGCRKRSRSRQNSHKRFGRNENRPDGLINQDDGFQSSPPGSDIDLAAVFAQYVTDRSPSSTDNTTGSDQDSPITTTTHALESLSWDICQETDVDLGFYGEFNNLTQKTKEDQEVFGQFLQEDREEIFEFQGLLDDKEIQEILECSFSEEPDQLVSQGSFMINGDNWSSTDLTRFGI

SEQ ID NO: 343 - protein, 399 aa, Arabidopsis thaliana
  Clone ID: AT_T22P11.C1.p50.tg
MVFSSFPTYPDHSSNWQQQHQPITTTVGFTGNNINQQFLPHHPLPPQQQQTPPQLHHNNGNGGVAVPGGPGGLIRPGSMAERARLANIPLPETALKCPRCDSTNTKFCYFNNYSLTQPRHFCKACRRYWTRGGALRSVPVGGGCRRNKRTKNSSGGGGGSTSSGNSKSQDSATSNDQYHHRAMANNQMGPPSSSSSLSSLLSSYNAGLIPGHDHNSNNNNILGLGSSLPPLKLMPPLDFTDNFTLQYGAVSAPSYHIGGGSSGGAAALLNGFDQWRFPATNQLPLGGLDPFDQQHQMEQQNPGYGLVTGSGQYRPKNIFHNLISSSSSASSAMVTATASQLASVKMEDSNNQLNLSRQLFGDEQQLWNIHGAAAASTAAATSSWSEVSNNFSSSSTSNI

SEQ ID NO: 344 - protein, 249 aa, Arabidopsis thaliana
  Clone ID: AT_F7J7.C1.p20.tg
MDNLNVFANEDNQVNDVKPPPPPPRVCARCDSDNTKFCYYNNYCEFQPRYFCKNCRRYWTHGGALRNIPIGGSSRAKRARVNQPSVARMVSVETQRGNNQPFSNVQENVHLVGSFGASSSSSVGAVGNLFGSLYDIHGGMVTNLHPTRTVRPNHRLAFHDGSFEQDYYDVGSDNLLVNQQVGGYGYHMNPVDQFKWNQSFNNTMNMNYNNDSTSGSSRGSDMNVNHDNKKIRYRNSVIMHPCHLEKDGP

SEQ ID NO: 345 - protein, 438 aa, Arabidopsis thaliana
  Clone ID: AT_T18A20.C1.p9.tg
MDFTRNSNTKLHPQTQLLFPPNMEKNSNVSANPFAEDSLTSRINLKETTDFIKSLPISSNQSSSSSNEMVNERRPSFSSQKSIGEGRSNGQRRLMLMESPCTPGRGVFSFSSNVSGRRRNFPSKWIDAEKWVTSSGHDSPAHSLKNNQFDGFKHQVEVVYSEKSRVTEECFHGSVSLSPQDLILKDKLANEVPQILPSTEGFIFKDSDKFLRYEEAQVQHRDMGTEMTPIGSVTTSRCHTPFKSSSPARHNTPSQLSGPLTETKNVIDISEFEDKLRLSGSSTSQYCYSVTSHWNSREEEEEEISKSLRHFDMESELRRSVSESKAPLWDDEDDKIKYQREEAKIQAWVNLENAKAEAQSRKLEVKIQKMRSNLEEKLMKRMDMVHRRAEDWRATARQQHVEQMQKAAETARKLTNRRGYLVTGRSSCGCLPCNNTCH

SEQ ID NO: 346 - protein, 427 aa, Arabidopsis thaliana
  Clone ID: AT_C7A10.C1.p390.tg
MRKTSVSSNSFGGFLSPGAPSYADNKGWSSERVPHPSSTTSSSAINGGRRHIGSSSALTTPFYSGRAIPSKWEDAERWICSPVSTYPQGVCLNSSVSSEQRRQKSKSGPIVPPTLPHPHPTSSSSATGCYHYSPRMMMRSMDAPPKGLMVAGSPFSTGVLEADRVFRGSVGGGGCDGYGRGPGHGHSRSWVDLMSEETSSLSSKTDTEEKAEMTTAMQSPVVSRRDMATQMSPEETSPNNNNQSPPLVVSVIEPPPCRGEVREVKMDKGARMIKRPKRRVMSSRIIRREQPEVEDNSEASASSSSWDISEPAMTLSKLQREEAKIAAWENLQKAKAEAAIRKLEVKLEKKKSASMDKILNKLQTAKIKAQEMRRSSVSSEHEQQQGNHQISRNSVKITHLVRRHTFMTPFMTCFAPRVDCRKSSSAL

SEQ ID NO: 347 - protein, 263 aa, Arabidopsis thaliana
  Clone ID: AT_mfb13.C1.p50.tg
MDNLVKQRRRRVSISENIKTDLPMLSELDITDYPALNWLKNQSYWYEKNDYYNEKESELAVSVAVAAFVIRSMEEADKQKSKRIREEIKRSRTKKSNLVIPNTQVKRLSKSYTQEVKIGEESFRKKLLEYPSENRRPQEIGSSSGTSGLASASSKADSWEKSQIKKIRLRYEKMKADIVGWENERKLAATLLMEKRKSELEKRKGINNQHYKSKLARIQLIADGAKKQLEEKRRSKEAQVHGKVKKMSRTGKVPNNYFCFRCY

SEQ ID NO: 348 - protein, 509 aa, Arabidopsis thaliana
  Clone ID: AT_T4K22.C1.p7.tg
MDYERIQKVQKSIISPTKLRMKLMGPLNNMKREGSKSNSNSSRTSPSRLQIPDDSEFSKNSLLASNSYSDDDVAATTTDIEVAKLPNEPVLYPTENDNQGSKDRCEGVVPRENDQPRLQQFRKGDLNMASPHIMRPQEDENLDYDSNASSSSFEFHRARGERSNQNHGSRGYPSRQMPSKWNDAEKWIMSRQNMVMRKNGQGNRIPVRIVPDNAGYEHNKSRMDLCQSSQVDGFEKFPNVVPSAPHPILTQEYGGDSLIDQSTQSNDLADSSHDHTTGGPAIRSVCMRDMGTEMTPIPSQEPSRSVTPVGATTPLRSPTSSLPSTPRGGQPEESSMSKNTRRELSEEEEKAKTRREIVALGVQLGKMNIAAWASKEEEENKKNNGDAEEAQKIEFEKRATAWEEAEKSKHNARYKREEIRIQAWESQEKAKLEAEMRRIEAKVEQMKAEAEAKIMKKIALAKQRSEEKRALAEARKTRDAEKAVAEAQYIRETGRIPASSYKICCGWFS

SEQ ID NO: 349 - protein, 486 aa, Arabidopsis thaliana
  Clone ID: AT_F5O4.C1.p6.tg
MDYERIGKTQVTSSGGGFSPGKLRSMLLLGVDRKKNEEEESTPTMRSGSNQIDDPRVYVASGLDDCKDVDVVSEITDCSTSGIARSISLGLQEYSDYDNVNEIKSVSASSVFEFQKTEKEKVNQRMPIRSFSKPAPSKWDDAQKWIASPTANRPKTGQVQVPGSKKGPSFGRQSSMKIVEVAEHRVVEEPDTKRIDVSQVKKDMGNKFGSWEVDSYTTVDSYVKPVLMVENSIVESATEVNLSRHDSSVATAFAQPPSTARSVSMRDMGTEMTPIASQEPSRNGTPIRATTPIRSPISSEPSSPGRQASASPMSNKELSEKELQMKTRREIMVLGTQLGKFNIAAWASKEDEDKDASTSLKTKASLQTSKSVSEARATAWEEAEKAKHMARFRREEMKIQAWENHQKAKSEAEMKKTEVKVERIKGRAQDRLMKKLATIERKAEEKRAAAEAKKDHQAAKTEKQAEQIRRTGKVPSLLFSCFSFCS

SEQ ID NO: 350 - protein, 347 aa, Arabidopsis thaliana
  Clone ID: AT_F12B7.C1.p14.tg
MRSSVEDNKGWIGPATPEISNGFEFQKGSNRTPNHHRSTMGKPAPSKWDDAQKWLSGVGFARGGGGGGDKSSHHSRSNKPRNSNADDLRLIASASQREREGEDQYVEYDDEEMAAGRPEVETKNVDCGESVWRKESSINPTAVIRSVCVRDMGTEMTPIGSQEPSRTATPVRATTPVGRSPVTSPVRASQRGEAVGVVMETVTEVRRVESNNSEKVNGFVESKKAMSAMEARAMAWDEAERAKFMARYKREEVKIQAWENHEKRKAEMEMKKMEVKAERMKARAEEKLANKLAATKRIAEERRANAEAKLNEKAVKTSEKADYIRRSGHLPSSFSFSFKLPSRCWCQ

SEQ ID NO: 351 - protein, 116 aa, Arabidopsis thaliana
  Clone ID: AT_F6N23.C1.p13.tg
MEPNIPIQRGNSYHRVLVLFSFMLTQKKLLDISGWEKKKTTKIESELARIQRKMDSKKMEKSEKLRNEKAAVHAKAQKKKADVQTRRAQEILDAEEAAARFQAAGKIPKKSSLSCF

SEQ ID NO: 352 - protein, 212 aa, Arabidopsis thaliana
  Clone ID: AT_T20K12.C1.p160.tg
MAEEQKIALESESPAKVTTPAPADTPAPAPAEIPAPAPAPTPADVTKDVAEEKIQNPPPEQIFDDSKALTVVEKPVEEPAPAKPASASLDRDVKLADLSKEKRLSFVRAWEESEKSKAENKAEKKIADVHAWENSKKAAVEAQLKKIEEQLEKKKAEYAERMKNKVAAIHKEAEERRAMIEAKRGEDVLKAEETAAKYRATGIVPKATCGCF

SEQ ID NO: 353 - protein, 274 aa, Arabidopsis thaliana
  Clone ID: AT_T6D20.C1.p23.tg
MLTLYHQERSPDATSNDRDETPETVVREVHALTPAPEDNSRTMTATLPPPPAFRGYFSPPRSATTMSEGENFTTISREFNALVIAGSSMENNELMTRDVTQREDERQDELMRIHEDTDHEEETNPLAIVPDQYPGSGLDPGSDNGPGQSRVGSTVQRVKREEVEAKITAWQTAKLAKINNRFKREDAVINGWFNEQVNKANSWMKKIERKLEERKAKAMEKTQNNVAKAQRKAEERRATAEAKRGTEVAKVVEVANLMRALGRPPAKRSFFSFS

SEQ ID NO: 354 - protein, 202 aa, Arabidopsis thaliana
  Clone ID: AT_MRO11.C1.p21.tg
MAEEEPKKVTETVSEPTPTPEVPVEKPAAAADVAPQEKPVAPPPVLPSPAPAEEKQEDSKAIVPVVPKEVEEEKKEGSVNRDAVLARVETEKRMSLIKAWEEAEKCKVENKAEKKLSSIGSWENNKKAAVEAELKKMEEQLEKKKAEYVEQMKNKIAQIHKEAEEKRAMIEAKRGEEILKAEELAAKYRATGTAPKKLFGCM

SEQ ID NO: 355 - protein, 256 aa, Arabidopsis thaliana
  Clone ID: AT_T8H10.C1.p140.tg
MTTTTELTRPQQRGSGGGYLSPSRSIAFSDGTTSSGENFTTVSREFNALVIAGSSMDNNSNGTNQSGGHRDVIRDERNELTRIGENDDVGDHGQVPEEDSNPWAIVPDDYNNRDGSENNIVLASSGGQNRMVTTASVQRVKREEVEAKITAWQTAKVAKINNRFKRQDAVINGWLNEQVHRANSWMKKIERKLEDRRAKAMEKTQNKVAKAQRKAEERRATAEGKRGTEVARVLEVANLMRAVGRPPAKRSFFSLS

SEQ ID NO: 356 - protein, 879 aa, Arabidopsis thaliana
  Clone ID: AT_F12F1.C1.p18.tg
MEGEVATNGVILKHNGVKDISLETCWPEKKKPVEATSLSSGSSDIEEEISVECPKRVANQRRKRSKADEIKTKSSRKRKCDDENKCEENEKKQRSSVKKRATTWKEEEVVVDDEKKCEQQLQLVPSSKATSRSRSKKSVSVDTWLVNNEIDVSALSSRSESELSDSYLKTEYFNDCRSMTRSLKANLGELAICHQCSKGERRYLFICTFCEVRLYCFPCIKKWYPHLSTDDILEKCPFCRGTCNCCTCLHSSGLIETSKRKLDKYERFYHLRFLIVAMLPFLKKLCKAQDQEIETEAKVQDSMASQVDISESLCSNEERVFCNHCATSIVDLHRSCPKCSYELCLNCCQEIRGGWLSDRPECQLQFEYRGTRYIHGEAAEPSSSSVSEDETKTPSIKWNADENGSIRCAPKELGGCGDSVLELKRILPVTWMSDLEQKAETFLASYSIKPPMSYCRCSSDMSSMKRKAASRDGSSDNYLYSPDSLDVLKQEELLHFQEHWSKGEPVIVRNALNNTAGLSWEPMVMWRALCENVDSAISSNMSDVKAIDCLANCEVKINTLCFFEGYSKGRTYENFWPEMLKLKDWPPSDKFENLLPRHCDEFISALPFQEYSDPRSGILNIATKLPEGLLKPDLGPKTYVAYGTSDELGRGDSVTKLHCDMSDAVNILMHTAEVTLSEEQRSAIADLKQKHKQQNEKELQEQNGLEEEEVVSDEIVVYDETSGALWDIFKREDVPKLEEYLRKHCIEFRHTYCSRVTKVYHPIHDQSYFLTVEHKRKLKAEFGMVTWIEPWTFVQKLGEAVFIPAGCPHQVRNLKSCTKVAVDFVSPENIDECLRLTDEFRQLPKNHKAREDKLEIKKMVIYAVEQALKEVETLLLDRS

SEQ ID NO: 357 - protein, 728 aa, Arabidopsis thaliana
  Clone ID: AT_T6K22.C1.p160.tg
MSENEIVPDEFRCNRSDGKQWRCKRRALEGKKMCESHHSQQSLKRSKQKVAESSKLVRSRRGGGDEVASSEIEPNESRIRSKRLGKSKRKRVMGEAEAMDEAVKKMKLKRGDLQLDLIRMVLKREVEKRKRLPNSNNKKKSNGGFSEFVGEELTRVLPNGIMAISPPSPTTSNVSSPCDVKVGEEPISMIKRRFRSKNIEPLPIGKMQDSQSVRSDIDRVLHLHYAVCMLLPVLKEINAEHKVEVENDAEKKVDLQRMCTRSSSVLRLNSDQDQSQESLSRKVGSVKCSNGIKSPKVLLDFHQNNLEHFQTHWSKGHPVIVRSVIKSGSSLNWDPVALFCHYLMNRNNKTGNTTDCMDWFEVEIGVKQFFLGSLRGKAETNTCQERLKLEGWLSSSLFKEQFPNHYAEILNILPISHYMDPKRGLLNIAANLPDTVQPPDFGPCLNISYRSGEEYAQPDSVKKLGFETCDMVDILLYVTETPVSTNQICRIRKLMKNIGRVRSKNPAKGRESRFDKGKKRDRLDDYSSSDSESSQHCLGAKCRGSEFEGEERESCNYSCEEESLSNTYGAQWDVFQKQDVSKLLEYIKNHSLELESMDSSKKKVSHPLLEQSYYLDEYHKARLKEEFDVEPWSFDQCVGEAVILPAGCPYQIRKNKSCVNAVLKFLSPEHVSESIKRVKELNQLPQSVKSKANKIEVKKMAIHKISEAVKEIRELTSSDSTGALRLYN

SEQ ID NO: 358 - protein, 911 aa, Arabidopsis thaliana
  Clone ID: AT_F7G19.C1.p7.tg
MQVNFDETCDSVIRMNANEQTRSANGIGNGNGESIPGIPDDLRCKRSDGKQWRCTAMSMADKTVCEKHYIQAKKRAANSAFRANQKKAKRRSSLGETDTYSEGKMDDFELPVTSIDHYNNGLASASKSNGRLEKRHNKSLMRYSPETPMMRSFSPRVAVDLNDDLGRDVVMFEEGYRSYRTPPSVAVMDPTRNRSHQSTSPMEYSAASTDVSAESLGEICHQCQRKDRERIISCLKCNQRAFCHNCLSARYSEISLEEVEKVCPACRGLCDCKSCLRSDNTIKVRIREIPVLDKLQYLYRLLSAVLPVIKQIHLEQCMEVELEKRLREVEIDLVRARLKADEQMCCNVCRIPVVDYYRHCPNCSYDLCLRCCQDLREESSVTISGTNQNVQDRKGAPKLKLNFSYKFPEWEANGDGSIPCPPKEYGGCGSHSLNLARIFKMNWVAKLVKNAEEIVSGCKLSDLLNPDMCDSRFCKFAEREESGDNYVYSPSLETIKTDGVAKFEQQWAEGRLVTVKMVLDDSSCSRWDPETIWRDIDELSDEKLREHDPFLKAINCLDGLEVDVRLGEFTRAYKDGKNQETGLPLLWKLKDWPSPSASEEFIFYQRPEFIRSFPFLEYIHPRLGLLNVAAKLPHYSLQNDSGPKIYVSCGTYQEISAGDSLTGIHYNMRDMVYLLVHTSEETTFERVRKTKPVPEEPDQKMSENESLLSPEQKLRDGELHDLSLGEASMEKNEPELALTVNPENLTENGDNMESSCTSSCAGGAQWDVFRRQDVPKLSGYLQRTFQKPDNIQTDFVSRPLYEGLFLNEHHKRQLRDEFGVEPWTFEQHRGEAIFIPAGCPFQITNLQSNIQVALDFLCPESVGESARLAEEIRCLPNDHEAKLQILEIGKISLYAASSAIKEVQKLVLDPK

SEQ ID NO: 359 - protein, 730 aa, Arabidopsis thaliana
  Clone ID: AT_F3I3.C1.p10.tg
PPSEKDTDVKLKQLQYLLVKVLPVLKDIYTEQNRELEIESTIRGHPVTEANIKRCKLDPSERIYCDLCRTSIANFHRSCPNKNCSVDICLSCCKELSEGFHQERDGKKNAEGKGYECRIPAGQGKDSDAYVPLHFSTWKLNSDSSIPCPPKECGGCGTSTLELRRLWKRDWVEKLITNAEKCTLNFRPTDVDIVHECSSCSTNSDSIRRQAAFRKNAHDNFLYSPNAVDLAEDDIAHFQFHWMKAEPVIVRNVLEKTSGLSWEPMVMWRACREMDPKRKGTEEETTKVKALDCLDWCEVEINLHQFFEGYLEGRMHKNGWPEMLKLKDWPPSDLFEKRLPRHNAEFIAALPFFDYTDPKSGILNLATRFPEGSLKPDLGPKTYIAYGFHEELNRGDSVTKLHCDISDAVNVLTHTAKVEIPPVKYQNIKVHQKKYAEAMLQKQQYSGQVKEASELENKSMKEVDESKKDLKDKAANEEQSNNSSRPSGSGEAEKVIISKGIARIRELSHSYVYKHMLLNMENGLMMPTLLATPPCDTEDNPTQPAVSTSVESIQEQKLDAPKETDGNTNERSKAVHGGAVWDIFRREDVPKLIQFLKRHEHEFRHFNNEPLESVIHPIHDQTMFLSDSQKKQLKEEFDIEPWTFEQHLGEAVFIPAGCPHQVRNRQVALDFVAPESVEECLRLTQEFRRLPKDHSSSEDKLELKKIALYAASSAIREVKGLMQSSRRSDT

SEQ ID NO: 360 - protein, 1027 aa, Arabidopsis thaliana
  Clone ID: AT_MLP3.C1.p6.tg
MDSVEEEGVVRVEEENGRGGLRRHRRVSTKLANYVDPPTDDEEDGGPKRKGKRGGNRAPKKTPKKDEEMQKNEIDEANRVTGLVKEKRAATKILNRKDSIIEVGEASGSMPKEVKGIRIGKRKGEIDGEIPTKPGKKPKTTVDPRIIGYRPDNMCHQCQKSDRIVERCQTCNSKRYCHPCLDTWYPLIAKEDVAKKCMFCSSTCNCRACLRLDTKLKGINSNLIVSEEEKVQASKFILQSLLPHLKGINDEQVAEKEVEAKIYGLKFEEVRPQDAKAFPDERLYCDICKTSIYDLHRNCKSCSFDICLSCCLEIRNGKALACKEDVSWNYINRGLEYEHGQEGKVIEKPANKLDDKLKDKLDGKPDDKPKGKPKGRPKGKPDDKPKGKLKGKQDDKPDDKPDEKPVNTDHMKYPSLWKANEAGIITCCCGAGELVLKRLLPDGWISELVNRVEKTAEAGELLNLPETVLERCPCSNSDRHIDIDSCNLLKAACREGSEDNYLYSPSVWDVQQDDLKHFQHHWVKGEPVIVRNVLEATSGLSWEPMVMHRACRQISHVQHGSLKDVVAVDCLDFCEVKVNLHEFFTGYTDGRYDRMGWPLVLKLKDWPPAKVFKDNLPRHAEEFLCSLPLKHYTHPVNGPLNLAVKLPQNCLKPDMGPKTYVASGFAQELGRGDSVTKLHCDMSDAVNILTHISEVPNMQPGIGNLKKKHAEQDLKELYSSVANKEEMMEILENSRQQVQNVETDDGALWDIFRREDIPKLESYIEKHHKEFRHLYCCPVSQVVHPIHDQNFYLTRYHIMKLKEEYGIEPWTFNQKLGDAVLIPVGCPHQVRNLKSCNKVALDFVSPENVSECLRLTKQYRLLPPNHFAKEDKLGVKKMIVHAVDKALRDLSGEKSPEPEEKKQNMRGPKKGAAKAVAKALKDLSPSEKKSSEAAEEEISNGIVNAIDKGLKDLPPSEEKSSEAKVEISNGIVSAMDKDLEHISSSEKKSTEEEGVKRPNIVRTYERRKKLGSEVTNAYIDRLEMEKM

SEQ ID NO: 361 - protein, 883 aa, Arabidopsis thaliana
  Clone ID: AT_F24O1.C1.p33.tg
MDSGVKLEHMNCFQLSYQYSWTTRKKRTLKPFMSKGSSPSSSSDSRKRKLSRAEDSDDSAVKRNAKRRRKICKVEEYYEDDDCILSDWVQRNTAKRIDKRNEEVEVMVKIESGDDCTIGKWFSDVSSKRKDKRQVEVDEDEEWEEEVTLCSKIKATSSRSRTHSLSANSPENVTDVISPCRSRSPASNVSDSIQKNDCTSSRKQSGPICHQCLKGERITLLICSECEKTMFCLQCIRKWYPNLSEDDVVEKCPLCRQNCNCSKCLHLNGLIETSKRELAKSERRHHLQYLITLMLPFLNKLSIFQKLEIEFEATVQGKLPSEVEITAAISYTDERVYCDHCATSIVDLHRSCPKCSYELCLKCCQEIREGSLSERPEMKFHYVDRGHRYMHGLDAAEPSLSSTFEDEEANPSDAKWSLGENGSITCAPEKLGGCGERMLELRRILPLTWMSDLEHKAETFLSSYNISPRMLNCRCSSLETELTRKSASRTTSSDNYLFCPESLGVLKEEELLHFQEHWAKGEPVIVRNALDNTPGLSWEPMVMWRALCENVNSTSSSEMSQVKAIDCLANCEVEINTRQFFEGYSKGRTYENFWPEMLKLKDWPPSDKFEDLLPRHCDEFISALPFQEYSDPRTGILNIATKLPEGFIKPDLGPKTYIAYGIPDELGRGDSVTKLHCDMSDAVNILTHTAEVTLSQEQISSVKALKQKHKLQNKVDKQSTEDCNEKEEEEEEELNMPEISSNENEETGSALWDIFRREDVPKLEEYLRKHCKEFRHTYCSPVTKVYHPIHDQSCYLTLEHKRKLKAEYGIEPWTFVQKLGEAVFIPAGCPHQVRNLKSCTKVAVDFVSPENIHECLRLTEEFRQLPKNHKAREDKLEASLLSL

SEQ ID NO: 362 - protein, 461 aa, Arabidopsis thaliana
  Clone ID: AT_K14A3.C1.p9.tg
MLQTGTPLWRNGPPEKPVLCNACGSRWRTKGSLVNYTPLHARAEGDETEIEDHRTQTVMIKGMSLNKKIPKRKPYQENFTVKRANLEFHTGFKRKALDEEASNRSSSGSVVSNSESCAQSNAWDSTFPCKRRTCVGRPKAASSVEKLTKDLYTILQEQQSSCLSGTSEEDLLFENETPMLLGHGSVLMRDPHSGAREEESEASSLLVESSKSSSVHSVKFGGKAMKQEQVKRSKSQVLGRHSSLLCSIDLKDVFNFDEFIENFTEEEQQKLMKLLPQVDSVDRPDSLRSMFESSQFKENLSLFQQLVADGVFETNSSYAKLEDIKTLAKLALSDPNKSHLLESYYMLKRREIEDCVTTTSRVSSLSPSNNNSLVTIERPCESLNQNFSETRGVMRSPKEVMKIRSKHTEENLENSVSSFKPVSCGGPLVFSYEDNDISDQDLLLDVPSNGSFPQAELLNMI

SEQ ID NO: 363 - protein, 315 aa, Arabidopsis thaliana
  Clone ID: AT_T1B3.C1.p14.tg
MNNDLWLPEEDFKGLPDNFLDNLVDPTNDVSVEDIETGDDEGDWDAKFQKLVPPPLDELMSLSYEFTCNGQRVQVQKHVPILLVILSQMYMDLNGFQFGNWDVVIEKQSSSSEVFSTVDNSPPNVKVSKLLQSLSPVSVLKNTNGSGSPQNPNGDQKLAFLVKGIRSKRKRPTLLRVTFLKSFLLEMSQQFAPDESESSEISALKKRKKNKSRRLKCTHCETTTTPQWREGPNGRKTLCNACGIRFRSGRLVLEYRPAASPTFIPTVHSNLHKKIIYMRMKDNDQFDTRKIRAETSGPETRSRLRNFGRPMSYGQ

SEQ ID NO: 364 - protein, 120 aa, Arabidopsis thaliana
  Clone ID: AT_F2P16.C1.p190.tg
MDPRKLLSCSSSYVSVRMKEEKGTIRCCSECKTTKTPMWRGGPTGPKSLCNACGIRHRKQRRSELLGIHIIRSHKSLASKKINLLSSSHGGVAVKKRRSLKEEEQAALCLLLLSCSSVLA

SEQ ID NO: 365 - protein, 211 aa, Arabidopsis thaliana
  Clone ID: AT_C7A10.C1.p740.tg
MGFSMFFSPENDVSHHSSPYASVDCTLSLGTPSTRLCNEDDERRFSSHTSDTIGWDFLNGSKKGGGGGGHNLLARRCANCDTTSTPLWRNGPRGPKSLCNACGIRFKKEERRASTARNSTSGGGSTAAGVPTLDHQASANYYYNNNNQYASSSPWHHQHNTQRVPYYSPANNEYSYVDDVRVVDHDVTTDPFLSWRLNVADRTGLVHDFTM

SEQ ID NO: 366 - protein, 139 aa, Arabidopsis thaliana
  Clone ID: AT_K21P3.C1.p18.tg
MLDHSEKVLLVDSETMKTRAEDMIEQNNTSVNDKKKTCADCGTSKTPLWRGGPVGPKSLCNACGIRNRKKRRGGTEDNKKLKKSSSGGGNRKFGESLKQSLMDLGIRKRSTVEKQRQKLGEEEQAAVLLMALSYGSVYA

SEQ ID NO: 367 - protein, 204 aa, Arabidopsis thaliana
  Clone ID: AT_T14D3.C1.p110.tg
MSGREDEEEDLGTAMQKIPIPVNVFDKEPMDLDTVFGFADGVREIIEDSNLLLEESREFDTNDSKPSRNFSNLPTATRGRLHAPKRSGNKRGRQKRLSFKSPSDLFDSKFGITDKSCSHCGTRKTPLWREGPRGAGTLCNACGMRYRTGRLLPEYRPASSPDFKPNVHSNFHRKVMEIRRERKSSPPNSFGFSESYHSTRKLGF

SEQ ID NO: 368 - protein, 398 aa, Arabidopsis thaliana
  Clone ID: AT_MPI10.C1.p2.tg
MDSNFHYSIDLNEDQNHHEQPFFYPLGSSSSLHHHHHHHHHQVPSNSSSSSSSISSLSSYLPFLINSQEDQHVAYNNTYHADHLHLSQPLKAKMFVANGGSSACDHMVPKKETRLKLTIRKKDHEDQPHPLHQNPTKPDSDSDKWLMSPKMRLIKKTITNNKQLIDQTNNNNHKESDHYPLNHKTNFDEDHHEDLNFKNVLTRKTTAATTENRYNTINENGYSNNNGVIRVCSDCNTTKTPLWRSGPRGPKSLCNACGIRQRKARRAAMAAAAAAGDQEVAVAPRVQQLPLKKKLQNKKKRSNGGEKYNHSPPMVAKAKKCKIKEEEEKEMEAETVAGDSEISKSTTSSNSSISSNKFCFDDLTIMLSKSSAYQQVFPQDEKEAAVLLMALSYGMVHG

SEQ ID NO: 369 - protein, 322 aa, Arabidopsis thaliana
  Clone ID: AT_F28P10.C1.p210.tg
MIGTSFPEDLDCGNFFDNMDDLMDFPGGDIDVGFGIGDSDSFPTIWTTHHDTWPAASDPLFSSNTNSDSSPELYVPFEDIVKVERPPSFVEETLVEKKEDSFSTNTDSSSSHSQFRSSSPVSVLESSSSSSQTTNTTSLVLPGKHGRPRTKRPRPPVQDKDRVKDNVCGGDSRLIIRIPKQFLSDHNKMINKKKKKKAKITSSSSSSGIDLEVNGNNVDSYSSEQYPLRKCMHCEVTKTPQWRLGPMGPKTLCNACGVRYKSGRLFPEYRPAASPTFTPALHSNSHKKVAEMRNKRCSDGSYITEENDLQGLIPNNAYIGVD

SEQ ID NO: 370 - protein, 312 aa, Arabidopsis thaliana
  Clone ID: AT_F24M12.C1.p120.tg
MESVELTLKNSNMKDKTLTGGAQNGDDFSVDDLLDFSKEEEDDDVLVEDEAELKVQRKRGVSDENTLHRSNDFSTADFHTSGLSVPMDDIAELEWLSNFVDDSSFTPYSAPTNKPVWLTGNRRHLVQPVKEETCFKSQHPAVKTRPKRARTGVRVWSHGSQSLTDSSSSSTTSSSSSPRPSSPLWLASGQFLDEPMTKTQKKKKVWKNAGQTQTQTQTQTRQCGHCGVQKTPQWRAGPLGAKTLCNACGVRYKSGRLLPEYRPACSPTFSSELHSNHHSKVIEMRRKKETSDGAEETGLNQPVQTVQVVSSF

SEQ ID NO: 371 - protein, 308 aa, Arabidopsis thaliana
  Clone ID: AT_F26P21.C1.p10.tg
MEKIAPELFLVAGNPDSFVVDDLLDFSNDDGEVDDGLNTLPDSSTLSTGTLTDSSNSSSLFTDGTGFSDLYIPNDDIAELEWLSNFVEESFAGEDQDKLHLFSGLKNPQTTGSTLTHLIKPEPELDHQFIDIDESNVAVPAKARSKRSRSAASTWASRLLSLADSDETNPKKKQRRVKEQDFAGDMDVDCGESGGGRRCLHCATEKTPQWRTGPMGPKTLCNACGVRYKSGRLVPEYRPASSPTFVMARHSNSHRKVMELRRQKEMRDEHLLSQLRCENLLMDIRSNGEDFLMHNNTNHVAPDFRHLI

SEQ ID NO: 372 - protein, 208 aa, Arabidopsis thaliana
  Clone ID: AT_MOE17.C1.p4.tg
MEPELDLTLKLGLPNSTVETHLTLSPPTTTTDQGTNVVDGGEVINHRRGLLGDDEVIHNEPTRNNVEFNIRIYNYVFQQFVGAPNTLNFAPYPMPPSPAPAPETPPVSDEYVLIDVPARRARRNNSTVMTNSWKENATPKRIRGCGGFCGGRIEGMKKCTNMNCNALNTPMWRRGPLGPKSLCNACGIKFRKEEERKAKRNVVIVLDD

SEQ ID NO: 373 - protein, 136 aa, Arabidopsis thaliana
  Clone ID: AT_F3E22.C1.p12.tg
MESKLTSVDAIEEHSSSSSNEAISNEKKSCAICGTSKTPLWRGGPAGPKSLCNACGIRNRKKRRTLISNRSEDKKKKSHNRNPKFGDSLKQRLMELGREVMMQRSTAENQRRNKLGEEEQAAVLLMALSYASSVYA

SEQ ID NO: 374 - protein, 190 aa, Arabidopsis thaliana
  Clone ID: AT_MUH15.C1.p3.tg
MSEGSEDTKTKLDSAGELSDVDNENCSSSGSGGGSSSGDTKRTCVDCGTIRTPLWRGGPAGPKSLCNACGIKSRKKRQAALGMRSEEKKKNRKSNCNNDLNLDHRNAKKYKINIVDDGKIDIDDDPKICNNKRSSSSSSNKGVSKFLDLGFKVPVMKRSAVEKKRLWRKLGEEERAAVLLMALSCSSVYA

SEQ ID NO: 375 - protein, 294 aa, Arabidopsis thaliana
  Clone ID: AT_F18B3.C1.p150.tg
MQTPYTTSTQGQYCHSCGMFHHHSQSCCYNNNNNSNAGSYSMVFSMQNGGVFEQNGEDYHHSSSLVDCTLSLGTPSTRLCEEDEKRRRSTSSGASSCISNFWDLIHTKNNNSKTAPYNNVPSFSANKPSRGCSGGGGGGGGGGGGDSLLARRCANCDTTSTPLWRNGPRGPKSLCNACGIRFKKEERRTTAATGNTVVGAAPVQTDQYGHHNSGYNNYHAATNNNNNNGTPWAHHHSTQRVPCNYPANEIRFMDDYGSGVANNVESDGAHGGVPFLSWRLNVADRASLVHDFTR

SEQ ID NO: 376 - protein, 352 aa, Arabidopsis thaliana
  Clone ID: AT_F20B18.C1.p260.tg
MGSNFHYTIDLNEDQNHQPFFASLGSSLHHHLQQQQQQQQHFHHQASSNPSSLMSPSLSYFPFLINSRQDQVYVGYNNNTFHDVLDTHISQPLETKNFVSDGGSSSSDQMVPKKETRLKLTIKKKDNHQDQTDLPQSPIKDMTGTNSLKWISSKVRLMKKKKAIITTSDSSKQHTNNDQSSNLSNSERQNGYNNDCVIRICSDCNTTKTPLWRSGPRGPKSLCNACGIRQRKARRAAMATATATAVSGVSPPVMKKKMQNKNKISNGVYKILSPLPLKVNTCKRMITLEETALAEDLETQSNSTMLSSSDNIYFDDLALLLSKSSAYQQVFPQDEKEAAILLMALSHGMVHG

SEQ ID NO: 377 - protein, 309 aa, Arabidopsis thaliana
  Clone ID: AT_T22A6.C1.p300.tg
MFGRHSIIPNNQIGTASASAGEDHVSASATSGHIPYDDMEEIPHPDSIYGAASDLIPDGSQLVAHRSDGSELLVSRPPEGANQLTISFRGQVYVFDAVGADKVDAVLSLLGGSTELAPGPQVMELAQQQNHMPVVEYQSRCSLPQRAQSLDRFRKKRNARCFEKKVRYGVRQEVALRMARNKGQFTSSKMTDGAYNSGTDQDSAQDDAHPEISCTHCGISSKCTPMMRRGPSGPRTLCNACGLFWANRGTLRDLSKKTEENQLALMKPDDGGSVADAANNLNTEAASVEEHTSMVSLANGDNSNLLGDH

SEQ ID NO: 378 - protein, 287 aa, Arabidopsis thaliana
  Clone ID: AT_F13M14.C1.p13.tg
MDAAIPIWKRDDDKRFELALVRFPAEGSPDFLENIAQFLQKPLKEVYSYYQALVDDVTLIESGKYPLPKYPEDDYVSLPEATKSKTQGTGKKKGIPWSPEEHRLFLDGLNKYGKGDWKSISRECVTSRSPMQVASHAQKYFLRQKNKKGKRFSIHDMTLGDAENVTVPVSNLNSMGQQPHFDDQSPPDHYQDYFSQSNVTIPGCNMHFMGQQPRFGDQIPPGEYHPYSRDNVTVTGSNLNSIGQQPHFNDQISPDQYGRYLQENFGFFDDDGEDDGSLASFQQLYKA

SEQ ID NO: 379 - protein, 410 aa, Arabidopsis thaliana
  Clone ID: AT_MGH6.C1.p15.tg
MYIKAIMNRHRLLSAATDECNKKLGQACSSSLSPVHNFLNVQPEHRKTPFIRSQSPDSPGQLWPKNSSQSTFSRSSTFCTNLYLSSSSTSETQKHLGNSLPFLPDPSSYTHSASGVESARSPSIFTEDLGNQCDGGNSGSLLKDFLNLSGDACSDGDFHDFGCSNDSYCLSDQMELQFLSDELELAITDRAETPRLDEIYETPLASNPVTRLSPSQSCVPGAMSVDVVSSHPSPGSAANQKSRMRWTPELHESFVKAVIKLEGPEKKRTDNSEEKKLALSKSEADEKKKGAIQLTEALRMQMEVQKQLHEQLEVQRVLQLRIEEHAKYLEKMLEEQRKTGRWISSSSQTVLSPSDDSIPDSQNMSKTKASSPQPPLPAENKASETEDDKCESPQKRRRLENIAESEDPKR

SEQ ID NO: 380 - protein, 200 aa, Arabidopsis thaliana
  Clone ID: AT_T15G18.C1.p130.tg
MAAFPQWTRVDDKRFELALLQIPEGSPNFIENIAYYLQKPVKEVEYYYCALVHDIERIESGKYVLPKYPEDDYVKLTEAGESKGNGKKTGIPWSEEEQRLFLEGLNKFGKGDWKNISRYCVKSRTSTQVASHAQKYFARQKQESTNTKRPSIHDMTLGVAVNVPGSNLESTGQQPHFGDQIPSNQYYPSQENFRGFDQRW

SEQ ID NO: 381 - protein, 317 aa, Arabidopsis thaliana
  Clone ID: AT_k11j9.C1.p140.tg
MVKETVTVAKTCSHCGHNGHNARTCLNGVNKASVKLFGVNISSDPIRPPEVTALRKSLSLGNLDALLANDESNGSGDPIAAVDDTGYHSDGQIHSKKGKTAHEKKKGKPWTEEEHRNFLIGLNKLGKGDWRGIAKSFVSTRTPTQVASHAQKYFIRLNVNDKRKRRASLFDISLEDQKEKERNSQDASTKTPPKQPITGIQQPVVQGHTQTEISNRFQNLSMEYMPIYQPIPPYYNFPPIMYHPNYPMYYANPQVPVRFVHPSGIPVPRHIPIGLPLSQPSEASNMTNKDGLDLHIGLPPQATGASDLTGHGVIHVK

SEQ ID NO: 382 - protein, 287 aa, Arabidopsis thaliana
  Clone ID: AT_F22L4.C1.p14.tg
MVTVNPSQAHCLPMKMSLPGFNTLPHTATTIPVSIRSNRTMSFFEDPTKKVRKPYTITKSRENWTEQEHDKFLEALHLFDRDWKKIKAFVGSKTVIQIRSHAQKYFLKVQKNGTKEHLPPPRPKRKANHPYPQKAPKFTLSSSNALFQHDYLYNTNSHPVISTTRKHGLVHCDVSIPSSVIKEEFGVSENCCSTSSSRDKQRTRIVTETNDQESCGKPHRVAPNFAEVYNFIGSVFDPKTTGHVKRLKEMDPINLETVLLLMKNLSVNLTSPEFDEQRKLISSYNAS

SEQ ID NO: 383 - protein, 691 aa, Arabidopsis thaliana
  Clone ID: AT_mtg10.C1.p130.tg
MNVEGITRSQIASHLQKYRKHMRRFKVNVTKADISKKAMKSNFESSSNINPQCSYNYLGLTKENLFKSQIGDTLGQSSLLLNNNDSIHSMYDGSIYGLNEPESNLSPMRESVGFSRGVLPLNEESECAFETSQMSQVPRRGQYGTPSDISGINSNLGTGYMCNSYAGISIDKNGHMLGLGGAIVDSNGNGHLGESLGAMNWNLNNNDVRNYESSTSRFSSPFSSFLHNKVQPHHNLISQTDGLLSTSILDTSQVPSFGQYGIPNDVVGMEPEFGTSYMHSNYNGINTDQVGNLVGLGRERVNVNGNVSLGQNLGSMNWNFDENNMSNHGSSTSRFSSPFSSFEDQSLSHLNEETNELVPGLENLSLYNDHQSINPFLGNTINSHFVENQDQGLVNNENLEFANDDQLERNEILTTYSVEDINNLSINNVKLNSNGETLNSTAANLEMLFPTLDMNIVNQHQGQVLSGGNLEFANDNQLERNAILAGYSIEDINNLSINNHQGQVLSGVNFEFANDNQFERNAILAGYSIEDINNLSINNVNDNSNEETLNSIAANNEMNFTILDVNTINQVNGNSNEETLNSIVANSEINFTTLDVNTINQVDNNFNEETLNSIAANSEMNFTTLDVNIINEEEQGAVDMMDIVITFDEEEEDVAALTDIPEQDVEILTDVPEQGVTDLTDVPLTFDQVIF

SEQ ID NO: 384 - protein, 346 aa, Arabidopsis thaliana
  Clone ID: AT_K13E13.C1.p20.tg
MTNLDEFLEELSSIESHSQKIVKIDEHLKKLDEETKEDEDEDAAKIIQDRSTAREAEIALLMDLRQNFLPPPSMSSSSLQPPSSSTLAPSSSSSLQPPAPLIDFFRSSVSYSHQPPSSSTLATSSSPSLQPPSMSSSSLQPPASLREFFTSSVSYSHQPSSSSTLATSSFFPSSMPYSVRPPDSSDRPSLREFFPSSPSSSIQPPESSSSKRARLSNIFPSPLSSSPSPFVNPFLRPQAQEPTIPNFINPIPQISPGLPALFPNPNPNPNPNPIPNPIRNPDLVWTNRLQLVFDDAVVRLGGLFSATPKAINELISEEGLTGDQIRSHLQVLRDRQKAIADKLALE

SEQ ID NO: 385 - protein, 483 aa, Arabidopsis thaliana
  Clone ID: AT_T6K21.C1.p200.tg
MVITANDLSKWENFPKGLKVLLLLNGCDSDGDGSSAAETRSELESMDYIVTTFTDETEALSAVVKNPESFHIAIVEVNMSAESESFKFLEAAKDVLPTIMISTDHCITTTMKCIALGAVEFLQKPLSPEKLKNIWQHVVHKAFNDGGSNVSISLKPVKESVVSMLHLETDMTIEEKDPAPSTPQLKQDSRLLDGDCQENINFSMENVNSSTEKDNMEDHQDIGESKSVDTTNRKLDDDKVVVKEERGDSEKEEEGETGDLISEKTDSVDIHKKEDETKPINKSSGIKNVSGNKTSRKKVDWTPELHKKFVQAVEQLGVDQAIPSRILELMKVGTLTRHNVASHLQHRKNILPKDDHNHRWIQSRENHRPNQRNYNVFQQQHRPVMAYPVWGLPGVYPPGAIPPLWPPPLQSIGQPPPWHWKPPYPTVSGNAWGCPVGPPVTGSYITPSNTTAGGFQYPNGAETGFKIMPASQPVSVNNSLFSF

SEQ ID NO: 386 - protein, 337 aa, Arabidopsis thaliana
  Clone ID: AT_T6J4.C1.p6.tg
MDYNQKRERCGQYIEALEEERRKIHVFQRELPLCLDLVTQAIEACKRELPEMTTENMYGQPECSEQTTGECGPVLEQFLTIKDSSTSNEEEDEEFDDEHGNHDPDNDSEDKNTKSDWLKSVQLWNQPDHPLLPKEERLQQETMTRDESMRKDPMVNGGEGRKREAEKDGGGGRKQRRCWSSQLHRRFLNALQHLGGPHVATPKQIREFMKVDGLTNDEVKSHLQKYRLHTRRPRQTVPNNGNSQTQHFVVVGGLWVPQSDYSTGKTTGGATTSSTTTTTGIYGTMAAPPPPQWPSHSNYRPSIIVDEGSGSHSEGVVVRCSSPAMSSSTRNHYVKNN

SEQ ID NO: 387 - protein, 341 aa, Arabidopsis thaliana
  Clone ID: AT_F11A3.C1.p5.tg
MIPNDDDDANSMKNYPLNDDDANSMKNYPLNDDDANSMENYPLRSIPTELSHTCSLIPPSLPNPSEAAADMSFNSELNQIMARPCDMLPANGGAVGHNPFLEPGFNCPETTDWIPSPLPHIYFPSGSPNLIMEDGVIDEIHKQSDLPLWYDDLITTDEDPLMSSILGDLLLDTNFNSASKVQQPSMQSQIQQPQAVLQQPSSCVELRPLDRTVSSNSNNNSNSNNAAAAAKGRMRWTPELHEVFVDAVNQLGGSNEATPKGVLKHMKVEGLTIFHVKSHLQSLRTMQLRIEEQGKALLMMIEKQNMGFGGPEQGEKTSAKTPENGSEESESPRPKRPRNEE

SEQ ID NO: 388 - protein, 402 aa, Arabidopsis thaliana
  Clone ID: AT_MRG7.C1.p20.tg
MYYHNQHQGKSILSSSRMPISSERHPFLRGNGTGDSGLILSTDAKPRLKWTPDLHERFVEAVNQLGGGDKATPKTIMKVMGIPGLTLYHLKSHLQKYRLSKNLNGQANSSLNKTSVMTMVEENPPEVDESHSESLSIGPQPSMNLPISDALQMQIEVQRRLHEQLEVQRHLQLRIEAQGKYLQSILEKAQETLGRQNLGAAGIEATKAQLSELVSKVSADYPDSSFLEPKELQNLHHQQMQKTYPPNSSLDSCLTSSEGTQKAPKMLDNRLGLRTYIGDSTSEQKEIMEEPFFHRMELTWAEEESLRENHNRPYLSTMVNNAEPRISSSRRSPGRLSIGVGLHEHRGRSSNNSEYTEERFNENNEDCKLETHTRTALDLNTHDENYGTTRPKQFDLNGFSWN

SEQ ID NO: 389 - protein, 248 aa, Arabidopsis thaliana
  Clone ID: AT_T20B5.C1.p17.tg
MREDNPNWFLRWEEELPSPEELIPISQTLITPHLALAFQIGSPNHHLGSKRTTAIYHQKLQSSTTPTTPTPTPPPMMMNSDFGGGDSTDLGSGSIGGEPARTLKRPRLVWTPQLHKRFVDAVGHLGIKNAVPKTIMQLMSVEGLTRENVASHLQKYRLYLRRMQGGNGNGITGGHVIVSDSATDRLFASSPVPAHFLSPDYLMPPLEHSYMGKHVITQQNQVVRNLRYEDSEYGHGSMKMLKLFPAGN

SEQ ID NO: 390 - protein, 276 aa, Arabidopsis thaliana
  Clone ID: AT_MFO20.C1.p5.tg
MMMLESRNSMRASNSVPDLSLQISLPNYHAGKPLHGGDRSSTSSDSGSSLSDLSHENNFFNKPLLSLGFDHHHQRRSNMFQPQIYGRDFKRSSSSMVGLKRSIRAPRMRWTSTLHAHFVHAVQLLGGHERATPKSVLELMNVKDLTLAHVKSHLQMYRTVKCTDKGSPGEGKVEKEAEQRIEDNNNNEEADEGTDTNSPNSSSVQKTQRASWSSTKEVSRSISTQAYSHLGTTHHTKDNEEKEDTNIHLNLDFTLGRPSWGMEYAEPSSDLTLLKC

SEQ ID NO: 391 - protein, 291 aa, Arabidopsis thaliana
  Clone ID: AT_MUJ8.C1.p3.tg
MYSAIRSLPLDGGHVGGDYHGPLDGTNLPGDACLVLTTDPKPRLRWTTELHERFVDAVTQLGGPDKATPKTIMRTMGVKGLTLYHLKSHLQKFRLGRQAGKESTENSKDGESQDTGSSSTSSMRMAQQEQNEGYQVTEALRAQMEVQRRLHDQLEVQRRLQLRIEAQGKYLQSILEKACKAFDEQAATFAGLEAAREELSELAIKVSNSSQGTSVPYFDATKMMMMPSLSELAVAIDNKNNITTNCSVESSLTSITHGSSISAASMKKRQRGDNLGVGYESGWIMPSSTIG

SEQ ID NO: 392 - protein, 374 aa, Arabidopsis thaliana
  Clone ID: AT_MPH15.C1.p16.tg
MDNINFEFSNASQGSRLQLQQQPPQPFNLQDLNMIQYNQPSSPWTTETFSGLTPYDCTANQSFPVQCSSSKPYPSSFHPYHHQSSDSPSLDQSVSMIPMQPLPDQYMKPLYQRSCSNDFAATNASSASYSLSFEASHDPQELCRRTYSNSNVTHLNFTSSQHQPKQSHPRFSSPPSFSIHGGSMAPNCVNKTRIRWTQDLHEKFVECVNRLGGADKATPKAILKRMDSDGLTIFHVKSHLQKYRIAKYMPESQEGKFEKRACAKELSQLDTRTGVQIKEALQLQLDVQRHLHEQLEIQRNLQLRIEEQGKQLKMMMEQQQKNKESLLKKLPDAEASLSLLDPHIHSPPSPFLVHDAEALMLTSYEDTQLQSTKS

SEQ ID NO: 393 - protein, 410 aa, Arabidopsis thaliana
  Clone ID: AT_T3G21.C1.p3.tg
MRSSSQNSENSKTCLSNNIKATTKNEEDKDEEDDEEGEEDEEERSGDQSPSSNSYEEESGSHHHDQNKKNGGSVRPYNRSKTPRLRWTPELHICFLQAVERLGGPDRATPKLVLQLMNVKGLSIAHVKSHLQMYRSKKTDEPNEGDQGFSFEHGAGYTYNLSQLPMLQSFDQRPSSSLGYGGGSWTDHRRQIYRSPWRGLTTRENTRTRQTMFSSQPGERYHGVSNSILNDKNKTISFRINSHEGVHDNNGVAGAVPRIHRSFLEGMKTFNKSWGQSLSSNLKSSTATIPQDHIATTLNSYQWENAGVAEGSENVLKRKRLLFSDDCNKSDQDLDLSLSLKVPRTHDNLGECLLEDEVKEHDDHQDIKSLSLSLSSSGSSKLDRTIRKEDQTDHKKRKISVLASPLDLTL

SEQ ID NO: 394 - protein, 438 aa, Arabidopsis thaliana
  Clone ID: AT_T27C4.C1.p10.tg
MTLASDFGFPSAISSSFTILEERYHNNFPNTLCVSSGQESMNNNPVPCQVFPLVSGGSSGGNLFSSSSGFCNGVYVSSSSQARPSVSTVPRDRITVAHVSGEGQRQECPVETHSLQLINQPQEQKIMTWSSDQIRGFFDFPVPDPQAASSRTMVSSKEVLSKCEWPDWADQLISDDSLEPNWSELLGDPNVLNLYSKVQTQSSDIARQEIVFRNQHQVDPSMEPFNAKSPPASSMTSKQRMRWTPELHEAFVEAINQLGGSERATPKAVLKLINSPGLTVYHVKSHLQKYRTARYKPELSKDTVKNLKTIEDIKSLDLKTSIEITEALRLQMKVQKQLHEQLEIQRSLQLQIEEQGRYLQMMIEKQQKMQENKKDSTSSSSMPEADPSAPSPNLSQPFLHKATNSEPSITQKLQNGSSTMDQSESTSGTSNRKRVRED

SEQ ID NO: 395 - protein, 443 aa, Arabidopsis thaliana
  Clone ID: AT_T4M8.C1.p7.tg
MASSSELSLDCKPQSYSMLLKSFGDNFQSDPTTHKLEDLLSRLEQERLKIDAFKRELPLCMQLLNNAVEVYKQQLEAYRANSNNNNQSVGTRPVLEEFIPLRNQPEKTNNKGSNWMTTAQLWSQSETKPKNIDSTTDQSLPKDEINSSPKLGHFDAKQRNGSGAFLPFSKEQSLPELALSTEVKRVSPTNEHTNGQDGNDESMINNDNNYNNNNNNNSNSNGVSSTTSQSNRKARRCWSPDLHRRFVQALQMLGGSQVATPKQIRELMKVDGLTNDEVKSHLQYFTGVLILNKQKYRLHTRRPSPSPQTSGGPGPHLVVLGGIWVPPEYTSAHGGTPTLYHHQVHHHHTNTAGPPPPHFCSSQEFYTTPPPPQPLHHHHFQTFNGSSGGTASTDSTHHQVTDSPTVEGKSPESGGGERKGLAALREECEDHSNINGSEITLKF

SEQ ID NO: 396 - protein, 323 aa, Arabidopsis thaliana
  Clone ID: AT_F12A12.C1.p160.tg
MGEEVQMSDYDVSGDGDRVSEWEMGLPSDEDLASLSYSLIPPNLAMAFSITPERSRTIQDVNRASETTLSSLRGGSSGPNTSSSNNNVEEEDRVGSSSPGSDSKKQKTSNGDGDDGGGVDPDSAMAAEEGDSGTEDLSGKTLKRPRLVWTPQLHKRFVDVVAHLGIKNAVPKTIMQLMNVEGLTRENVASHLQKYRLYLKRMQGLTNEGPSASDKLFSSTPVPPQSFQDIGGGGGSSGNVGVPIPGAYGTQQMMQMPVYAHHMGMQGYHHQNHNHDPYHQNHRHHHGAGGNGAFESNPYMMQQNKFGSMASYPSVGGGSANEN

SEQ ID NO: 397 - protein, 308 aa, Arabidopsis thaliana
  Clone ID: AT_K2N11.C1.p5.tg
MERVNLGGLGYDNGGVMMTRDPKPRLRWTADLHDRFVDAVAKLGGADKATPKSVLKLMGLKGLTLYHLKSHLQKYRLGQQQGKKQNRTEQNKENAGSSYVHFDNCSQGGISNDSRFDNHQRYIIYEFAFSRHNGFVKLEFDIMLMNTRRQSGNVPFAEAMRHQVDAQQRFQEQLEVQKKLQMRMEAQGKYLLTLLEKAQKSLPCGNAGETDKGQFSDFNLALSGLVGSDRKNEKAGLVTDISHLNGGDSSQEFRLCGEQEKIETGDACVKPESGFVHFDLNSKSGYDLLNCGKYGIEVKPNVIGDRLQ

SEQ ID NO: 398 - protein, 255 aa, Arabidopsis thaliana
  Clone ID: AT_F7D19.C1.p34.tg
MAGRSSPGKCSTWLDLNREETVEKNNEEESSVEDEDQITNNVRQYIRSNMPRLRWTPDLHLSFVRAVQRLGGPDRATPKLVLEMMNLKGLSIAHVKSHLQMYRSKKLEPSSRPGFGAFMSGQRSYLMDMIDSRCIPHSDLRHAYNSKTVPSRVLNQDAVVTNLGGNFLMRPSSWFSGLCRNDRDSTENKTLPLLEIRKKNNEKRVRDEEVSSVKRLKSMSGGGIQLPEFGNCRQKPTDDINTMLSLSLLSTSSEP

SEQ ID NO: 399 - protein, 227 aa, Arabidopsis thaliana
  Clone ID: AT_MBK21.C1.p9.tg
MQSREEIRDDSSSGLVLTTDPKPRLRWTTELHERFVDAVTHLGGPEKATPKTIMRVMGVKGLTLYHLKSHLQKFRLGKQPHKEHSQNHSISSMLDLRRNAVFTTSPLIIGRNMNEMQMEVQRRIEEEVVIERQVNQRIAAQGKYMESMLEKACETQEASLTKDYSTLFFDRTNICNNTSSIPIPWFEDHFPSSSSMDSTLILPDINSNFSLQDSRSSITKGRTVCLG

SEQ ID NO: 400 - protein, 367 aa, Arabidopsis thaliana
  Clone ID: AT_T8K14.C1.p15.tg
MFHAKKPSSMNGSYENRAMCVQGDSGLVLTTDPKPRLRWTVELHERFVDAVAQLGGPDKATPKTIMRVMGVKGLTLYHLKSHLQKFRLGKQPHKEYGDHSTKEGSRASAMDIQRNVASSSGMMSRNMNDNSHQVGLIRMQMEVQRRLHEQLEVQRHLQLRIEAQGKYMQSILERACQTLAGENMAAATAAAAVGGGYKGNLGSSSLSAAVGPPPHPLSFPPFQDLNIYGNTTDQVLDHHNFHHQNIENHFTGNNAADTNIYLGKKRPNPNFGNDVRKGLLMWSDQDHDLSANQSIDDEHRIQIQMATHVSTDLDSLSEIYERKSGLSGDEGNNGGKLLERPSPRRSPLSPMMNPNGGLIQGRNSPFG

SEQ ID NO: 401 - protein, 621 aa, Arabidopsis thaliana
  Clone ID: AT_T28J14.C1.p150.tg
MASAQSFYNQSSVLKINVMVVDDDHVFLDIMSRMLQHSKYRDPSVMEIAVIAVDDPKKALSTLKIQRDNIDLIITDYYMPGMNGLQLKKQITQEFGNLPVLVMSSDTNKEEESLSCGAMGFIPKPIHPTDLTKIYQFALSNKRNGKSTLSTEQNHKDADVSVPQQITLVPEQADVLKTKRKNCSFKSDSRTVNSTNGSCVSTDGSRKNRKRKPNGGPSDDGESMSQPAKKKKIQWTDSLHDLFLQAIRHIGLDKAVPKKILAFMSVPYLTRENVASHLQKYRIFLRRVAEQGLYSMLSDRGIDSMFRQTHIKEPYFNYYTPSTSWYDTRLNNRSFYSKPVHGFGQSKLLSTTREPVCFNQMPYNYMNRSSTYEPHRIGSGSNLTLPIQSNLSFPNQPSQNEERRSFFEPPVMANKIAQTSQVLGFGQLGPSAISGHNFNNNMTSRYGSLIPSQPGPSHFSYGMQSFLNNENVTYNPQPPANATTQPNLDELPQLENLNLYNDFGNTSELPYNISNFQFDDNKHQQGEADPTKFELPAAKFSTELNHEDDGDWTFVNINQGQSNGETSNTIASPETNTPILNINHNQNQGQDVPEFNDWSFLDPQELVDDDFMNSLFNNDMN

SEQ ID NO: 402 - protein, 626 aa, Arabidopsis thaliana
  Clone ID: AT_F14H20.C1.p13.tg
MGKSSGRNGNGSFNGNKFHGVRPYVRSPVPRLRWTPDLHRCFVHAVEILGGQHRATPKLVLKMMDVKGLTISHVKSHLQMYRGGSKLTLEKPEESSSSSIRRRQDSEEDYYLHDNLSLHTRNDCLLGFHSFPLSSHSSFRGGGGGRTKEQQTSESGGYDDDADFLHIKKMNDTTTFLSHHFPKGTEEWREQEHEEEEEDLSLSLSLNHHHWRSNGSSVMNLSNRFGSNSKTAILNDSYSDENHSSSAAAAVTSVVIPPCSGNVLRAVLLLFFICFCFSLYRTSGYLRIVSDSSSTLSRIFPSVNDSSSSPSPSPSLSPEEIEEPKLEEVLRRAATKDGTVILTTLNEAWAAPGSVIDLFFESFRIGKGTRRLLKHLVIIALDAKAYSRCQELHKHCFRLETEGVDFSGGEAYFMTPSYLTMMWRRISFLRSVLEKGYNFVFTDADVMWFRNPFRRFYEDGDFQIACDHYIGRPNDFRNRPNGGFTFVRANNRSIGFYKFWYDSRTKYPKNHDQDVLNFIKTDPFLWKLRIRIRFLNTVYFGGFCEPSKDLNLVCTMHANCCFGLDSKLHDLRIMLQDWRDFKSLPLHSNQSSGFTWSVPQNCSLDSLRPVDSKDEEESEPPGESTQ

SEQ ID NO: 403 - protein, 166 aa, Arabidopsis thaliana
  Clone ID: AT_F4H6.C1.p10.tg
MQDPMVRSYIRSDNPRMHWTDDLDIRFIQVIEKLGGEESATPKRILSLMGVRDLTISHVKSHLQMYRNKKKEESSKEIKMMREMTQRQSQQYLQIYERATQFIQNQQRLQLDNTEKITPVLGSSNKSLDQSSKVGLNENRGNDVVVVGGATGEEELSLELTLGRKY

SEQ ID NO: 404 - protein, 270 aa, Arabidopsis thaliana
  Clone ID: AT_MQK4.C1.p31.tg
MSMEGVFLEKTKTNTTTTLPDLSLHISLPDIHQYHHNESSKESSRRSSQLENNNRSSNFELSLSHHNHPTARIFHCPDRRTLNLPHQQHYNNPIINGVHQRVDESEISNLHRPIRGIPVYHNRSFPFHQQNSSLPSLGGGDMDQISILNSSSGYNNAYRSLQSSPRLKGVPLHHHHHHNQYGVVGSSDSSSPHHHNHHHHGMIRSRFLPKMPTKRSMRAPRMRWTSSLHARFVHAVELLGGHERATPKSVLELMDVKDLTLAHVKSHLQV

SEQ ID NO: 405 - protein, 332 aa, Arabidopsis thaliana
  Clone ID: AT_F24J1.C1.p30.tg
MEINNNANNTNTTIDNHKAKMSLVLSTDAKPRLKWTCDLHHKFIEAVNQLGGPNKATPKGLMKVMEIPGLTLYHLKSHLQKYRLGKSMKFDDNKLEVSSASENQEVESKNDSRDLRGCSVTEENSNPAKEGLQITEALQMQMEVQKKLHEQIEVQRHLQVKIEAQGKYLQSVLMKAQQTLAGYSSSNLGMDFARTELSRLASMVNRGCPSTSFSELTQVEEEEEGFLWYKKPENRGISQLRCSVESSLTSSETSETKLDTDNNLNKSIELPLMEINSEVMKGKKRSINDVVCVEQPLMKRAFGVDDDEHLKLSLNTYKKDMEACTNIGLGFN

SEQ ID NO: 406 - protein, 145 aa, Arabidopsis thaliana
  Clone ID: AT_mtg10.C1.p140.tg
MTAKDSSEPVTTLTQFNNIDVVITDYHMPGLNGVQLKKRIDEEFGNLPVIDLYRNIEHEELFRRALCFMHKPISRRDLNSLNVVCQQALRHRMNGETNLNGSGQNVTDDPDDWLRLREKPKLKWTKPLQHRFMSALKSLGVASKY

SEQ ID NO: 407 - protein, 292 aa, Arabidopsis thaliana
  Clone ID: AT_K21P3.C1.p12.tg
MQPLNMAEILDHRGVLTDGDDGPFRNLTNFYDMFSSNFPEGLRVLVFDEDPSYLLILERHLQKFQYQVTICNEVNKAMHTLRNHRNRFDLAMIQVNNAEGDIFRFLSEIGSEMDLPIIIISEDDSVKSVKKWMINGAADYLIKPIRPEDLRIVFKHLVKKMRERRSVVTGEAEKAAGEKSSSVGDSTIRNPNKSKRSSCLEAEVNEEDRHDHNDRACASSAKKRRVVWDEELHQNFLNAVDFLGLERAVPKKILDVMKVDYISRENVASHLQVTFLIYNIIVHFQQHFCFYS

SEQ ID NO: 408 - protein, 310 aa, Arabidopsis thaliana
  Clone ID: AT_K13N2.C1.p11.tg
MIKNLSNMKNDNQKREKCCEYIEALEEERRKINVFQRELPLCVELVTQAIEAYKREISGTSTDNLYGQSECSEQTTGECGRILDLFIPIKHSSTSIEEEVDDKDDDDEEHQSHETDIDFDDKNMKSEWLKSVQLWNQSDAVVSNNRQRKNRRCWSQELHRRFLNALKQLGGPHVATPKQIRDIMKVDGLTNDEVKSHLQKYRLHARRPSQTTPNNRNSQTQHFVVVGGIWVPQTNHSTANAVNAVASGETTGIYGPMVSSLPSEWPRHSNFGRKISEDRSRCSNNGFFRCSSPAMSCSTRTKTKDAKIIS

SEQ ID NO: 409 - protein, 333 aa, Arabidopsis thaliana
  Clone ID: AT_F14J22.C1.p21.tg
MGSLGDELSLGSIFGRGVSMNVVAVEKVDEHVKKLEEEKRKLESCQLELPLSLQILNDAILYLKDKRCSEMETQPLLKDFISVNKPIQGERGIELLKREELMREKKFQQWKANDDHTSKIKSKLEIKRNEEKSPMLLIPKVETGLGLGLSSSSIRRKGIVASCGFTSNSMPQPPTPAVPQQPAFLKQQALRKQRRCWNPELHRRFVDALQQLGGPGVATPKQIREHMQEEGLTNDEVKSHLQKYRLHIRKPNSNAEKQSAVVLGFNLWNSSAQDEEETCEGGESLKRSNAQSDSPQGPLQLPSTTTTTGGDSSMEDVEDAKSESFQLERLRSP

SEQ ID NO: 410 - protein, 301 aa, Arabidopsis thaliana
  Clone ID: AT_F5K7.C1.p22.tg
MKKQEKGNEVVTFEENPSTYVHHHTKKASMVLSEQEIEVILQSNKETYNEKLEKNTKENAEKVGIEEGNGSSSKITPCIFYTSDEKARLRWSSDLHDCFVNAVEKLGGPNKATPKSVKEAMEVEGIALHHVKSHLQKFRLGKCNIRGGTNQYVRQSQSMPHKSQQQLQLNNDCVNHDSYCNATFLSVTVPPTIDSLHQDTLNNTILFPTTLQAIPTSVSHNTYMSSYPSYNTVEVVKAQLNALQDSSTSQTQETFSRETNLSSIVTRDEADPVDKYIDWNKVGETDIEHDSVEVLEALGLK

SEQ ID NO: 411 - protein, 299 aa, Arabidopsis thaliana
  Clone ID: AT_T19C21.C1.p21.tg
MIPSMEGGGKTNREEEEEEEEEEEEGEESKVSSNSTVEESDKKTKVRPYVRSKVPRLRWTPDLHLRFVRAVERLGGQERATPKLVRQMMNIKGLSIAHVKSHLQVFDLHTSKTYGSKISNASLWNSSSQGTERSLIDQIRPGLIRNASVSNNIRGSDYWTNNKSFQNIYSSSISNHFPKLRHDHHERTNSVTFNSIQGHSRTFQKFHNGVEENTNHSYCSKTNGKRDASRSIDLDLSLKLRQPEKTILEETETAATTTDQTLSLSLCPGSSSWKKSRLMKDEEDRTVKIGQESTLDLTL

SEQ ID NO: 412 - protein, 183 aa, Arabidopsis thaliana
  Clone ID: AT_C7A10.C1.p180.tg
MTPTSEMMMDYSRIEQSHHHHQFNKPSSQSHHIQKKEQRRRWSQELHRKFVDALHRLGGPQVATPKQIRDLMKVDGLTNDEVKSHLQKYRMHIRKHPLHPTKTLSSSDQPGVLERESQSLISLSRSDSPQSPLVARGLFSSNVGHSSEEDEEEEDEEEEKSDGRSSCRNDETKKKRQVLDLEL

SEQ ID NO: 413 - protein, 353 aa, Arabidopsis thaliana
  Clone ID: AT_F24J5.C1.p3.tg
MVEMDYAKKMQKCHEYVEALEEEQKKIQVFQRELPLCLELVTQAIEACRKELSGTTTTTSEQCSEQTTSVCGGPVFEEFIPIKKISSLCEEVQEEEEEDGEHESSPELVNNKKSDWLRSVQLWNHSPDLNPKEERVAKKAKVVEVKPKSGAFQPFQKRVLETDLQPAVKVASSMPATTTSSTTETCGGKSDLIKAGDEERRIEQQQSQSHTHRKQRRCWSPELHRRFLNALQQLGGSHVATPKQIRDHMKVDGLTNDEVKSHLQKYRLHTRRPAATSVAAQSTGNQQQPQFVVVGGIWVPSSQDFPPPSDVANKGGVYAPVAVAQSPKRSLERSCNSPAASSSTNTNTSTPVS

SEQ ID NO: 414 - protein, 388 aa, Arabidopsis thaliana
  Clone ID: AT_F27G20.C1.p7.tg
MELFPAQPDLSLQISPPNSKPSSTWQRRRSTTDQEDHEELDLGFWRRALDSRTSSLVSNSTSKTINHPFQDLSLSNISHHQQQQQHHHPQLLPNCNSSNILTSFQFPTQQQQQHLQGFLAHDLNTHLRPIRGIPLYHNPPPHHHPHRPPPPCFPFDPSSLIPSSSTSSPALTGNNNSFNTSSVSNPNYHNHHHQTLNRARFMPRFPAKRSMRAPRMRWTTTLHARFVHAVELLGGHERATPKSVLELMDVKDLTLAHVKSHLQMYRTVKTTDKAAASSGQSDVYENGSSGDNNSDDWMFDMNRKSRDSEELTNPLEKSNGLWTNSSGEARLHGKLIDNVAEIMLPSEKELDGKCSSYERISSEEMSSSSISGTSPFKPNLEFTLGRSH

SEQ ID NO: 415 - protein, 266 aa, Arabidopsis thaliana
  Clone ID: AT_MUG13.C1.p5.tg
MREEDSNWFAKWEEELPSPEELIPLSQSLITPDLAIAFDLHRNNNSNSGQPLPQTTPPQPNSSAEIAGDSTGDEPARTLKRPRLVWTPQLHKRFVDAVAHLGIKNAVPKTIMQLMSVDGLTRENVASHLQKYRLYLKRMKSGGGGGGSGDSDHLFASSPVPPHFLHPTSRQSSDLFIPSFVPISTQQQHIAAPPSQFLHRQISAVNFTSPTKATDQAMFLARQQSELQQPVFKPSSLHLHSQVANYTQDLKSGAKTVLTLFPTRDD

SEQ ID NO: 416 - protein, 335 aa, Arabidopsis thaliana
  Clone ID: AT_T7M13.C1.p16.tg
MREDDSDWFARWEEELPSPEELMPISQSLISPDLALAFDIRTPNHGNGNSNQPHHHHHHQTTPPTPSQLQLPSSQANSSAEFAADSADLGSGGAAGDEPARTLKRPRLVWTPQLHKRFVDAVAHLGIKNAVPKTIMQLMSVDGLTRENVASHLQKYRLYLKRMQGLSSGGGAGSDPATDRLFASSPVPAHFLHPNRVPSSDHFMPSFVPIATLQQQQQMAAAAAAAAAANPHLQPPQFHRQIAAAHFGSPTNGGFSSPTSNGQFGSPTSNGFGSPTTNGKFDPSFLAVRQTQQQPIQRMSTPSLHSPVSNYVEDLESANANGGRTVLTLFPTRDD

SEQ ID NO: 417 - protein, 302 aa, Arabidopsis thaliana
  Clone ID: AT_F18A5.C1.p30.tg
MYSAIRSSLPLDGSLGDYSDGTNLPIDACLVLTTDPKPRLRWTSELHERFVDAVTQLGGPDISTKNLTTKATPKTIMRTMGVKGLTLYHLKSHLQVLMLLPSISNYASLATYNKQISCVAESQDTGSSSTSSLRLAAQEQNESYQVTEALRAQMEVQRRLHEQLEVQRRLQLRIEAQGKYLQSILEKACKAIEEQAVAFAGLEAAREELSELAIKASITNGCQGTTSTFDTTKMMIPSLSELAVAIEHKNNCSAESSLTSSTVGSPVSAALMKKRQRGVFGNGDSVVVGHDAGWVMPSSSIG

SEQ ID NO: 418 - protein, 426 aa, Arabidopsis thaliana
  Clone ID: AT_F26K9.C1.p100.tg
MSVFSNILDENSRNLRNEIPCDDGIASPINDDDEEFLTKSNRVLLVGADSNSSLKNLMTQYSYQVTKYESGEEAMAFLMKNKHEIDLVIWDFHMPDINGLDALNIIGKQMDLPVVIMSHEYKKETVMESIKYGACDFLVKPVSKEVIAVLWRHVYRKRMSKSGLDKPGESGTVESDPDEYDDLEQDNLYESNEEGSKNTCDHKEEKSPTKKPRMQWTPELHHKFEVAVEKMGSLEKAFPKTILKYMQEELNVQGLTRNNVASHLQKYRQSSKKTCTPQEPQEDFVWGNAGPDVTLAASKTLLSSHATPSYLINNQAAPRGSYFMNNIPYPSTSCLPVNNNNCFMTNPSTYIDQFQHQLQQQQQHQQYQSTLNSISAMLTKQESRHVPSSAMENSEPLMIYNSNLPFGIDECFPPAGFNIFDQIGHN

SEQ ID NO: 419 - protein, 396 aa, Arabidopsis thaliana
  Clone ID: AT_F3F24.C1.p100.tg
MTLANDFGYSTAMSSSYSALHTSVEDRYHKLPNSFWVSSGQELMNNPVPCQSVSGGNSGGYLFPSSSGYCNVSAVLPHGRNLQNQPPVSTVPRDRLAMQDCPLIAQSSLINHHPQEFIDPLHEFFDFSDHVPVQNLQAESSGVRVDSSVELHKKSEWQDWADQLISVDDGSEPNWSELLGDSSSHNPNSEIPTPFLDVPRLDITANQQQQMVSSEDQLSGRNSSSSVATSKQRMRWTPELHEAFVEAVNQLGGSERATPKAVLKLLNNPGLTIYHVKSHLQKYRTARYKPETSEVTGEPQEKKMTSIEDIKSLDMKTSVEITQALRLQMEVQKRLHEQLEMMFEKQQKIQDNKSSSSEASPKQCNGSFAEVEVGLETLTGDQNESASASRKRVRED

SEQ ID NO: 420 - protein, 422 aa, Arabidopsis thaliana
  Clone ID: AT_T5F17.C1.p60.tg
MEARPVHRSGSRDLTRTSSIPSTQKPSPVEDSFMRSDNNSQLMSRPLGQTYHLLSSSNGGAVGHICSSSSSGFATNLHYSTMVSHEKQQHYTGSSSNNAVQTPSNNDSAWCHDSLPGGFLDFHETNPAIQNNCQIEDGGIAAAFDDIQKRSDWHEWADHLITDDDPLMSTNWNDLLLETNSNSDSKDQKTLQIPQPQIVQQQPSPSVELRPVSTTSSNSNNGTGKARMRWTPELHEAFVEAVNSLGGSERATPKGVLKIMKVEGLTIYHVKSHLQKYRTARYRPEPSETEFNVKTKVSLITTGSPERKLTPLEHITSLDLKGGIGITEALRLQMEVQKQLHEQLEIQRNLQLRIEEQGKYLQMMFEKQNSGLTKGTASTSDSAAKSEQEDKKTADSKEVPEEETRKCEELESPQPKRPKIDN

SEQ ID NO: 421 - protein, 83 aa, Arabidopsis thaliana
  Clone ID: AT_T5E21.C1.p4.tg
MGRCGRSNDGVIGGVRPYVRSPVPRLRWTPELHRSFVHAVDLLGGQYKATPKLVLKIMDVKGLTISHVKSHLQVKENAKKILF

SEQ ID NO: 422 - protein, 394 aa, Arabidopsis thaliana
  Clone ID: AT_T11I18.C1.p14.tg
MYYQNQHQGKNILSSSRMHITSERHPFLRGNSPGDSGLILSTDAKPRLKWTPDLHERFIEAVNQLGGADKATPKTIMKVMGIPGLTLYHLKSHLQKYRLSKNLNGQANNSFNKIGIMTMMEEKTPDADEIQSENLSIGPQPNKNSPIGEALQMQIEVQRRLHEQLEVQRHLQLRIEAQGKYLQSVLEKAQETLGRQNLGAAGIEAAKVQLSELVSKVSAEYPNSSFLEPKELQNLCSQQMQTNYPPDCSLESCLTSSEGTQKNSKMLENNRLGLRTYIGDSTSEQKEIMEEPLFQRMELTWTEGLRGNPYLSTMVSEAEQRISYSERSPGRLSIGVGLHGHKSQHQQGNNEDHKLETRNRKGMDSTTELDLNTHVENYCTTRTKQFDLNGFSWN

SEQ ID NO: 423 - protein, 386 aa, Arabidopsis thaliana
  Clone ID: AT_MLN1.C1.p11.tg
MLTVSPAPVLIGNNSKDTYMAADFADFTTEDLPDFTTVGDFSDDLLDGIDYYDDLFIGFDGDDVLPDLEIDSEILGEYSGSGRDEEQEMEGNTSTASETSERDVGVCKQEGGGGGDGGFRDKTVRRGKRKGKKSKDCLSDENDIKKKPKVDWTPELHRKFVQAVEQLGVDKAVPSRILEIMNVKSLTRHNVASHLQKYRSHRKHLLAREAEAASWNLRRHATVAVPGVGGGGKKPWTAPALGYPPHVAPMHHGHFRPLHVWGHPTWPKHKPNTPASAHRTYPMPAIAAAPASWPGHPPYWHQQPLYPQGYGMASSNHSSIGVPTRQLGPTNPPIDIHPSNESIDAAIGDVISKPWLPLPLGLKPPSVDGVMTELQRQGVSNVPPLP

SEQ ID NO: 424 - protein, 406 aa, Arabidopsis thaliana
  Clone ID: AT_F23N11.C1.p11.tg
MLALSPATRDGCDGASEFLDTSCGFTIINPEEEEEFPDFADHGDLLDIIDFDDIFGVAGDVLPDLEIDPEILSGDFSNHMNASSTITTTSDKTDSQGETTKGSSGKGEEVVSKRDDVAAETVTYDGDSDRKRKYSSSASSKNNRISNNEGKRKVKVDWTPELHRRFVEAVEQLGVDKAVPSRILELMGVHCLTRHNVASHLQKYRSHRKHLLAREAEAANWTRKRHIYGVDTGANLNGRTKNGWLAPAPTLGFPPPPPVAVAPPPVHHHHFRPLHVWGHPTVDQSIMPHVWPKHLPPPSTAMPNPPFWVSDSPYWHPRFRAPPVAGIPHALPPHHTMYKPNLGFGGARPPVDLHPSKESVDAAIGDVLTRPWLPLPLGLNPPAVDGVMTELHRHGVSEVPPTASCA

SEQ ID NO: 425 - protein, 286 aa, Arabidopsis thaliana
  Clone ID: AT_F23H14.C1.p3.tg
MEADNGGPNSSHASKQRLRWTHELHERFVDAVAQLGGPDRATPKGVLRVMGVQGLTIYHVKSHLQKYRLAKYLPDSSSEGKKTDKKESGDMLSGLDGSSGMQITEALKLQMEVQKRLHEQLEVQRQLQLRIEAQGKYLKKIIEEQQRLSGVLGEPSAPVTGDSDPATPAPTSESPLQDKSGKDCGPDKSLSVDESLSSYREPLTPDSGCNIGSPDESTGEERLSKKPRLVRGAAGYTPDIVVGHPILESGLNTSYHQSDHVLAFDQPSTSLLGAEEQLDKVSGDNL

SEQ ID NO: 426 - protein, 343 aa, Arabidopsis thaliana
  Clone ID: AT_F2J7.C1.p21.tg
MMFKSGDMDYTQKMKRCHEYVEALEEEQKKIQVFQRELPLCLELVTQAIESCRKELSESSEHVGGQSECSERTTSECGGAVFEEFMPIKWSSASSDETDKDEEAEKTEMMTNENNDGDKKKSDWLRSVQLWNQSPDPQPNNKKPMVIEVKRSAGAFQPFQKEKPKAADSQPLIKAITPTSTTTTSSTAETVGGGKEFEEQKQSHSNRKQRRCWSPELHRRFLHALQQLGGSHVATPKQIRDLMKVDGLTNDEVKSHLQKYRLHTRRPATPVVRTGGENPQQRQFMVMEGIWVPSHDTTNNRVYAPVATQPPQSSTSGERSNRGCKSPATSSTTTHTPHLLPLS

SEQ ID NO: 427 - protein, 410 aa, Arabidopsis thaliana
  Clone ID: AT_T12H1.C1.p18.tg
MANEDDDGEKSRSLHQQIARKPKTQIVIGVPSYQEVLESSQTKSTPPSLFKPSQSFSQAFAFVKSSDVYSPPPPSSAAASSSQPSGASQVPHSSSQTHQTDGASSSSTPVATGSVPSNTTQNRNAILVSHRQKGNPLLKHIRNVKWVFSDIIPDYVLGQNSCALYLSLRYHLLHPDYLYFRIRELQKNFKLSVVLCHVDVEDTVKPLLEVTKTALLHDCTLLCAWSMTECARYLETIKVYENKPADLIQGQMDTDYLSRLNHSLTSIRHVNKSDVVTLGSTFGSLAHIIDASMEDLARCPGIGERKVKRLYDTFHEPFKRATSSYPSVVEPPIPEAPVEKDVNSEEPVEEDEDFVEDSRKRKKKEPEPEKTVKTALSAVFARYSDRLSKKKEKQKEKDTTTASDAETHQN

SEQ ID NO: 428 - protein, 339 aa, Arabidopsis thaliana
  Clone ID: AT_F22D1.C1.p20.tg
MEQRRNQNAVQQQDDEETQHGPFPVEQLQAAGIASVDVKKLRDAGLCTVEGVAYTPRKDLLQIKGISDAKVDKIVEAASKLVPLGFTSASQLHAQRQEIIQITSGSRELDKVLEGGIETGSITELYGEFRSGKTQLCHTLCVTCQLPMDQGGGEGKAMYIDAEGTFRPQRLLQIADRFGLNGADVLENVAYARAYNTDHQSRLLLEAASMMIETRFALLIVDSATALYRTDFSGRGELSARQMHLAKFLRSLQKLADEFGVAVVITNQVVAQVDGSALFAGPQFKPIGGNIMAHATTTRLALRKGRAEERICKVISSPCLPEAEARFQISTEGVTDCKD

SEQ ID NO: 429 - protein, 316 aa, Arabidopsis thaliana
  Clone ID: AT_T1N24.C1.p9.tg
MATHPEALRRERILNSKLYFDVPLSKVSIIYSSSYDISFMGIEKLHPFDSSKWGRVCKFLVSDGFLEEKAIVEPLEASKIDLLVVHSENYLNSLKSSATVARITEVGGTILAAKLATERGWAINIGGGFHHCTAERGGGFCAFADISLCIHFAFLRLRISRVMIIDLDAHQGNGHETDLGDDILSMLAFEVRCIFLQDYRARRFIDQKVEVMSGTTTDEYLRKLDEALEVASRNFQPELVIYNAGTDILDGDPLGLLKISPDGITSRDEKVFRFAREKNIPLVMLTSGGYMKSSARVIADSIENLSRQGLIQTRPE

SEQ ID NO: 430 - protein, 377 aa, Arabidopsis thaliana
  Clone ID: AT_T27G7.C1.p7.tg
MVTNRVDVFWHEGMLRHDAVEGVFDTGYDPGFLDVLEKHPENADRVRNMLSILRRGPIAPHVNWFTGLPAIVSELLMFHTSEYIEKLVEADKSGERCEIAAGTFMSPGSWEAALLAAGTTLSAMQHILDCHGKIAYALVRPPGHHSQPTQADGYCFLNNAALAVKLALNSGSCSRVAVIDIDVHYGNGTAEGFYTSDKVLTVSLHMNHGSWGSSHPQKGSIDELGEDVGLGYNLNVPLPNGTGDRGYEYAMNELVVPAVRRFGPDMVVLVVGQDSSAFDPNGRQSLTMNGYRRIGQIMRGVAEEHSHGRLLMVQEGGYHVTYAAYCLHAMLEGVLKIPEPHLSDPIAYYPEEEANAVAAVESIKTYHTEFVPFLRGT

SEQ ID NO: 431 - protein, 359 aa, Arabidopsis thaliana
  Clone ID: AT_F17M5.C1.p230.tg
MLVSYTVYLQHWESHPECSARVPAIVNALEMNELTPKFRGSQILELANFKTATVEDIANVHDKAYVFGLEKAMDEASDSGLIFIEGSGPTYATSTVTALCSSAGAGMALVDSVVMSRLTINSVDPPIGFALIRPPGHHAVPKGPMGFCVFGNVAIAARHAQRTHGLKRIFIIDFDVHHGNGTNDAFTEDPDIFFLSTHQDGSYPGTGKISDIGKGKGEGTTLNLPLPGGSGDIAMRTVFEEIIVPCAQRFKPDIILVSAGYDAHVLDPLANLQFTTATYYSLAKDIKRLAKEVCGGRCVFFLEGGYNLESLSSSVADSFRALLGEDSLASEFDNPAYLYDEPMRKVRDAIQRAKSIHCL

SEQ ID NO: 432 - protein, 142 aa, Arabidopsis thaliana
  Clone ID: AT_T18B22.C1.p60.tg
MAFSMLFTGHAECGGYTKENVARCWTVETGILLDTELPNEIPENDYIKYFAPDFSLKIPGGHIENLNTKSYISSIKVQILENLRYIQHAPSVQMQEVPPDFYIPDFDEDEQNPDVRVDQRSRDKQIQRDDEYFDGDNDNDAS

SEQ ID NO: 433 - protein, 158 aa, Arabidopsis thaliana
  Clone ID: AT_F14L2.C1.p40.tg
MAFSMLFTGHAECVKFVKKFNLPLLVTGGGGYTKENVARCWTVETGILLDTELPNEISENDYIKYFAPDFSLKIPGGHIENLNTKSYISSIKVQILENLRYIQHAPSVQMQEVPPDFYIPDFDEDEQNPDVRVDQRSRDKQIQRDDEYFDGDNDNDAS

SEQ ID NO: 434 - protein, 419 aa, Arabidopsis thaliana
  Clone ID: AT_T18B22.C1.p80.tg
MLNVFFWVAGDVGSVYFGPNHPMKPHRLCMTHHLILAYGLHSKMEVYRPHKAYPIEMAQFHSPDYVEFLQRINPENQNLFPNEMARYNLGEDCPVFEDLFEFCQLYAGGTIDAARRLNNKLCDIAINWAGGLHHAKKCDASGFCYINDLVLGILELLKHHPRVLYIDIDVHHGDGVEEAFYFTDRVMTVSFHKFGDKFFPGTGDVKEIGEREGKFYAINVPLKDGIDDSSFNRLFRTVVEIYQPGAIVLQCGADSLARDRLGCFNLSIDGHAECVKFVKKFNLPLLVTGGGGYTKENVARCWTVETGILLDTELPNEIPENDYIKYFAPDFSLKIPGGHIENLNTKSYISSIKVQILENLRYIQHAPSVQMQEVPPDFYIPDFDEDEQNPDVRADQRSRDKQIQRDDEYFDGDNDNDAS

SEQ ID NO: 435 - protein, 132 aa, Arabidopsis thaliana
  Clone ID: AT_T22P11.C1.p160.tg
MAPKAEKKPAEKAPAPKAEKKIAKEGGTSEIVKKKKKTKKSTETYKIYIFKVLKQVHPDIGISGKAMGIMNSFINDIFEKLAQESSRLARYNKKPTITSREIQTAVRLVLPGELAKHAVSEGTKAVTKFTSS

SEQ ID NO: 436 - protein, 136 aa, Arabidopsis thaliana
  Clone ID: AT_F13B4.C1.p3.tg
MARTKQSARKSHGGKAPTKQLATKAARKSAPTTGGVKKPHRFRPGTVALREIRKYQKSTELLNRKLPFQRLVREIAQDFKTDLRFQSHAVLALQEAAEAYLVGLFEDTNLCAIHAKRVTIMPKDVQLARRIRAERA

SEQ ID NO: 437 - protein, 137 aa, Arabidopsis thaliana
  Clone ID: AT_F6F9.C1.p5.tg
MARTKQTARKSTGGKGPRKELATKAARKTRRPYRGGVKRAHRFRPGTVALREIRKYQKSTDLLIRKLPFQRLVREIAQDFKVDLRFQSHAVLALQEAAEAYLVGLFEDTNLCAIHAKRVTIMSKDIQLARRIRGERA

SEQ ID NO: 438 - protein, 478 aa, Arabidopsis thaliana
  Clone ID: AT_F16A16.C1.p90.tg
MQFDESDARVWIWFEIRREDDIVELLWQSGQVVGTNQTHRQSYDPPPILRGSGSGRGEENAPLSQPPPHLHQQNLFIQEGEMYSWLHHSYRQNYFCSELLNSTPATHPQSSISLAPRQTIATRRAENFMNFSWLRGNIFTGGRVDEAGPSFSVVRESMQVGSNTTPPSSSATESCVIPATEGTASRVSGTLAAHDLGRKGKAVAVEAAGTPSSGVCKAETEPVQIQPATESKLKAREETHGTEEARGSTSRKRSRTAEMHNLAERRRREKINEKMKTLQQLIPRCNKVESDSVSTLISLLKFQRWMMLSSTSNRYRAKYKYALQNRMCFKPMVQHGKSSYVSSFVEMMSTGQGMMSPMMNAGNTQQFMPHMAMDMNRPPPFIPFPGTSFPMPAQMAGVGPSYPAPRYPFPNIQTFDPSRVRLPSPQPNPVSNQPQFPAYMNPYSQFAGPHQLQQPPPPPFQVTLYHGIHCVVAGNPYV

SEQ ID NO: 439 - protein, 100 aa, Arabidopsis thaliana
  Clone ID: AT_T12C24.C1.p6.tg
MTLSEIMKGDDEPKNKRAKHKELERQRRQENTSLFKILRYLLPSQYIKGKRSSADHVLEAVNYIKDLQKKIKEVEEGIEVYFSELQEKIIKIGTSRVTTR

SEQ ID NO: 440 - protein, 295 aa, Arabidopsis thaliana
  Clone ID: AT_C17L7.C1.p90.tg
TEEFEIAGISTGAWWSSPTNTAAVFSGYSLPCSTEISPDVTNFGWQNFDNKINDHNDGCMNMHNSFFEGLLIDPNDQLLPDPWSKSTIPNAKSELLENFPFLDNMFLVDSEAESLLDHEIRNHKSSKEQITQDYKNLTSKARLEENSDEYSPRLLKRPRLETLSPLPSFKVRKEKLGDRITALQQLVSPFGKADTASVLNEAVEYIKFLQEQVTVLSNPEQNTIGSVQQQQGSNKKSINTQGEVEEDECSPRRYVDLSSRGLCLMPISASYPVAAAAASAAEMNVHLVSGIFHSL

SEQ ID NO: 441 - protein, 240 aa, Arabidopsis thaliana
  Clone ID: AT_F1P2.C1.p190.tg
MVSKTPSTSSDEANATADERCRKGKVPKRINKAVRERLKREHLNELFIELADTLELNQQNSGKASILCEATRFLKDVFGQIESLRKEHASLLSESSYVTTEKNELKEETSVLETEISKLQNEIEARANQSKPDLNTSPAPEYHHHHYQQQHPERVSQFPGLPIFQGPGFQQSATTLHPPATVLVLPIQPDPQTQDISEMTQAQQPLMFNSSNVSKPCPRYASAADSWSSRLLGERLKASE

SEQ ID NO: 442 - protein, 264 aa, Arabidopsis thaliana
  Clone ID: AT_T5I8.C1.p12.tg
MIIPETDSFFFQEQPQHQPLYPDEALSPSLFGFDHYDHFYESFLPSQEIFLPSPKTRVFNESQELDSFHTPKHQKLIDSSFHFNSHDPFSPSPESNYLLDSYITEASNISKFQAPDFSSTFKVGWTEQGDTKKRELSAQSIAARKRRRRITEKTQELGKLIPGSQKHNTAEMFNAAAKYVKFLQAQIEILQLKQTKMQTLDSSKVGREMQFLLGSQEIQEKLSTEEVCVVPREMVQVLKAEECILTNPKISRDINKLLSTNLMN

SEQ ID NO: 443 - protein, 380 aa, Arabidopsis thaliana
  Clone ID: AT_T13M11.C1.p21.tg
MAEEFKATASICGGGGGAWWNSPRSVMSPSDHFLSPCFGAAITSNDFSSQENHLKSRMTCTDNNNIVFGQREADSDSGGSTVTMDSTLQMMGLGQEDLNSSFIRSSQDQDHGQGFLSTTTSPYILNPACSSSPSTSSSSSLIRTFYDPEPSPYNFVSTTSGSINDPQLSWANKTNPHHQVAYGLINSFSNNANSRPFWNSSSTTNLNNTTPSNFVTTPQIISTRLEDKTKKNLKTRAQSESLKRAKDNESAAKKPRVTTPSPLPTFKVRKENLRDQITSLQQLVSPFGKTDTASVLQEAIEYIKFLHDQVTVLSTPYMKQGASNQQQQQISGKSKSQDENENHELRGHGLCLVPISSTFPVANETTADFWTPTFGGNNFR

SEQ ID NO: 444 - protein, 266 aa, Arabidopsis thaliana
  Clone ID: AT_F19I3.C1.p5.tg
MDMIIPETDSFFFQSQPQLEFHQPLFQEEAPSQTHFDPFCDQFLSPQEIFLPNPKNEIFNETHDLDFFLPTPKRQRLVNSSYNCNTQNHFQSRNPNFFDPFGDTDFVPESCTFQEFRVPDFSLAFKVGRGDQDDSKKPTLSSQSIAARGRRRRIAEKTHELGKLIPGGNKLNTAEMFQAAAKYVKFLQSQVGILQLMQTTKKGSSNVQMETQYLLESQAIQEKLSTEEVCLVPCEMVQDLTTEETICRTPNISREINKLLSKHLAN

SEQ ID NO: 445 - protein, 93 aa, Arabidopsis thaliana
  Clone ID: AT_F1M20.C1.p18.tg
MSGRRSRSRQSSGTSRISEDQINDLIIKLQQLLPELRDSRRSDKVSAARVLQDTCNYIRNLHREVDDLSERLSELLANSDTAQAALIRSLLTQ

SEQ ID NO: 446 - protein, 454 aa, Arabidopsis thaliana
  Clone ID: AT_F3H11.C1.p2.tg
MGDHHDFINSGSWWKVSSSSSPSSSSSMRASSIESGGSAVFHDKLHHHSLATDHHLQMIGLGLSSQSPVDQWNQSLLRGDSKAETSFGVMLQENLNLDATSNANANTTSSTSSYQLQESDSSHHHQALWRDPQSDFKPQILTSGGNRGFFLDHQFSPHGSSSTDSSTVTCQGFAVDNSSNAMYAATTTTPNSSSGMFHHQQAGGFGSSDQQPSRNHQQSSLGYSQFGSSTGNYDQMASALPSTWFLRSSPPPKPHSPLRFSNNATFWNPAAAGNAGAPPPHDASSNFFPALQPPQIHPQSFDEQPKNISEIRDSSSNEVKRGGNDHQPAAKRAKSEAASPSPAFKRKEKMGDRIAALQQLVSPFGKTDAASVLSEAIEYIKFLHQQVSALSNPYMKSGASLQHQQSDHSTELEVSEEPDLRSRGLCLVPVSSTFPVTHDTTVDFWTPTFGGTFR

SEQ ID NO: 447 - protein, 252 aa, Arabidopsis thaliana
  Clone ID: AT_MZN24.C1.p29.tg
METPAYDFDSLTDLPPLPPSDFTPSNAFTFPDHNLDFSFLDSTLSLLNRHHLSESTRLEQIFYDSTHTQLFHNDDTTTTTTPFLHLPDLKSIDAVEEPTTMKLFPSLSPPLPAAKRQKLNSTSSSTTSGSPTASNDGGIITKRRKISDKIRSLEKLMPWERKMNLAMTLEESHKYIKFLQSQIASLRWMPLESVYNTAGEVGETDLLKSLTRQQILQVLANSPGSRNVLSSRGVCVFSYEQLLSLKTMSRNL

SEQ ID NO: 448 - protein, 167 aa, Arabidopsis thaliana
  Clone ID: AT_T13K14.C1.p130.tg
MEPSHSNTGQSRSVDRKTVEKNRRMQMKSLYSELISLLPHHSSTEPLTLPDQLDEAANYIKKLQVNVEKKRERKRNLVATTTLEKLNSVGSSSVSSSVDVSVPRKLPKIEIQETGSIFHIFLVTSLEHKFMFCEIIRVLTEELGAEITHAGYSIVDDAVFHTLHCKV

SEQ ID NO: 449 - protein, 285 aa, Arabidopsis thaliana
  Clone ID: AT_T1P2.C1.p2.tg
MCIVGNKKGNRSLKEIGTFMMTTCFIANYQSVQVCQNNQFPHFSDEVGDRNMHNPYASGSSYDALFPPCAKLPYHGVELQPSAVCPKNFVIFDQTYDRSQVMYHPELTHKLMNTPSLNNLASTFQNEYVGGSYGNYGNYEQEVSSSYQEDPNEIDALLSADEDYEENDDNEGEEDGGDSEEVSTARTSSRDYGNTTAESCCSSYGYNNNNNNNSRKQSLSGSASSSNNDGKGRKKMKKMMGVLRRIVPGGEQMNTACVLDEAVQYLKSLKIEAQKLGVGHFSNQS

SEQ ID NO: 450 - protein, 453 aa, Arabidopsis thaliana
  Clone ID: AT_T22C5.C1.p11.tg
MDSANLHQLQDQLQLVGSSSSSSSLDNNSDPSCYGASSAHQWSPGGISLNSVSLSHNYNNEMLNTRAHNNNNNNNTSECMSLSSIHNHSLIQQQDFPLQWPHDQSSYQHHEGLLKIKEELSSSTISDHQEGISKFTDMLNSPVITNYLKINEHKDYTEKLLLKSMSSGFPINGDYGSSLPSSSSSSSPSSQSHRGNFSQIYPSVNISSLSESRKMSMDDMSNISRPFDINMQVFDGRLFEGNVLVPPFNAQEISSLGMSRGSLPSFGLPFHHHLQQTLPHLSSSPTHQMEMFSNEPQTSEGKRHNFLMATKAGENASKKPRVESRSSCPPFKVRKEKLGDRIAALQQLVSPFGKTDTASVLMEAIGYIKFLQSQIETLSVPYMRASRNRPGKASQLVSQSQEGDEEETRDLRSRGLCLVPLSCMTYVTGDGGDGGGGVGTGFWPTPPGFGGGT

SEQ ID NO: 451 - protein, 255 aa, Arabidopsis thaliana
  Clone ID: AT_F23N20.C1.p19.tg
MSSQPNHQTSISSLLHDRLHIPPAETIVEKESAEKDTCQSQRKRKEPVLHEVDGSSSGAAKKQDHNAKERLRRMRLHASYLTLGTLLPDHSSSSSKVLFSLLLLQVRYVLLVVELYITFLADWQKKWSAPSIIDNVITYIPKLQNEVGELTLRKQKLVELERRGPSIRAISVLELGESGYEAVVQICLKKENEDEFSNLLHVMEVQGLSVLSASTSQVCREQRVVCYNFHVKVLCLILSSSFLFSLCFDRMETMC

SEQ ID NO: 452 - protein, 221 aa, Arabidopsis thaliana
  Clone ID: AT_T30C3.C1.p80.tg
MDPYKNLNPKGYQRQRPFSSAGESGGSGGSGTAHETDDNKKKKKLLHRDIERQRRQEMATLFATLRTHLPLKYIKGKRAVSDHVNGAVNFIKDTEARIKELSARRDELSRETGQGYKSNPDPGKTGSDVGKSEPATVMVQPHVSGLEVVVSSNSSGPEALPLSKVLETIQEKGLEVMSSFTTRVNDRLMHTIQVEVNSFGCIDLLWLQQKLVEDLILSTGY

SEQ ID NO: 453 - protein, 319 aa, Arabidopsis thaliana
  Clone ID: AT_F17F8.C1.p3.tg
MDHHHHIASRNSSTTSELPSFEPACHNGNGNGWIYDPNQVRYDQSSDQRLSKLTDLVGKHWSIAPPNNPDMNHNLHHHFDHDHSQNDDISMYRQALEVKNEEDLCYNNGSSGGGSLFHDPIESSRSFLDIRLSRPLTDINPSFKPCFKALNVSEFNKKEHQTASLAAVRLGTTNAGKKKRCEEISDEVSKKAKCSEGSTLSPEKELPKAKLRDKITTLQQIVSPFGKTDTASVLQEAITYINFYQEQVKLLSTPYMKNSSMKDPWGGWDREDHNKRGPKHLDLRSRGLCLVPISYTPIAYRDNSATDYWNPTYRGSLYR

SEQ ID NO: 454 - protein, 221 aa, Arabidopsis thaliana
  Clone ID: AT_F5E6.C1.p8.tg
MASLISDIEPPTSTTSDLVRRKKRSSASSAASSRSSASSVSGEIHARWRSEKQQRIYSAKLFQALQQVRLNSSASTSSSPTAQKRGKAVREAADRALAVSARGRTLWSRAILANRIKLKFRKQRRPRATMAIPAMTTVVSSSSNRSRKRRVSVLRLNKKSIPDVNRKVRVLGRLVPGCGKQSVPVILEEATDYIQALEMQVRAMNSLVQLLSSYGSAPPPI

SEQ ID NO: 455 - protein, 131 aa, Arabidopsis thaliana
  Clone ID: AT_F4F7.C1.p16.tg
MNKDEVFLRQWFEILYSLTNPEANSDLRRINNEKGVEKVGQKRSAESRREGKKKRVKTQCVIKSSDKSDHDTLLKKKRRERIRRQLETLKEITPNCPQSDINAILDCVIEYTNNLRLAVLFGALQGFAGNM

SEQ ID NO: 456 - protein, 270 aa, Arabidopsis thaliana
  Clone ID: AT_MLD14.C1.p22.tg
MGDTAEDQDDRAMMEAEGVTSFSELLMFSDGVLSSSSDHQPEGNVGDGGEDSLGFVFSGKTGSRMLCFSGGYQNDDESLFLEPSVPTSGVSDLDPSCIKIDCRNSNDACTVDKSTKSSTKKRTGTGNGQESDQNRKPGKKGKRNQEKSSVGIAKVRKERLGERIAALQQLVSPYGKTDAASVLHEAMGYIKFLQDQIQVLCSPYLINHSLDGGVVTGDVMAAMKAKDLRSRGLCLVPVSSTVHVENSNGADFWSPATMGHTTSPSLPQGF

SEQ ID NO: 457 - protein, 407 aa, Arabidopsis thaliana
  Clone ID: AT_F19B15.C1.p130.tg
MNRGVLESSPVQQLMAAGNPNWWNVSGGMRPPPPLMGHQQAPLPPHMTPNNNYLRPRMMPTPFPHFLPSPATSSSSSSSSPSLPNNPNLSSWLESNDLPPESWSLSQLLLGGLMMGEEERLEMMNHHNHHDEQQHHGFQGKIRLENWEEQVLSHQQASMVAVDIKQEGNINNNNGYVISSPNSPPNKSCVTTTTTTSLNSNDDNINNNNNMLDFSSNHNGLHLSEGRHTPPDRSSECNSLEIGGSTNKKPRLQPSPSSQSTLKVRKEKLGGRIAALHQLVSPFGKTDTASVLSEAIGYIRFLQSQIEALSHPYFGTTASGNMRHQQHLQGDRSCIFPEDPGQLVNDQCMKRRGASSSSTDNQNASEEPKKDLRSRGLCLVPISCTLQVGSDNGADYWAPALGSAGFH

SEQ ID NO: 458 - protein, 723 aa, Arabidopsis thaliana
  Clone ID: AT_F16D14.C1.p12.tg
MGKRQISQDEVGPPIKPRAGLRREQAGRGSYREILKSFCFNTDWDYAVFWQLNHRGSRMVLTLEDAYYDHHGTNMHGAHDPLGLAVAKMSYHVYSLGEGIVGQVAVSGEHQWVFPENYNNCNSAFETILVVAVGPCGVVQLGSLCKPKMPSEGLHAEAFPDCSGEVDKAMDVEESNILTQYKTRRSDSMPYNTPSSCLVMEKAAQVVGGREVVQGSTCGSYSGVTFGFPVDLVGAKHENQVGTNIIRDAPHVGMTSGCKDSRDLDPNLHLYMKNHVLNDTSTSALAIEAERLITSQSYPRLDSTFQATSRTDKESSYHNEVFQLSENQGNKYIKETERMLGRNCESSQFDALISSGYTFAGSELLEALGSAFKQTNTGQEELLKSEHGSTMRPTDDMSHSQLTFDPGPENLLDAVVANVCQRDGNARDDMMSSRSVQSLLTNMELAEPSGQKKHNIVNPINSAMNQPPMAEVDTQQNSSDICGAFSSIGFSSTYPSSSSDQFQTSLDIPKKNKKRAKPGESSRPRPRDRQLIQDRIKELRELVPNGSKCSIDSLLERTIKHMLFLQNVTKHAEKLSKSANEKMQQKETGMQGSSCAVEVGGHLQVSSIIVENLNKQGMVLIEFNLCLNSSPKFCECVLKVFLGIGQMLCEECGHFLEIANVIRSLDLVILRGFTETQGEKTWICFVTEVGSRITQFMKEIPKQIKVFSLVLIELWISMIYMTD

SEQ ID NO: 459 - protein, 209 aa, Arabidopsis thaliana
  Clone ID: AT_MIO24.C1.p8.tg
MNPSNNPKKTRHQSHMPQERDETKKEKKLLHRNIERQRRQEMAILFASLRSQLPLKYIKALSSQGKRAMSDHVNGAVSFIKDTQTRIKDLSARRDELKREIGDPTSLTGSGSGSGSSRSEPASVMVQPCVSGFEVVVSSLASGLEAWPLSRVLEVLHGQGLEVISSLTARVNERLMYTIQVEVNSFDCFDLAWLQQKLIEQLVLSTTRH

SEQ ID NO: 460 - protein, 1288 aa, Arabidopsis thaliana
  Clone ID: AT_T21E18.C1.p17.tg
MGYTLQQILRSICSNTDWNYAVFWKLNHHSPMVLTLEDVYCVNHERGLMPESLHGGRHAHDPLGLAVAKMSYHVHNGWESQISAGIKTILIVAVGSCGVVQLGSLCKVEEDPALVTHIRHLFLALTDPLADHASNLMQCDINSPSDRPKIPSKCLHEASPDFSGEFDKAMDMEGLNIVSQNTSNRSNDLPYNFTPTYFHMERTAQVIGGLEAVQPSMFGSNDCVTSGFSVGVVDTKHKNQVDISDMSKVIYDEETGGYRYSRELDPNFQHYSRNHVRNSGGTSALAMESDRLKAGSSYPQLDSTVLTALKTDKDYSRRNEVFQPSESQGSIFVKDTEHRQEEKSESSQLDALTASLCSFSGSELLEALGPAFSKTSTDYGELAKFESAAAIRRTNDMSHSHLTFESSSENLLDAVVASMSNGDGNVRREISSSRSTQSLLTTAEMAQAEPFGHNKQNIVSTVDSVISQPPLADGLIQQNPSNICGAFSSIGFSSTCLSSSSDQFPTSLEIPKKNKKRAKPGESSRPRPRDRQLIQDRIKELRELVPNGSKCSIDSLLECTIKHMLFLQSVSQHADKLTKSASSKMQHKDTGTLGISSTEQGSSWAVEIGGHLQVCSIMVENLDKEGVMLIEMLCEECSHFLEIANVIRSLELIILRGTTEKQGEKTWICFVVEGQNNKVMHRMDILWSLVQIFQPKATNSLHLYRQSQILYMNAFANVHSLRVPSHHLRDFSASLSLAPPNLKKIIKQCSTPKLLESALAAMIKTSLNQDCRLMNQFITACTSFKRLDLAVSTMTQMQEPNVFVYNALFKGFVTCSHPIRSLELYVRMLRDSVSPSSYTYSSLVKASSFASRFGESLQAHIWKFGFGFHVKIQTTLIDFYSATGRIREARKVFDEMPERDDIAWTTMVSAYRRVLDMDSANSLANQMSEKNEATSNCLINGYMGLGNLEQAESLFNQMPVKDIISWTTMIKGYSQNKRYREAIAVFYKMMEEGIIPDEVTMSTVISACAHLGVLEIGKEVHMYTLQNGFVLDVYIGSALVDMYSKCGSLERALLVFFNLPKKNLFCWNSIIEGLAAHGFAQEALKMFAKMEMESVKPNAVTFVSVFTACTHAGLVDEGRRIYRSMIDDYSIVSNVEHYGGMVHLFSKAGLIYEALELIGNMEFEPNAVIWGALLDGCRIHKNLVIAEIAFNKLMVLEPMNSGYYFLLVSMYAEQNRWRDVAEIRGRMRELGIEKICPGTSSIRIDKRDHLFAAADKSHSASDEVCLLLDEIYDQMGLAGYVQETENVY

SEQ ID NO: 461 - protein, 214 aa, Arabidopsis thaliana
  Clone ID: AT_T6K22.C1.p70.tg
MTEEFDTTGVCTGTWWSSSNGMFSGCSLPRSAEIVVDFGEIEWQNIDTLDAKTYNENYLSTSTFLGNANLDTTSQIYVSSPSNIHEEERYNQINSFLEGLFDSSEQLLVPNCPKPELFESFHFFDDVFPNESRMISVFDHQKPKEDMQACKSLTTCKRASEKSGELEDIESSQPLKRPRLETPSHFPSFKTDTASVLHDAIDYIKFLQEQITVS

SEQ ID NO: 462 - protein, 247 aa, Arabidopsis thaliana
  Clone ID: AT_K9D7.C1.p15.tg
MDNFFLGLSCQEENNFWDLIVADISGDRSVSVPIRSAFRSYMKDTELRMMSPKISSSKVNVKKRMVNLLRKNWEEKKNTVAPEKERSRRHMLKERTRREKQKQSYLALHSLLPFATKNDKNSIVEKAVDEIAKLQRLKKELVRRIKVIEEKSAKDGHDEMSETKVRVNLKEPLSGLDSMLEALHYLKSMGTKLKTVHANFSPQEFSATMTIETQIRGEEVEKRVERRLQETEWKLLFLPEASFYKDY

SEQ ID NO: 463 - protein, 267 aa, Arabidopsis thaliana
  Clone ID: AT_T6A9.C1.p13.tg
MELGWRNDVGSLAVKDQGMMSERARSDEDRLINGLKWGYGYFDHDQTDNYLQIVPEIHKEVENAKEDLLVVVPDEHSETDDHHHIKDFSERSDHRFYLRNKHENPKKRRIQVLSSDDESEEFTREVPSVTRKGSKRRRRDEKMSNKMRKLQQLVPNCHKTDKVSVLDKTIEYMKNLQLQLFGMHNHMLTAMASAHGLNPANHMMPSPLIPALNWPLPPFTNISFPHSSSQSLFLTTSSPASSPQSLHGLVPYFPSFLDFSSHAMRRL

SEQ ID NO: 464 - protein, 350 aa, Arabidopsis thaliana
  Clone ID: AT_F27D4.C1.p17.tg
MMNSSLLTPSSSSSSHIQTPSTTFDHEDFLDQIFSSAPWPSVVDDAHPLPSDGFHGHDVDSRNQPIMMMPLNDGSSVHALYNGFSVAGSLPNFQIPQGSGGGLMNQQGQTQTQTQPQASASTATGGTVAAPPQSRTKIRARRGQATDPHSIAERLRRERIAERMKALQELVPNGNKTDKASMLDEIIDYVKFLQLQVKVLSMSRLGGAASVSSQISEAGGSHGNASSAMVGGSQTAGNSNDSVTMTEHQVAKLMEEDMGSAMQYLQGKGLCLMPISLATAISTATCHSRNPLIPGAVADVGGPSPPNLSGMTIQSTSTKMGSGNGKLNGNGVTERSSSIAVKEAVSVSKA

SEQ ID NO: 465 - protein, 210 aa, Arabidopsis thaliana
  Clone ID: AT_K21H1.C1.p7.tg
MGDSDVGDRLPPPSSSDELSSFLRQILSRTPTAQPSSPPKSTNVSSAETFFPSVSGGAVSSVGYGVSETGQDKYAFEHKRSGAKQRNSLKRNIDAQFHNLSEKKRRSKINEKMKALQKLIPNSNKTDKASMLDEAIEYLKQLQLQVQTLAVMNGLGLNPMRLPQVPPPTHTRINETLEQDLNLETLLAAPHSLEPAKTSQGMCFSTATLL

SEQ ID NO: 466 - protein, 295 aa, Arabidopsis thaliana
  Clone ID: AT_F14B2.C1.p8.tg
MYPPNSSKSTAHDGGGDADTNQYDSAAGATRDFSSLGPQTHHHPPPQRQQQHQQNPNLVGHYLPGEPSSIGFDSNASSSSSLFRHRSSPAGFYDQHLPTDPNGFSLGRPNGGYGGGGEQGPSRLKSELRFSSGSSSHQEHNSLPRISEVEAAAAARNGVASSSMSFGNNRTNNWDNSSSHISFTIDQPGKRSKNSDFFTLETQYSMPQTTLEMATMENLMNIPEDSVPCRARAKRGFATHPRSIAERERRTRISGKLKKLQELVPNMDKQTSYADMLDLAVEHIKGLQHQVEVRP

SEQ ID NO: 467 - protein, 329 aa, Arabidopsis thaliana
  Clone ID: AT_F6N15.C1.p11.tg
MILRQQPPPPSAPPQPQTSPYYEVAELTWENGQLGLHGLGPPRVTASSTKYSTGAGGTLESIVDQATRLPNPKPTDELVPWFHHRSSRAAMAMDALVPCSNLVHEQQSKPGGVGSTRVGSCSDGRTMGGGKRARVAPEWSGGGSQRLTMDTYDKRRDKINQRMKTLQKLVPNSSKTDKASMLDEVIEYLKQLQAQVSMMSRMNMPSMMLPMAMQQQQQLQMSLMSNPMGLGMGMGMPGLGLLDLNSMNRAAASAPNIHANMMPNPFLPMNCPSWDASSNDSRFQSPLIPDPMSAFLACSTQPTTMEAYSRMATLYQQMQQQLPPPSNPK

SEQ ID NO: 468 - protein, 379 aa, Arabidopsis thaliana
  Clone ID: AT_F17A8.C1.p170.tg
MDESSIIPAEKVAGAEKKELQGLLKTAVQSVDWTYSVFWQFCPQQRVLVWGNGYYNGAIKTRKTTQPAEVTAEEAALERSQQLRELYETLLAGESTSEARACTALSPEDLTETEWFYLMCVSFSFPPPSGMPGKAYARRKHVWLSGANEVDSKTFSRAILAKTVVCIPMLDGVVELGTTKKNGKEHQQVKTAPSSQWVLKQMIFRVPFLHDNTKDKRLPREDLSHVVAERRRREKLNEKFITLRSMVPFVTKMDKVSILGDTIAYVNHLRKRVHELENTHHEQQHKRTRTCKRKTSEEVEVSIIENDVLLEMRCEYRDGLLLDILQVLHELGIETTAVHTSVNDHDFEAEIRAKVRGKKASIAEVKRAIHQVIIHDTNL

SEQ ID NO: 469 - protein, 361 aa, Arabidopsis thaliana
  Clone ID: AT_T27I1.C1.p15.tg
MGGESNEGGEMGFKHGDDESGGISRVGITSMPLYAKADPFFSSADWDPVVNAAAAGFSSSHYHPSMAMDNPGMSCFSHYQPGSVSGFAADMPASLLPFGDCGGGQIGHFLGSDKKGERLIRAGESSHEDHHQVSDDAVLGASPVGKRRLPEAESQWNKKAVEEFQEDPQRGNDQSQKKHKNDQSKETVNKESSQSEEAPKENYIHMRARRGQATNSHSLAERVRREKISERMRLLQELVPGCNKITGKAVMLDEIINYVQSLQQQVEFLSMKLATVNPEINIDIDRILAKDLLQSRDRNTPTLGLNPFAGFQGNIPNLSATTNPQYNPLPQTTLESELQNLYQMGFVSNPSTMSSFSPNGN

SEQ ID NO: 470 - protein, 315 aa, Arabidopsis thaliana
  Clone ID: AT_F12B17.C1.p80.tg
METELTQLRKQESNNLNGVNGGFMAIDQFVPNDWNFDYLCFNNLLQEDDNIDHPSSSSLMNLISQPPPLLHQPPQPSSPLYDSPPLSSAFDYPFLEDIIHSSYSPPPLILPASQENTNNYSPLMEESKSFISIGETNKKRSNKKLEGQPSKNLMAERRRRKRLNDRLSLLRSIVPKITKMDRTSILGDAIDYMKELLDKINKLQEDEQELGSNSHLSTLITNESMVRNSLKFEVDQREVNTHIDICCPTKPGLVVSTVSTLETLGLEIEQCVISCFSDFSLQASCFEVGEQRYMVTSEATKQALIRNAGYGGRCL

SEQ ID NO: 471 - protein, 807 aa, Arabidopsis thaliana
  Clone ID: AT_T20M3.C1.p6.tg
MAAKVFTQNPIYSQSLVRDKTPQQKHNLDHFSISQHTSKRLVVSSSTMSPPISSSPLSLPSSSSSQAIPPSRAPAVTLPLSRVWREIQGSNNWENLIEPLSPILQQEITRYGNLLSASYKGFDLNPNSKRYLSCKYGKKNLLKESGIHDPDGYQVTKYIYATPDINLNPIKNEPNRARWIGYVAVSSDESVKRLGRRDILVTFRGTVTNHEWLANLKSSLTPARLDPHNPRPDVKVESGFLGLYTSGESESKFGLESCREQLLSEISRLMNKHKGEEISITLAGHSMGSSLAQLLAYDIAELGMNQRRDEKPVPVTVFSFAGPRVGNLGFKKRCEELGVKVLRITNVNDPITKLPGFLFNENFRSLGGVYELPWSCSCYTHVGVELTLDFFDVQNISCVHDLETYITLVNRPRCSKLAVNEDNFGGEFLNRTSELMFIMYQSSSSTSSSSQRSSLPGGGGLIRYGSAPGSFLNSVVDEVIGGGSSNARDFTGYQPSSDNFIGNFFTGAADSSSLRSDSTTCGVNNSSDGQKQLGNNNNNNSNKDIFLDRSYGGFNEISQQHKSNDIGGGNSSGSYSLARQRSSPADFFTYLASDKNNFSLNQPTSDYSPQGGSNGGRGHSRLKSQLSFTNHDSLARINEVNETPVHDGSGHSFSAASFGAATTDSWDDGSGSIGFTVTRPSKRSKDMDSGLFSQYSLPSDTSMNYMDNFMQLPEDSVPCKIRAKRGCATHPRSIAERERRTRISGKLKKLQDLVPNMDKQTSYSDMLDLAVQHIKGLQHQLQVPLSYFFCLGQLNPFPEFSLVHDPY

SEQ ID NO: 472 - protein, 421 aa, Arabidopsis thaliana
  Clone ID: AT_F20B24.C1.p4.tg
MMMMRGGERVKEFLRPFVDSRTWDLCVIWKLGDDPSRFIEWVGCCCSGCYIDKNIKLENSEEGGTGRKKKASFCRDDHNKHRIRTLACEALSRFPLFMPLYPGIHGEVVMSKSPKWLVNSGSKMEMFSTRVLVPVSDGLVELFAFDMRPFDESMVHLIMSRCTTFFEPFPEQRLQFRIIPRAEESMSSGVNLSVEGGGSSSVSNPSSETQNLFGNYPNASCVEILREEQTPCLIMNKEKDVVVQNANDSKANKKLLPTENFKSKNLHSERKRRERINQAMYGLRAVVPKITKLNKIGIFSDAVDYINELLVEKQKLEDELKGINEMECKEIAAEEQSAIADPEAERVSSKSNKRVKKNEVKIEVHETGERDFLIRVVQEHKQDGFKRLIEAVDLCELEIIDVNFTRLDLTVMTVLNVKVVT

SEQ ID NO: 473 - protein, 456 aa, Arabidopsis thaliana
  Clone ID: AT_F21O3.C1.p5.tg
MENELFMNAGVSHPPVMTSPSSSSAMLKWVSMETQPVDPSLSRNLFWEKSTEQSIFDSALSSLVSSPTPSNSNFSVGGVGGENVIMRELIGKLGNIGDIYGITASNGNSCYATPMSSPPPGSMMETKTTTPMAELSGDPGFAERAARFSCFGSRSFNSRTNSPFPINNEPPITTNEKMPRVSSSPVFKPLASHVPAGESSGELSRKRKTKSKQNSPSAVSSSKEIEEKEDSDPKRCKKSEENGDKTKSIDPYKDYIHVRARRGQATDSHSLAERVRREKISERMKLLQDLVPGCNKVTGKALMLDEIINYVQSLQRQVEFLSMKLSSVNTRLDFNMDALLSKDIFPSSNNLMHHQQVLQLDSSAETLLGDHHNKNLQLNPDISSNNVINPLETSETRSFISHLPTLAHFTDSISQYSTFSEDDLHSIIHMGFAQNRLQELNQGSSNQVPSHMKAEL

SEQ ID NO: 474 - protein, 207 aa, Arabidopsis thaliana
  Clone ID: AT_T6K22.C1.p60.tg
MGGGSRFQEPVRMSRRKQVTKEKEEDENFKSPNLEAERRRREKLHCRLMALRSHVPIVTNMTKASIVEDAITYIGELQNNVKNLLETFHEMEEAPPEIDEEQTDPMIKPEVETSDLNEEMKKLGIEENVQLCKIGERKFWLKIITEKRDGIFTKFMEVMRFLGFEIIDISLTTSNGAILISASVQTQELCDVEQTKDFLLEVMRSNP

SEQ ID NO: 475 - protein, 420 aa, Arabidopsis thaliana
  Clone ID: AT_F9P14.C1.p2.tg
MGGGGMFEEIGCFDPNAPAEMTAESSFSPSEPPPTITVIGSNSNSNCSLEDLSAFHLSPQDSSLPASASAYAHQLHINATPNCDHQFQSSMHQTLQDPSYAQQSNHWDNGYQDFVNLGPNHTTPDLLSLLQLPRSSLPPFANPSIQDIIMTTSSSVAAYDPLFHLNFPLQPPNGSFMGVDQDQTETNQGVNLMYDEENNNLDDGLNRKGRGSKKRKIFPTERERRVHFKDRFGDLKNLIPNPTKNDRASIVGEAIDYIKELLRTIDEFKLLVEKKRVKQRNREGDDVVDENFKAQSEVVEQCLINKKNNALRCSWLKRKSKFTDVDVRIIDDEVTIKIVQKKKINCLLFVSKVVDQLELDLHHVAGAQIGEHHSFLFNAKISEGSSVYASAIADRVMEVLKKQYMEALSANNGYHCYSSD

SEQ ID NO: 476 - protein, 423 aa, Arabidopsis thaliana
  Clone ID: AT_MFL8.C1.p13.tg
MEHQGWSFEENYSLSTNRRSIRPQDELVELLWRDGQVVLQSQTHREQTQTQKQDHHEEALRSSTFLEDQETVSWIQYPPDEDPFEPDDFSSHFFSTMDPLQRPTSETVKPKSSPEPPQVMVKPKACPDPPPQVMPPPKFRLTNSSSGIRETEMEQYSVTTVGPSHCGSNPSQNDLDVSMSHDRSKNIEEKLNPNASSSSGGSSGCSFGKDIKEMASGRCITTDRKRKRINHTDESVSLSDSNQRSGSNRRSRAAEVHNLSERRRRDRINERMKALQELIPHCSKTDKASILDEAIDYLKSLQLQLQVMWMGSGMAAAAASAPMMFPGVQPQQFIRQIQSPVQLPRFPVMDQSAIQNNPGLVCQNPVQNQIISDRFARYIGGFPHMQAATQPMEMLRFSSPAGQQSQQPSSVPTKTTDGSRLDH

SEQ ID NO: 477 - protein, 349 aa, Arabidopsis thaliana
  Clone ID: AT_F17I5.C1.p70.tg
MGEWSNNLGGMYTYATEEADFMNQLLASYDHPGTGSSSGAAASGDHQGLYWNLGSHHNHLSLVSEAGSFCFSQESSSYSAGNSGYYTVVPPTVEENQNETMDFGMEDVTINTNSYLVGEETSECDVEKYSSGKTLMPLETVVENHDDEESLLQSEISVTTTKSLTGSKKRSRATSTDKNKRARVNKRAQKNVEMSGDNNEGEEEEGETKLKKRKNGAMMSRQNSSTTFCTEEESNCADQDGGGEDSSSKEDDPSKALNLNGKTRASRGAATDPQSLYARKRRERINERLRILQNLVPNGTKVDISTMLEEAVHYVKFLQLQIKLLSSDDLWMYAPIAFNGMDIGLSSPR

SEQ ID NO: 478 - protein, 226 aa, Arabidopsis thaliana
  Clone ID: AT_MHK10.C1.p2.tg
MELLHFPDSSSSQARTVTSGDISPTTLHPFGALTFPSNSLLLDRAARFSVIATEQNGNFSGETANSLPSNPGANLDRVKAEPAETDSMVENQNQSYSSGKRKEREKKVKSSTKKNKSSVESDKLPYVHVRARRGQATDNHSLAERVIHNLTDMARREKINARMKLLQELVPGCDKIQGTALVLDEIINHVQTLQRQVEMLSMRLAAVNPRIDFNLDSILASEVSIN

SEQ ID NO: 479 - protein, 371 aa, Arabidopsis thaliana
  Clone ID: AT_F19D11.C1.p9.tg
MFVLRVSNQSFKLHQQVQCKDEIFCLDQKVNVRRSLQVQETVEDHQSFALEEEEQQLSTPSLLQDTTIPFLQMLQQSEDPSPFLSFKDPSFLALLSLQTLEKPWELENYLPHEVPEFHSPIHSETNHYYHNPSLEGVNEAISNQELPFNPLENARSRRKRKNNNLASLMTREKRKRRRTKPTKNIEEIESQRMTHIAVERNRRRQMNVHLNSLRSIIPSSYIQRGDQASIVGGAIDFVKILEQQLQSLEAQKRSQQSDDNKEQIPEDNSLRNISSNKLRASNKEEQSSKLKIEATVIESHVNLKIQCTRKQGQLLRSIILLEKLRFTVLHLNITSPTNTSVSYSFNLKMEDECNLGSADEITAAIRQIFDS

SEQ ID NO: 480 - protein, 351 aa, Arabidopsis thaliana
  Clone ID: AT_K21L13.C1.p16.tg
MELSTQMNVFEELLVPTKQETTDNNINNLSFNGGFDHHHHQFFPNGYNIDYLCFNNEEEDENTLLYPSSFMDLISQPPPLLLHQPPPLQPLSPPLSSSATAGATFDYPFLEALQEIIDSSSSSPPLILQNGQEENFNNPMSYPSPLMESDQSKSFSVGYCGGETNKKKSKKLEGQPSKNLMAERRRRKRLNDRLSMLRSIVPKISKMDRTSILGDAIDYMKELLDKINKLQDEEQELGNSNNSHHSKLFGDLKDLNANEPLVRNSPKFEIDRRDEDTRVDICCSPKPGLLLSTVNTLETLGLEIEQCVISCFSDFSLQASCSEGAEQRDFITSEDIKQALFRNAGYGGSCL

SEQ ID NO: 481 - protein, 380 aa, Arabidopsis thaliana
  Clone ID: AT_T24P15.C1.p19.tg
MDSNNHLYDPNPTGSGLLRFRSAPSSVLAAFVDDDKIGFDSDRLLSRFVTSNGVNGDLGSPKFEDKSPVSLTNTSVSYAATLPPPPQLEPSSFLGLPPHYPRQSKGIMNSVGLDQFLGINNHHTKPVESNLLRQSSSPAGMFTNLSDQNELKHFGLNKSNKCLLYTYKFAGYGSMRNLMNYEEDEESPSNSNGLRRHCSLSSRPPSSLGMLSQIPEIAPETNFPYSHWNDPSSFIDNLSSLKREAEDDGKLFLGAQNGESGNRMQLLSHHLSLPKSSSTASDMVSVDKYLQLQDSVPCKIRAKRGCATHPRSIAERVRRTRISERMRKLQELVPNMDKQTNTSDMLDLAVDYIKDLQRQYKILNDNRANCKCMNKEKKSI

SEQ ID NO: 482 - protein, 258 aa, Arabidopsis thaliana
  Clone ID: AT_F24I3.C1.p60.tg
MCALVPPLFPNFGWPSTGEYDSYYLAGDILNNGGFLDFPVPEETYGAVTAVTQHQNSFGVSVSSEGNEIDNNPVVVKKLNHNASERDRRRKINSLFSSLRSCLPASGQSKKLSIPATVSRSLKYIPELQEQVKKLIKKKEELLVQISGQRNTECYVKQPPKAVANYISTVSATRLGDNEVMVQISSSKIHNFSISNVLSGLEEDRFVLVDMSSSRSQGERLFYTLHLQVEKIENYKLNCEELSQRMLYLYEECGNSYI

SEQ ID NO: 483 - protein, 304 aa, Arabidopsis thaliana
  Clone ID: AT_F12K8.C1.p16.tg
MPLEAVVYPQDPFGYLSNCKDFMFHDLYSQEEFVAQDTKNNIDKLGHEQSFVEQGKEDDHQWRDYHQYPLLIPSLGEELGLTAIDVESHPPPQHRRKRRRTRNCKNKEEIENQRMTHIAVERNRRKQMNEYLAVLRSLMPSSYAQRGDQASIVGGAINYVKELEHILQSMEPKRTRTHDPKGDKTSTSSLVGPFTDFFSFPQYSTKSSSDVPESSSSPAEIEVTVAESHANIKIMTKKKPRQLLKLITSLQSLRLTLLHLNVTTLHNSILYSISVRVEEGSQLNTVDDIATALNQTIRRIQEET

SEQ ID NO: 484 - protein, 284 aa, Arabidopsis thaliana
  Clone ID: AT_MPN9.C1.p10.tg
MDVSARKSQKAGREKLRREKLNEHFVELGNVLDPERPKNDKATILTDTVQLLKELTSEVNKLKSEYTALTDESRELTQEKNDLREEKTSLKSDIENLNLQYQQRLRSMSPWGAAMDHTVMMAPPPSFPYPMPIAMPPGSIPMHPSMPSYTYFGNQNPSMIPAPCPTYMPYMPPNTVVEQQSVHIPQNPGNRSREPRAKVSRESRSEKAEDSNEVATQLELKTPGSTSDKDTLQRPEKTKRCKRNNNNNSIEESSHSSKCSSSPSVRDHSSSSSVAGGQKPDDAK

SEQ ID NO: 485 - protein, 379 aa, Arabidopsis thaliana
  Clone ID: AT_F23H24.C1.p5.tg
MESEFQQHHFLLHDHQHQRPRNSGLIRYQSAPSSYFSSFGESIEEFLDRPTSPETERILSGFLQTTDTSDNVDSFLHHTFNSDGTEKKPPEVKTEDEDAEIPVTATATAMEVVVSGDGEISVNPEVSIGYVASVSRNKRPREKDDRTPVNNLARHNSSPAGLFSSIDVETAYAAVMKSMGGFGGSNVMSTSNTEASSLTPRSKLLPPTSRAMSPISEVDVKPGFSSRLPPRTLSGGFNRSFGNEGSASSKLTALARTQSGGLDQYKTKDEDSASRRPPLAHHMSLPKSLSDIEQLLSDSIPCKIRAKRGCATHPRSIAERVRRTKISERMRKLQDLVPNMDTQTNTADMLDLAVQYIKDLQEQVKALEESRARCRCSSA

SEQ ID NO: 486 - protein, 281 aa, Arabidopsis thaliana
  Clone ID: AT_MRG21.C1.p2.tg
MDPPLVNDSSFSAANPSSYTLSEIWPFPVNDAVRSGLRLAVNSGRVFTRSEHSGNKDVSAAEESTVTDLTAGWGSRKTRDLNSEDDSSKMVSSSSSGNELKESGDKKRKLCGSESGNGDGSMRPEGETSSGGGGSKATEQKNKPEPPKDYIHVRARRGQATDRHSLAERARREKISEKMTALQDIIPGCNKIIGKALVLDEIINYIQSLQRQVEFLSMKLEVVNSGASTGPTIGVFPSGDLGTLPIDVHRTIYEQQEANETRVSQPEWLHMQVDGNFNRTT

SEQ ID NO: 487 - protein, 277 aa, Arabidopsis thaliana
  Clone ID: AT_F27B13.C1.p170.tg
MEDLDHEYKNYWETTMFFQNQELEFDSWPMEEAFSGSGESSSPDGAATSPASSKNVVSERNRRQKLNQRLFALRSVVPNISKLDKASVIKDSIDYMQELIDQEKTLEAEIRELESRSTLLENPVRDYDCNFAETHLQDFSDNNDMRSKKFKQMDYSTRVQHYPIEVLELIIPNCFYINMKKQMKVTWMGEKTVVVCITCSKKRETMVQLCKVLESLNLNILTTNFSSFTSRLSTTLFLQVTLSLSPSLISLFGNVITSTNYKILNASREYCTCLVLV

SEQ ID NO: 488 - protein, 828 aa, Arabidopsis thaliana
  Clone ID: AT_F13K23.C1.p9.tg
MESREDSFISKEKKSTMKKEKQAIASQRNRRRVIKNRGNGKRLIASLSQRKRRRIPRGRGNEKAVFAPSSLPNDVVEEIFLRLPVKAIIQLKSLSKQWRSTIESRSFEERHLKIVERSRVDFPQVMVMSEEYSLKGSKGNQPRPDTDIGFSTICLESASILSSTLITFPQGFQHRIYASESCDGLFCIHSLKTQAIYVVNPATRWFRQLPPARFQILMQKLYPTQDTWIDIKPVVCYTAFVKANDYKLVWLYNSDASNPNLGVTKCEVFDFRANAWRYLTCTPSYRIFPDQVPAATNGSIYWFTEPYNGEIKVVALDIHTETFRVLPKINPAIASSDPDHIDMCTLDNGLCMSKRESDTLVQEIWRLKSSEDSWEKFDMNSDGVWLDGSGESPEVNNGEAASWVRNPDEDWFNNPPPPQHTNQNDFRFNGGFPLNPSENLLLLLQQSIDSSSSSSPLLHPFTLDAASQQQQQQQQQQEQSFLATKACIVSLLNVPTINNNTFDDFGFDSGFLGQQFHGNHQSPNSMNFTGLNHSVPDFLPAPENSSGSCGLSPLFSNRAKVLKPLQVMASSGSQPTLFQKRAAMRQSSSSKMCNSESSSEMRKSSYEREIDDTSTGIIDISGLNYESDDHNTNNNKGKKKGMPAKNLMAERRRRKKLNDRLYMLRSVVPKISKMDRASILGDAIDYLKELLQRINDLHTELESTPPSSSSLHPLTPTPQTLSYRVKEELCPSSSLPSPKGQQPRVEVRLREGKAVNIHMFCGRRPGLLLSTMRALDNLGLDVQQAVISCFNGFALDVFRAEQCQEDHDVLPEQIKAVLLDTAGYAGLV

SEQ ID NO: 489 - protein, 298 aa, Arabidopsis thaliana
  Clone ID: AT_F28G11.C1.p9.tg
MALVNDHPNETNYLSKQNSSSSEDLSSPGLDQPDAAYAGGGGGGGSASSSSTMNSDHQQHQGFVFYPSGEDHHNSLMDFNGSSFLNFDHHESFPPPAISCGGSSGGGGFSFLEGNNMSYGFTNWNHQHHMDIISPRSTETPQGQKDWLYSDSTVVTTGSRNESLSPKSAGNKRSHTGESTQPSKKLSSGVTGKTKPKPTTSPKDPQSLAAKNRRERISERLKILQELVPNGTKVDLVTMLEKAISYVKFLQVQVKVLATDEFWPAQGGKAPDISQVKDAIDAILSSSQRDRNSNLITN

SEQ ID NO: 490 - protein, 253 aa, Arabidopsis thaliana
  Clone ID: AT_F24I3.C1.p50.tg
MCALVPSFFTNFGWPSTNQYESYYGAGDNLNNGTFLELTVPQTYEVTHHQNSLGVSVSSEGNEIDNNPVVVKKLNHNASERDRRKKINTLFSSLRSCLPASDQSKKLSIPETVSKSLKYIPELQQQVKRLIQKKEEILVRVSGQRDFELYDKQQPKAVASYLSTVSATRLGDNEVMVQVSSSKIHNFSISNVLGGIEEDGFVLVDVSSSRSQGERLFYTLHLQVENMDDYKINCEELSERMLYLYEKCENSFN

SEQ ID NO: 491 - protein, 300 aa, Arabidopsis thaliana
  Clone ID: AT_C7A10.C1.p820.tg
MTTWLKWLQQQQMVSPEFLQILGSDGREELKRVESYLGNNNDELQSFRHFPEFGPDYDTTDGCISRTSSFHMEPVKNNGHSRAITLQNKRKPEGKTEKREKKKIKAEDETEPSMKGKSNMSNTETSSEIQKPDYIHVRARRGEATDRHSLAERARREKISKKMKCLQDIVPGCNKVTGKAGMLDEIINYVQSLQQQVEFLSMKLSVINPELECHIDDLSAKQFQAYFTGPPEGDSKQSIMADFRSFPLHQQGSLDYSVINSDHTTSLGAKDHTSSSWETHSQCLYNSLRTDSVSNFFSLK

SEQ ID NO: 492 - protein, 310 aa, Arabidopsis thaliana
  Clone ID: AT_T10P11.C1.p13.tg
MASNNPHDNLSDQTPSDDFFEQILGLPNFSASSAAGLSGVDGGLGGGAPPMMLQLGSGEEGSHMGGLGGSGPTGFHNQMFPLGLSLDQGKGPGFLRPEGGHGSGKRFSDDVVDNRCSSMKPVFHGQPMQQPPPSAPHQPTSIRPRVRARRGQATDPHSIAERLRRERIAERIRALQELVPTVNKTDRAAMIDEIVDYVKFLRLQVKVLSMSRLGGAGAVAPLVTDMPLSSSVEDETGEGGRTPQPAWEKWSNDGTERQVAKLMEENVGAAMQLLQSKALCMMPISLAMAIYHSQPPDTSSVVKPENNPPQ

SEQ ID NO: 493 - protein, 291 aa, Arabidopsis thaliana
  Clone ID: AT_K14B15.C1.p10.tg
MQTNEDNIFQDFGSCGVNLMQPQQEQFDSFNGNLEQVCSSFRGGNNGVVYSSSIGSAQLDLAASFSGVLQQETHQVCGFRGQNDDSAVPHLQQQQGQVFSGVVEINSSSSVGAVKEEFEEECSGKRRRTGSCSKPGTKACREKLRREKLNDKFMDLSSVLEPGRTPKTDKSAILDDAIRVVNQLRGEAHELQETNQKLLEEIKSLKADKNELREEKLVLKAEKEKMEQQLKSMVVPSPGFMPSQHPAAFHSHKMAVAYPYGYYPPNMPMWSPLPPADRDTSRDLKNLPPVA

SEQ ID NO: 494 - protein, 596 aa, Arabidopsis thaliana
  Clone ID: AT_F24D7.C1.p16.tg
MATGENRTVPDNLKKQLAVSVRNIQWSYGIFWSVSASQPGVLEWGDGYYNGDIKTRKTIQAAEVKIDQLGLERSEQLRELYESLSLAESSASGSSQVTRRASAAALSPEDLTDTEWYYLVCMSFVFNIGEGIPGGALSNGEPIWLCNAETADSKVFTRSLLAKSASLQTVVCFPFLGGVLEIGTTEHIKEDMNVIQSVKTLFLEAPPYTTISTRSDYQEIFDPLSDDKYTPVFITEAFPTTSTSGFEQEPEDHDSFINDGGASQVQSWQFVGEEISNCIHQSLNSSDCVSQTFVGTTGRLACDPRKSRIQRLGQIQEQSNHVNMDDDVHYQGVISTIFKTTHQLILGPQFQNFDKRSSFTRWKRSSSVKTLGEKSQKMIKKILFEVPLMNKKEELLPDTPEETGNHALSEKKRREKLNERFMTLRSIIPSISKIDKVSILDDTIEYLQDLQKRVQELESCRESADTETRITMMKRKKPDDEEERASANCMNSKRKGSDVNVGEDEPADIGYAGLTDNLRISSLGNEVVIELRCAWREGILLEIMDVISDLNLDSHSVQSSTGDGLLCLTVNCKHKGTKIATTGMIQEALQRVAWIC

SEQ ID NO: 495 - protein, 359 aa, Arabidopsis thaliana
  Clone ID: AT_F21F14.C1.p120.tg
MERFQGHINPCFFDRKPDVRSLEVQGFAEAQSFAFKEKEEESLQDTVPFLQMLQSEDPSSFFSIKEPNFLTLLSLQTLKEPWELERYLSLEDSQFHSPVQSETNRFMEGANQAVSSQEIPFSQANMTLPSSTSSPLSAHSRRKRKINHLLPQEMTREKRKRRKTKPSKNNEEIENQRINHIAVERNRRRQMNEHINSLRALLPPSYIQRGDQASIVGGAINYVKVLEQIIQSLESQKRTQQQSNSEVVENALNHLSGISSNDLWTTLEDQTCIPKIEATVIQNHVSLKVQCEKKQGQLLKGIISLEKLKLTVLHLNITTSSHSSVSYSFNLKQMEDECDLESADEITAAVHRIFDIPTI

SEQ ID NO: 496 - protein, 367 aa, Arabidopsis thaliana
  Clone ID: AT_F6I18.C1.p110.tg
MVNLVNVFNMSKSNPSNLKYYNLHPSFKHHKALNLKRHFNNIHFHSHSPPKKKKTEAMNSSSLLTPSSSPSPHLQSPATFDHDDFLHHIFSSTPWPSSVLDDTPPPTSDCAPVTGFHHHDADSRNQITMIPLSHNHPNDALFNGFSTGSLPFHLPQGSGGQTQTQSQATASATTGGATAQPQTKPKVRARRGQATDPHSIAERLRRERIAERMKSLQELVPNGNKTDKASMLDEIIDYVKFLQLQVKVLSMSRLGGAASASSQISEDAGGSHENTSSSGEAKMTEHQVAKLMEEDMGSAMQYLQGKGLCLMPISLATTISTATCPSRSPFVKDTGVPLSPNLSTTIVANGNGSSLVTVKDAPSVSKP

SEQ ID NO: 497 - protein, 262 aa, Arabidopsis thaliana
  Clone ID: AT_T8A17.C1.p70.tg
MQPTSVGSSGGGDDGGGRGGGGGLSRSGLSRIRSAPATWLEALLEEDEEESLKPNLGLTDLLTGNSNDLPTSRGSFEFPIPVEQGLYQQGGFHRQNSTPADFLSGSDGFIQSFGIQANYDYLSGNIDVSPGSKRSREMEALFSSPEFTSQMKGEQSSGQVPTGVSSMSDMNMENLMEDSVAFRVRAKRGCATHPRSIAERVRRTRISDRIRKLQELVPNMDKQTNTADMLEEAVEYVKVLQRQIQELTEEQKRCTCIPKEEQ

SEQ ID NO: 498 - protein, 379 aa, Arabidopsis thaliana
  Clone ID: AT_T10K17.C1.p10.tg
MDLTGGFGARSGGVGPCREPIGLESLHLGDEFRQLVTTLPPENPGGSFTALLELPPTQAVELLHFTDSSSSQQAAVTGIGGEIPPPLHSFGGTLAFPSNSVLMERAARFSVIATEQQNGNISGETPTSSVPSNSSANLDRVKTEPAETDSSQRLISDSAIENQIPCPNQNNRNGKRKDFEKKGKSSTKKNKSSEENEKLPYVHVRARRGQATDSHSLAERARREKINARMKLLQELVPGCDKIQGTALVLDEIINHVQSLQRQVEMLSMRLAAVNPRIDFNLDTILASENGSLMDGSFNAAPMQLAWPQQAIETEQSFHHRQLQQPPTQQWPFDGLNQPVWGREEDQAHGNDNSNLMAVSENVMVASANLHPNQVKMEL

SEQ ID NO: 499 - protein, 447 aa, Arabidopsis thaliana
  Clone ID: AT_F16D14.C1.p6.tg
MGCFDPNTPAEVTVESSFSQAEPPPPPPQVLVAGSTSNSNCSVEVEELSEFHLSPQDCPQASSTPLQFHINPPPPPPPPCDQLHNNLIHQMASHQQQHSNWDNGYQDFVNLGPNSATTPDLLSLLHLPRCSLPPNHHPSSMLPTSFSDIMSSSSAAAVMYDPLFHLNFPMQPRDQNQLRNGSCLLGVEDQIQMDANGGMNVLYFEGANNNNGGFENEILEFNNGVTRKGRGSRKSRTSPTERERRVHFNDRFFDLKNLIPNPTKIDRASIVGEAIDYIKELLRTIEEFKMLVEKKRCGRFRSKKRARVGEGGGGEDQEEEEDTVNYKPQSEVDQSCFNKNNNNSLRCSWLKRKSKVTEVDVRIIDDEVTIKLVQKKKINCLLFTTKVLDQLQLDLHHVAGGQIGEHYSFLFNTKICEGSCVYASGIADTLMEVVEKQYMEAVPSNGY

SEQ ID NO: 500 - protein, 163 aa, Arabidopsis thaliana
  Clone ID: AT_T30C3.C1.p70.tg
MEKLVHKEIEKRRRQEMASLYASLRSLLPLEFIQGKRSTSDQVKGAVNYIDYLQRNIKDINSKRDDLVLLSGRSFRSSNEQEWNEISNHVVIRPCLVGIEIVLSILQTPFSSVLQVLREHGLYVLGYICSSVNDRLIHTLQAEVNDLALIDLADLKDTLTLMK

SEQ ID NO: 501 - protein, 307 aa, Arabidopsis thaliana
  Clone ID: AT_K22F20.C1.p40.tg
MSLINEHCNERNYISTPNSSEDLSSPQNCGLDEGASASSSSTINSDHQNNQGFVFYPSGETIEDHNSLMDFNASSFFTFDNHRSLISPVTNGGAFPVVDGNMSYSYDGWSHHQVDSISPRVIKTPNSFETTSSFGLTSNSMSKPATNHGNGDWLYSGSTIVNIGSRHESTSPKLAGNKRPFTGENTQLSKKPSSGTNGKIKPKATTSPKDPQSLAAKNRRERISERLKVLQELVPNGTKVDLVTMLEKAIGYVKFLQVQVKVLAADEFWPAQGGKAPDISQVKEAIDAILSSSQRDSNSTRETSIAE

SEQ ID NO: 502 - protein, 226 aa, Arabidopsis thaliana
  Clone ID: AT_MUL3.C1.p10.tg
MEDIVDQELSNYWEPSSFLQNEDFEYDRSWPLEEAISGSYDSSSPDGAASSPASKNIVSERNRRQKLNQRLFALRSVVPNITKMDKASIIKDAISYIEGLQYEEKKLEAEIRELESTPKSSLSFSKDFDRDLLVPVTSKKMKQLDSGSSTSLIEVLELKVTFMGERTMVVSVTCNKRTDTMVKLCEVFESLNLKILTSNLTSFSGMIFHTVFIEVSIFLSLSLLSL

SEQ ID NO: 503 - protein, 361 aa, Arabidopsis thaliana
  Clone ID: AT_MYM9.C1.p2.tg
MDKETEQTLNYLPLGQSDPFGNGNEGTIGDFLGRYCNNPQEISPLTLQSFSLNSQISENFPISGGIRFPPYPGQFGSDREFGSQPTTQESNKSSLLDPDSVSDRVHTTKSNSRKRKSIPSGNGKESPASSSLTASNSKVSGENGGSKGGKRSKQDVAGSSKNGVEKCDSKGDNKDDAKPPEAPKDYIHVRARRGQATDSHSLAERARREKISERMTLLQDLVPGCNRITGKAVMLDEIINYVQSLQRQVEFLSMKLATVNPRMEFNANASLSTEMIQPGESLTQSLYAMACSEQRLPSAYYSLGKNMPRFSDTQFPSNDGFVHTETPGFWENNDLQSIVQMGFGDILQQQSNNNNNNCKKN

SEQ ID NO: 504 - protein, 294 aa, Arabidopsis thaliana
  Clone ID: AT_K19E1.C1.p1.tg
MQEIIPDFLEECEFVDTSLAGDDLFAILESLEGAGEISPTAASTPKDGTTSSKELVKDQDYENSSPKRKKQRLETRKEEDEEEEDGDGEAEEDNKQDGQQKMSHVTVERNRRKQMNEHLTVLRSLMPCFYVKRGDQASIIGGVVEYISELQQVLQSLEAKKQRKTYAEVLSPRVVPSPRPSPPVLSPRKPPLSPLSSNHESSVINELVANSKSALADVEVKFSGANVLLKTVSHKIPGQVMKIIAALEDLALEILQVNINTVDETMLNSFTIKIGIECQLSAEELAQQIQQTFC

SEQ ID NO: 505 - protein, 415 aa, Arabidopsis thaliana
  Clone ID: AT_C7A10.C1.p430.tg
MISQREEREEKKQRVMGDKKLISSSSSSSVYDTRINHHLHHPPSSSDEISQFLRHIFDRSSPLPSYYSPATTTTTASLIGVHGSGDPHADNSRSLVSHHPPSDSVLMSKRVGDFSEVLIGGGSGSAAACFGFSGGGNNNNVQGNSSGTRVSSSSVGASGNETDEYDCESEEGGEAVVDEAPSSKSGPSSRSSSKRCRAAEVHNLSEKRRRSRINEKMKALQSLIPNSNKTDKASMLDEAIEYLKQLQLQVQMLTMRNGINLHPLCLPGTTLHPLQLSQIRPPEATNDPLLNHTNQFASTSNAPEMINTVASSYALEPSIRSHFGPFPLLTSPVEMSREGGLTHPRLNIGHSNANITDHLRIVFESLILDGFGYVNYPDKLLEKFSILQDGFGIFKVDHVLLVSLVLKLIIYNTIF

SEQ ID NO: 506 - protein, 267 aa, Arabidopsis thaliana
  Clone ID: AT_mfb13.C1.p40.tg
MDRWFAVQEESHRVGHSVTASASGTNMSWASFESGRSLKTARTGDRDYFRSGSEMNKRQEEKQVDLMDDGDEQQRFTTSPKGINQRMRTLQKLLPTASKADKVSILDDVIEHLKQLQAQVQFMSLRANLPQQMMIPQLPPPQSVLSIQHQQQQQQQQQQQQQQQQQFQMSLLATMARMGMGGGGNGYGGLVPPPPPPPMMVPPMGNRDCTNGSSATLSDPYSAFFAQTMNMDLYNKMAAAIYRQQSDQTTKVNIGMPSSSSNHEKRD

SEQ ID NO: 507 - protein, 368 aa, Arabidopsis thaliana
  Clone ID: AT_T6L1.C1.p1.tg
MCAKKEEEEEEEEDSSEAMNNIQNYQNDLFFHQLISHHHHHHHDPSQSETLGASGNVGSGFTIFSQDSVSPIWSLPPPTSIQPPFDQFPPPSSSPASFYGSFFNRSRAHHQGLQFGYEGFGGATSAAHHHHEQLRILSEALGPVVQAGSGPFGLQAELGKMTAQEIMDAKALAASKSHSEAERRRRERINNHLAKLRSILPNTTKTDKASLLAEVIQHVKELKRETSVISETNLVPTESDELTVAFTEEEETGDGRFVIKASLCCEDRSDLLPDMIKTLKAMRLKTLKAEITTVGGRVKNVLFVTGEESSGEEVEEEYCIGTIEEALKAVMEKSNVEESSSSGNAKRQRMSSHNTITIVEQQQQYNQR

SEQ ID NO: 508 - protein, 223 aa, Arabidopsis thaliana
  Clone ID: AT_F4F7.C1.p18.tg
MARFEPYNYNNGHDPFFAHINQNPELINLDLPASTPSSFMLFSNGALVDANHNNSHFFPNLLHGNTRRKGNKEESGSKRRRKRSEEEEAMNGDETQKPKDVVHVRAKRGQATDSHSLAERVRREKINERLKCLQDLVPGCYKAMGMAVMLDVIIDYVRSLQNQIEFLSMKLSAASACYDLNSLDIEPTDIFQGGNIHSAAEMERILRESVGTQPPNFSSTLPF

SEQ ID NO: 509 - protein, 258 aa, Arabidopsis thaliana
  Clone ID: AT_T22C5.C1.p16.tg
MDVFVDGELESLLGMFNFDQCSSSKEERPRDELLGLSSLYNGHLHQHQHHNNVLSSDHHAFLLPDMFPFGAMPGGNLPAMLDSWDQSHHLQETSSLKRKLLDVENLCKTNSNCDVTRQELAKSKKKQRVSSESNTVDESNTNWVDGQSLSNSSDDEKASVTSVKGKTRATKGTATDPQSLYARKRREKINERLKTLQNLVPNGTKVDISTMLEEAVHYVKFLQLQIKLLSSDDLWMYAPLAYNGLDMGFHHNLLSRLM

SEQ ID NO: 510 - protein, 490 aa, Arabidopsis thaliana
  Clone ID: AT_T2G17.C1.p2.tg
MHHFVPDFDTDDDYVNNHNSSLNHLPRKSITTMGEDDDLMELLWQNGQVVVQNQRLHTKKPSSSPPKLLPSMDPQQQPSSDQNLFIQEDEMTSWLHYPLRDDDFCSDLLFSAAPTATATATVSQVTAARPPVSSTNESRPPVRNFMNFSRLRGDFNNGRGGESGPLLSKAVVRESTQVSPSATPSAAASESGLTRRTDGTDSSAVAGGGAYNRKGKAVAMTAPAIEITGTSSSVVSKSEIEPEKTNVDDRKRKEREATTTDETESRSEETKQARVSTTSTKRSRAAEVHNLSERKRRDRINERMKALQELIPRCNKSDKASMLDEAIEYMKSLQLQIQMMSMGCGMMPMMYPGMQQYMPHMAMGMGMNQPIPPPSFMPFPNMLAAQRPLPTQTHMAGSGPQYPVHASDPSRVFVPNQQYDPTSGQPQYPAGYTDPYQQFRGLHPTQPPQFQNQATSYPSSSRVSSSKESEDHGNHTTESSNIVSKFEQGE

SEQ ID NO: 511 - protein, 315 aa, Arabidopsis thaliana
  Clone ID: AT_F14J22.C1.p15.tg
MTNAQELGQEGFMWGISNSDDSGGGCKRIEKEPLPSHPSHPSPEIQTTTVKKGKKRTKRNDKNHEEESPDHEIHIWTERERRKKMRDMFSKLHALLPQLPPKADKSTIVDEAVSSIKSLEQTLQKLEMQKLEKLQYSSASTNTTPTTTFAYAPSSSSSPTALLTPISNHPIDATATDSYPRAAFLADQVSSSSAAAANLPYPCNDPIVNFDTWSSRNVVLTICGNEAFFNLCVPKHKPGVFTSVCYLFEKYNMEVLFANVSSNVFWSTYVIQAQVNPSCENQLLGNGLGVVDVFKQVSQELSQGLCREISLDFSL

SEQ ID NO: 512 - protein, 253 aa, Arabidopsis thaliana
  Clone ID: AT_T3K9.C1.p10.tg
MQPETSDQMLYSFLAGNEVGGGGYCVSGDYMTTMQSLCGSSSSTSSYYPLAISGIGETMAQDRALAALRNHKEAERRRRERINSHLNKLRNVLSCNSKTDKATLLAKVVQRVRELKQQTLETSDSDQTLLPSETDEISVLHFGDYSNDGHIIFKASLCCEDRSDLLPDLMEILKSLNMKTLRAEMVTIGGRTRSVLVVAADKEMHGVESVHFLQNALKSLLERSSKSLMERSSGGGGGERSKRRRALDHIIMV

SEQ ID NO: 513 - protein, 49 aa, Arabidopsis thaliana
  Clone ID: AT_MDJ14.C1.p1.tg
MAERRRRKKLNDRLYMLRSVVPKISKMDRASILGDAIDYLKELLQRIND

SEQ ID NO: 514 - protein, 524 aa, Arabidopsis thaliana
  Clone ID: AT_F14J9.C1.p19.tg
MPLFELFRLTKAKLESAQDRNPSPPVDEVVELVWENGQISTQSQSSRSRNIPPPQANSSRAREIGNGSKTTMVDEIPMSVPSLMTGLSQDDDFVPWLNHHPSLDGYCSDFLRDVSSPVTVNEQESDMAVNQTAFPLFQRRKDGNESAPAASSSQYNGFQSHSLYGSDRARDLPSQQTNPDRFTQTQEPLITSNKPSLVNFSHFLRPATFAKTTNNNLHDTKEKSPQSPPNVFQTRVLGAKDSEDKVLNESVASATPKDNQKACLISEDSCRKDQESEKAVVCSSVGSGNSLDGPSESPSLSLKRKHSNIQDIDCHSEDVEEESGDGRKEAGPSRTGLGSKRSRSAEVHNLSERRRRDRINEKMRALQELIPNCNKVDKASMLDEAIEYLKSLQLQVQIMSMASGYYLPPAVMFPPGMGHYPAAAAAMAMGMGMPYAMGLPDLSRGGSSVNHGPQFQVSGMQQQPVAMGIPRVSGGGIFAGSSTIGNGSTRDLSGSKDQTTTNNNSNLKPIKRKQGSSDQFCGSS

SEQ ID NO: 515 - protein, 336 aa, Arabidopsis thaliana
  Clone ID: AT_T30D6.C1.p19.tg
MSVLERLKWVQQQQQQLQQVVSHSSNNSPELLQILQFHGSNNDELLESSFSQFQMLGSGFGPNYNMGFGPPHESISRTSSCHMEPVDTMEVLLKTGEETRAVALKNKRKPEVKTREEQKTEKKIKVEAETESSMKGKSNMGNTEASSDTSKETSKGASENQKLDYIHVRARRGQATDRHSLAERARREKISKKMKYLQDIVPGCNKVTGKAGMLDEIINYVQCLQRQVERISLILKEPYFAVPVDETCCLEPGTRACRGRCIRKTDQQGSLDLSAINPNQTTSIEAVSTALYETEKLVRVFVPCHHLEAGKLNHRVSTTHLASVFITKQDSLKQHG

SEQ ID NO: 516 - protein, 224 aa, Arabidopsis thaliana
  Clone ID: AT_F17I14.C1.p60.tg
MNNYNMNPSLFQNYTWNNIINSSNNNNKNDDHHHQHNNDPIGMAMDQYTQLHIFNPFSSSHFPPLSSSLTTTTLLSGDQEDDEDEEEPLEELGAMKEMMYKIAAMQSVDIDPATVKKPKRRNVRISDDPQSVAARHRRERISERIRILQRLVPGGTKMDTASMLDEAIRYVKFLKRQIRLLNNNTGYTPPPPQDQASQAVTTSWVSPPPPPSFGRGGRGVGELI

SEQ ID NO: 517 - protein, 399 aa, Arabidopsis thaliana
  Clone ID: AT_F16D14.C1.p5.tg
MYEESSCFDPNSMVDNNGGFCAAETTFTVSHQFQPPLGSTTNSFDDDLKLPTMDEFSVFPSVISLPNSETQNQNISNNNHLINQMIQESNWGVSEDNSNFFMNTSHPNTTTTPIPDLLSLLHLPRCSMSLPSSDIMAGSCFTYDPLFHLNLPPQPPLIPSNDYSGYLLGIDTNTTTQRDESNVGDENNNAQFDSGIIEFSKEIRRKGRGKRKNKPFTTERERRCHLNERYEALKLLIPSPSKGDRASILQDGIDYINELRRRVSELKYLVERKRCGGRHKNNEVDDNNNNKNLDDHGNEDDDDDDENMEKKPESDVIDQCSSNNSLRCSWLQRKSKVTEVDVRIVDDEVTIKVVQKKKINCLLLVSKVLDQLQLDLHHVAGGQIGEHYSFLFNTKVSDQ

SEQ ID NO: 518 - protein, 413 aa, Arabidopsis thaliana
  Clone ID: AT_F16A16.C1.p100.tg
MTWKPKMLILSHDLISPEKYIMGEDDIVELLGKSSQVVTSSQTQTPSCDPPLILRGSGSGDGEGNGPLPQPPPPLYHQQSLFIQEDEMASWLHQPNRQDYLYSQLLYSGVASTHPQSLASLEPPPPPRAQYILAADRPTGHILAERRAENFMNISRQRGNIFLGGVEAVPSNSTLLSSATESIPATHGTESRATVTGGVSRTFAVPGLGPRGKAVAIETAGTQSWGLCKAETEPVQRQPATETDITDERKRKTREETNVENQGTEEARDSTSSKRSRAAIMHKLSERRRRQKINEMMKALQELLPRCTKTDRSSMLDDVIEYVKSLQSQIQMFSMGHVMIPPMMYAGNIQQQYMPHMAMGMNRPPAFIPFPRQAHMAEGVGPVDLFRENEETEQETMSLLLREDKRTKQKMFS

SEQ ID NO: 519 - protein, 297 aa, Arabidopsis thaliana
  Clone ID: AT_F10O3.C1.p13.tg
MANNNNIPHDSISDPSPTDDFFEQILGLSNFSGSSGSGLSGIGGVGPPPMMLQLGSGNEGNHNHMGAIGGGGPVGFHNQMFPLGLSLDQGKGHGFLKPDETGKRFQDDVLDNRCSSMKPPMSQPAPPMPHQQSTIRPRVRARRGQATDPHSIAERLRRERIAERIRSLQELVPTVNKTDRAAMIDEIVDYVKFLRLQVKVLSMSRLGGAGAVAPLVTEMPLSSSVEDETQAVWEKWSNDGTERQVAKLMEENVGAAMQLLQSKALCIMPISLAMAIYHSQPPDTSSSIVKPEMNPPP

SEQ ID NO: 520 - protein, 234 aa, Arabidopsis thaliana
  Clone ID: AT_K5F14.C1.p2.tg
MVSPENANWICDLIDADYGSFTIQGPGFSWPVQQPIGVSSNSSAGVDGSAGNSEASKEPGSKKRGRCESSSATSSKACREKQRRDRLNDKFMELGAILEPGNPPKTDKAAILVDAVRMVTQLRGEAQKLKDSNSSLQDKIKELKTEKNELRDEKQRLKTEKEKLEQQLKAMNAPQPSFFPAPPMMPTAFASAQGQAPGNKMVPIISYPGVAMWQFMPPASVDTSQDHVLRPPVA

SEQ ID NO: 521 - protein, 320 aa, Arabidopsis thaliana
  Clone ID: AT_T9N14.C1.p4.tg
MALEAVVYPQDPFSYISCKDFPFYDLYFQEEEDQDPQDTKNNIKLGQGQGHGFASNNYNGRTGDYSDDYNYNEEDLQWPRDLPYGSAVDTESQPPPSDVAAGGGRRKRRRTRSSKNKEEIENQRMTHIAVERNRRKQMNEYLAVLRSLMPPYYAQRGDQASIVGGAINYLKELEHHLQSMEPPVKTATEDTGAGHDQTKTTSASSSGPFSDFFAFPQYSNRPTSAAAAEGMAEIEVTMVESHASLKILAKKRPRQLLKLVSSIQSLRLTLLHLNVTTRDDSVLYSISVKVEEGSQLNTVEDIAAAVNQILRRIEEESSFS

SEQ ID NO: 522 - protein, 912 aa, Arabidopsis thaliana
  Clone ID: AT_T10O8.C1.p20.tg
MDDFNLRSENPNSSSTTSSSSSSFHRHKSETGNTKRSRSTSTLSTDPQSVAARDRRHRISDRFKILQSMVPGGAKMDTVSMLDEAISYVKFLKAQIWYHQNMLLFINDHETTSSCTYSPGAGEFGPKLFGYDDDYAPIMDTYSQGVPLTVADSKYTPWFGSVDDEQEHVTYFKYRRATRHALRGHCNCIIGETEEFADQREKMEVQIEESGKNQTSPESIEADKAKQIVVLLIGPPGSGKSTFCDTAMRSSHRPWSRICQDIVNNGKAGTKAQCLKMATDSLREGKSVFIDRCNLDREQRSEFIKLGGPEFEVHAVVLELPAQVCISRSVKRTGHEGNLQGGRAAAVVNKMLQSKELPKVNEGFSRIMFCYSDADVDNAVNMYNKLGPMDTLPSGCFGEKKLDTKSQPGIMKFFKKVSALPASSSNEATNTTRKADEMTANVRVSPVKLGSADIVPTLAFPSISTADFQFDLEKASDIIVEKAEEFLSKLGTARLVLVDLSRGSKILSLVKAKASQKNIDSAKFFTFVGDITKLRSEGGLHCNVIANATNWRLKPGGGGVNAAIFKAAGPDLETATRVRANTLLPGKAVVVPLPSTCPLHNAEGITHVIHVLGPNMNPNRPDNLNNDYTKGCKTLREAYTSLFEGFLSVVQDQSKLPKRSSQTAVSDSGEDIKEDSERNKKYKGSQDKAVTNNLESESLEDTRGSGKKMSKGWNTWALALHSIAMHPERHENVVLEYLDNIVVINDQYPKARKHVLVLARQESLDGLEDVRKENLQLLQEMHNVGLKWVDRFQNEDASLIFRLGYHSVPSMRQLHLHVISQDFNSDSLKNKKHWNSFTTSFFRDSVDVLEEVNSQGKANVASEDLLKGELRCNRCRSAHPNIPKLKSHVRSCHSQFPDHLLQNNRLVARAET

SEQ ID NO: 523 - protein, 311 aa, Arabidopsis thaliana
  Clone ID: AT_T6L1.C1.p19.tg
MRTGKGNQEEEDYGEEDFNSKREGPSSNTTVHSNRDSKENDKASAIRSKHSVTEQRRRSKINERFQILRELIPNSEQKRDTASFLLEVIDYVQYLQEKVQKYEGSYPGWSQEPTKLTPWRNNHWRVQSLGNHPVAINNGSGPGIPFPGKFEDNTVTSTPAIIAEPQIPIESDKARAITGISIESQPELDDKGLPPLQPILPMVQGEQANECPATSDGLGQSNDLVIEGGTISISSAYSHELLSSLTQALQNAGIDLSQAKLSVQIDLGKRANQGLTHEEPSSKNPLSYDTQGRDSSVEEESEHSHKRMKTL

SEQ ID NO: 524 - protein, 231 aa, Arabidopsis thaliana
  Clone ID: AT_F11C1.C1.p170.tg
MDNSDILMNMMMQQMEKLPEHFSNSNPNPNPHNIMMLSESNTHPFFFNPTHSHLPFDQTMPHHQPGLNFRYAPSPSSSLPEKRGGCSDNANMAAMREMIFRIAVMQPIHIDPESVKPPKRKNVRISKDPQSVAARHRRERISERIRILQRLVPGGTKMDTASMLDEAIHYVKFLKKQVQSLEEHAVVNGGGMTAVAGGALAGTVGGGYGGKGCGIMRSDHHQMLGNAQILR

SEQ ID NO: 525 - protein, 241 aa, Arabidopsis thaliana
  Clone ID: AT_K21H1.C1.p2.tg
MDSDIMNMMMHQMEKLPEFCNPNSSFFSPDHNNTYPFLFNSTHYQSDHSMTNEPGFRYGSGLLTNPSSISPNTAYSSVFLDKRNNSNNNNNGTNMAAMREMIFRIAVMQPIHIDPEAVKPPKRRNVRISKDPQSVAARHRRERISERIRILQRLVPGGTKMDTASMLDEAIHYVKFLKKQVQSLEEQAVVTGGGGGGGGRVLIGGGGMTAASGGGGGGGVVMKGCGTVGTHQMVGNAQILR

SEQ ID NO: 526 - protein, 254 aa, Arabidopsis thaliana
  Clone ID: AT_T7M7.C1.p8.tg
MENSYDSSKWSDSTTPYMVSWSLQSESSDSDWNRFNLGFSSSSFGGNFPADDCVGGIEKAESLSRSHRLAEKRRRDRINSHLTALRKLVPNSDKLDKAALLATVIEQVKELKQKAAESPIFQDLPTEADEVTVQPETISDFESNTNTIIFKASFCCEDQPEAISEIIRVLTKLQLETIQAEIISVGGRMRINFILKDSNCNETTNIAASAKALKQSLCSALNRITSSSTTTSSVCRIRSKRQRWFLSSHYSHNE

SEQ ID NO: 527 - protein, 296 aa, Arabidopsis thaliana
  Clone ID: AT_MNA5.C1.p5.tg
MMFQQDYPHGFSLVETSLSYEMLDYFQNIVVSNSEDVASQQNSISSSSYSSATLSCSITEQKSHLTEKLSPLRERYGCGDFLSRKRRRRSEKTIVDKENQRMNHIAVERNRRKQMNHFLSILKSMMPLSYSQPNDQASIIEGTISYLKKLEQRLQSLEAQLKATKLNQSPNIFSDFFMFPQYSTATATATATASSSSSSHHHHKRLEVVADVEVTMVERHANIKVLTKTQPRLLFKIINEFNSLGLSTLHLNLTTSKDMSLFTFSVKVEADCQLTPSGNEVANTVHEVVRRVHKER

SEQ ID NO: 528 - protein, 353 aa, Arabidopsis thaliana
  Clone ID: AT_K15E6.C1.p40.tg
MNSHDIDDQLEADVYSNLPSRNDSSTGRRNRNSCRSKHSETEQRRRSKINERFQSLMDIIPQNQNDQKRDKASFLLEVIEYIHFLQEKVHMYEDSHQMWYQSPTKLIPWRNSHGSVAEENDHPQIVKSFSSNDKVAASSGFLLDTYNSVNPDIDSAVSTKIPEHSPVSAVSSYLRTEPSLQFVQHDFWQPKTSCGTINCFTNELLTSDEKTSASLSTVCSQRENDIIQGSNDASAICGDFLFALAMKFCRIEYEINAVNLSFKLKILSASVFGTDSGVLNTLTEALKSSGVNMSETMISVQLSLRKREDREYSVAAFASEDNGNSIADEEGDSPTETRSFCNDIDHSQKRIRR

SEQ ID NO: 529 - protein, 442 aa, Arabidopsis thaliana
  Clone ID: AT_F17J16.C1.p110.tg
MEQVFADWNFEDNFHMSTNKRSIRPEDELVELLWRDGQVVLQSQARREPSVQVQTHKQETLRKPNNIFLDNQETVQKPNYAALDDQETVSWIQYPPDDVIDPFESEFSSHFFSSIDHLGGPEKPRTIEETVKHEAQAMAPPKFRSSVITVGPSHCGSNQSTNIHQATTLPVSMSDRSKNVEERLDTSSGGSSGCSYGRNNKETVSGTSVTIDRKRKHVMDADQESVSQSDIGLTSTDDQTMGNKSSQRSGSTRRSRAAEVHNLSERRRRDRINERMKALQELIPHCSRTDKASILDEAIDYLKSLQMQLQVMWMGSGMAAAAAAAASPMMFPGVQSSPYINQMAMQSQMQLSQFPVMNRSAPQNHPGLVCQNPVQLQLQAQNQILSEQLARYMGGIPQMPPAGNQTVQQQPADMLGFGSPAGPQSQLSAPATTDSLHMGKIG

SEQ ID NO: 530 - protein, 174 aa, Arabidopsis thaliana
  Clone ID: AT_MIO24.C1.p9.tg
MEKMMHRETERQRRQEMASLYASLRSLLPLHFIKGKRSTSDQVNEAVNYIKYLQRKIKELSVRRDDLMVLSRGSLLGSSNGDFKEDVEMISGKNHVVVRQCLVGVEIMLSSRCCGGQPRFSSVLQVLSEYGLCLLNSISSIVDDRLVYTIQAEVNDMALMIDLAELEKRLIRMK

SEQ ID NO: 531 - protein, 498 aa, Arabidopsis thaliana
  Clone ID: AT_K15N18.C1.p2.tg
MDNELFMNTEFPPPPEMATHFEHQQSSSSAMMLNWALMDPNPHQDSSFLWEKSTEQQQQQSIFDSALSSLVSSPTPSNSNFSGGGGDGFLIRELIGKLGNIGNNNNNSGEIYGTPMSRSASCYATPMSSPPPPTNSNSQMMMNRTTPLTEFSADPGFAERAARFSCFGSRSFNGRTNTNLPINNGNNMVNNSGKLTRVSSTPALKALVSPEVTPGGEFSRKRKSVPKGKSKENPISTASPSPSFSKTAEKNGGKGGSKSSEEKGGKRRREEEDDEEEEGEGEGNKSNNTKPPEPPKDYIHVRARRGQATDSHSLAERVRREKIGERMKLLQDLVPGCNKVTGKALMLDEIINYVQSLQRQVEFLSMKLSSVNDTRLDFNVDALVSKDVMIPSSNNRLHEEGLQSKSSSHHHQQQLNIYNNNSQLLPNISSNNMMLQSPMNSLETSTLARSFTHLPTLTQFTDSISQYQMFSEEDLQSIVGMGVAENPNNESQHMKIEL

SEQ ID NO: 532 - protein, 466 aa, Arabidopsis thaliana
  Clone ID: AT_MHM17.C1.p7.tg
MMHLILSCSYLISMDGYYNEASEEPSSSSSSGSLARSLFHEYRQSVIPLQNGHVPSMAFMNNLPYVEIRPQESQRLAFNDTQRLFYQMKIEASLREWFPEDFNRKSSPANSDYLRPPHYPSSSSSSLSPNNISEYSSLLFPLIPKPSTTTEAVNVPVLPPLAPINMIHPQHQEPLFRNRQREEEAMTQAILAVLTGPSSPPSTSSSPQRKGRATAFKRYYSMISDRGRAPLPSVRKQSMMTRAMSFYNRLNINQRERFTRENATTHGEGSGGSGGGGRYTSGPSATQLQHMISERKRREKLNESFQALRSLLPPGTKKDKASVLSIAREQLSSLQGEISKLLERNREVEAKLAGEREIENDLRPEERFNVRIRHIPESTSRERTLDLRVVLRGDIIRVDDLMIRLLEFLKQINNVSLVSIEARTLARAEGDTSIVLVISLRLKIEGEWDESAFQEAVRRVVADLAH

SEQ ID NO: 533 - protein, 324 aa, Arabidopsis thaliana
  Clone ID: AT_T4L20.C1.p110.tg
MNGAIGGDLLLNFPDMSVLERQRAHLKYLNPTFDSPLAGFFADSSMITGGEMDSYLSTAGLNLPMMYGETTVEGDSRLSISPETTLGTGNFKKRKFDTETKDCNEKKKKMTMNRDDLVEEGEEEKSKITEQNNGSTKSIKKMKHKAKKEENNFSNDSSKVTKELEKTDYIHVRARRGQATDSHSIAERVRREKISERMKFLQDLVPGCDKITGKAGMLDEIINYVQSLQRQIEFLSMKLAIVNPRPDFDMDDIFAKEVASTPMTVVPSPEMVLSGYSHEMVHSGYSSEMVNSGYLHVNPMQQVNTSSDPLSCFNVSHIFNTLSL

SEQ ID NO: 534 - protein, 290 aa, Arabidopsis thaliana
  Clone ID: AT_MZA15.C1.p10.tg
MTLEALSSNGLLNFLLSETLSPTPFKSLVDLEPLPENDVIISKNTISEISNQEPPPQRQPPATNRGKKRRRRKPRVCKNEEEAENQRMTHIAVERNRRRQMNQHLSVLRSLMPQPFAHKGDQASIVGGAIDFIKELEHKLLSLEAQKHHNAKLNQSVTSSTSQDSNGEQENPHQPSSLSLSQFFLHSYDPSQENRNGSTSSVKTPMEDLEVTLIETHANIRILSRRRGFRWSTLATTKPPQLSKLVASLQSLSLSILHLSVTTLDNYAIYSISAKVIKLKPYHLNRTKPD

SEQ ID NO: 535 - protein, 314 aa, Arabidopsis thaliana
  Clone ID: AT_T28I19.C1.p130.tg
MNSIVGEVQEAQYIFPHSFTTNNDPSYDDLIEMKPPKILETTYISPSSHLPPNSKPHHIHRHSSSRILSFEDYGSNDMEHEYSPTYLNSIFSPKLEAQVQPHQKSDEFNRKGTKRAQPFSRNQSNAQDHIIAERKRREKLTQRFVALSALVPGLKKMDKASVLGDALKHIKYLQERVGELEEQKKERRLESMVLVKKSKLILDDNNQSFSSSCEDGFSDLDLPEIEVRFSDEDVLIKILCEKQKGHLAKIMAEIEKLHILITNSSVLNFGPTLDITIIAKVCKCIFRHTLIHINEELVLNFRVTSLDVYFSEGE

SEQ ID NO: 536 - protein, 1496 aa, Arabidopsis thaliana
  Clone ID: AT_F20D10.C1.p190.tg
MEKVYEELDEVKAVNEKLRIDYRNKTELLENLKKVQNEQLIEIREARLVNEKHGFEIEEKSREIAELKRANEELQRCLREKDSVVKRVNDVNDKLRANGEDKYREFEEEKRNMMSGLDEASEKNIDLEQKNNVYRAEIEGLKGLLAVAETKRIEAEKTVKGMKEMRGRDDVVVKMEEEKSQVEEKLKWKKEQFKHLEEAYEKLKNLFKDSKKEWEEEKSKLLDEIYSLQTKLDSVTRISEDLQKKLQMCNGALTQEETRRKHLEIQVSEFKAKYEDAFAECQDARTQLDDLAGKRDWEVAELRQTLSMKDAYFKEMKYENGKLEQENRELLGSLKELQEATIQGSGNSALSKLKNKFRNLENIHKNCSANLRSKEAEWSSQVEKMVEEINDYKLQLQSKEAALKEVELELENCRSSTAKMRLQYEEISIMFLVLSRTVSEAQSRLANAKDKQIKDEKREGNCYSLLMEQLDQKNAALAKAQMEIKEERESVACLLKRIEMLDLFENQNIQMQKEVERFKEMVEESSRFQTQMQEKMKEAENDYEEKLLQVCDALDNTNIDLVAEREKVVSLTRQIESLGTVKEKNLVMEKETQEYKEMLEESEKCRVLLEEQISQLESDSNENIRELCSKVDIAYAKLAEEVEKTASLVRKSESIDLNEEHRQRELDHYKEMLEESTKTQLLLQEKVVDVENDSKRKLADVSEALEIANSELSDKTSEVFQIEFQLWVWKSIAKRLKAELEQNQNLRKRVEASLLEQVGVGEAIKQEKNELVHKLKVISHARSSDSEKKESLMRDKDEMLESLQREVELLEQDSLRRELEDVVLAHMIGERELQNEREICALQQKDQDLCEVKHELEGSLKSVSLLLQQKQNEVNMLRKTWEKLTARQILTAVETESKKMMIIELEGEISSLSQKLETSNESVSCFRQEATKSRAELETKQTELKEVTTQMQEKLRTSEAEKTELVKEVASLSTEKRNLLSFISEMEDGMLKLYDGDTKLMKTLERVTQCCDGFGKENNNGETIGSPRLAMKHEEDVVTEDREGASQNRTAPDLKPIETCRKLLKSREFLSVRYIIQVNQLLKSKRHDDDDQFEQVEAICDLLIAAENRLPNGLKDYYGMIRANRFGPVLLEDFEKLTKLLDKKHNYFPFSQEAADKASLAWSLLSKPPIKAHYDLAISAFFGECSKVKRKIFIPKKQIEVVVISDDDDEEEFSCLKISLNRYYYYDYLLFVFIYIYIHNKFNIPSNVLLSPSLCVTMVLLHHLEQGMRPISRCYNPTAYSTTMGRSFFAGAATSSKLFSRGFSVTKPKSKTESKEVAAKKHSDAERRRRLRINSQFATLRTILPNLVKRSNTFCIMFNETKQQDKASVLGETVRYFNELKKMVQDIPTTPSLEDNLRLDHCNNNRDLARVVFSCSDREGLMSEVAESMKAVKAKAVRAEIMTVGGRTKCALFVQGVNGNEGLVKLKKSLKLVVNGKSSSEAKNNNNGGSLLIQQQ

SEQ ID NO: 537 - protein, 486 aa, Arabidopsis thaliana
  Clone ID: AT_T6L1.C1.p10.tg
MDLSAKDEFSAEKRNPDNYDSVNNPSGDWRVDSYPSENLISAGPASCSPSQMMDSFGQTLWYDPTSVQAVGYAGFNGGNASSSSFRGSIDRSLEMGWNLPNLLPPKGNGLFLPNASSFLPPSMAQFPADSGFIERAARFSLFSGGNFSDMVNQPLGNSEAIGLFLQGGGTMQGQCQSNELNVGEPHNDVSVAVKESTVRSSEQAKPNVPGSGNVSEDTQSSGGNGQKGRETSSNTKKRKRNGQKNSEAAQSHRSQQSEEEPDNNGDEKRNDEQSPNSPGKKSNSGKQQGKQSSDPPKDGYIHVRARRGQATNSHSLAERVRREKISERMKFLQDLVPGCNKVTGKAVMLDEIINYVQSLQRQVEFLSMKLATVNPQMDFNLEGLLAKDALQLRAGSSSTTPFPPNMSMAYPPLPHGFMQQTLSSIGRTITSPLSPMNGGFKRQETNGWEGDLQNVIHINYGAGDVTPDPQAAATASLPAANMKVEP

SEQ ID NO: 538 - protein, 297 aa, Arabidopsis thaliana
  Clone ID: AT_f2c19.C1.p10.tg
MENGNGEGKGEFINQNNDFFLDSMSMLSSLPPCWDPSLPPPPPPPQSLFHALAVDAPFPDQFHHPQESGGPTMGSQEGLQPQGTVSTTSAPVVRQKPRVRARRGQATDPHSIAERLRRERIAERMKSLQELVPNTNKTDKASMLDEIIEYVRFLQLQVKVLSMSRLGGAGSVGPRLNGLSAEAGGRLNALTAPCNGLNGNGNATGSSNESLRSTEQRVAKLMEEDMGSAMQYLQGKGLCLMPISLATAISSSTTHSRGSLFNPISSAVAAEDSNVTATAVAAPEASSTMDDVSASKA

SEQ ID NO: 539 - protein, 242 aa, Arabidopsis thaliana
  Clone ID: AT_F13H10.C1.p21.tg
MCALVPPLYPNFGWPCGDHSFYETDDVSNTFLDFPLPDLTVTHENVSSENNRTLLDNPVVMKKLNHNASERERRKKINTMFSSLRSCLPPTNQTKKLSVSATVSQALKYIPELQEQVKKLMKKKEELSFQISGQRDLVYTDQNSKSEEGVTSYASTVSSTRLSETEVMVQISSLQTEKCSFGNVLSGVEEDGLVLVGASSSRSHGERLFYSMHLQIKNGQVNSEELGDRLLYLYEKCGHSFT

SEQ ID NO: 540 - protein, 373 aa, Arabidopsis thaliana
  Clone ID: AT_MHC9.C1.p1.tg
MEGLESVYAQAMYGMTRESKIMEHQGSDLIWGGNELMARELCSSSSYHHQLINPNLSSCFMSDLGVLGEIQQQQHVGNRASSIDPSSLDCLLSATSNSNNTSTEDDEGISVLFSDCQTLWSFGGVSSAESENREITTETTTTIKPKPLKRNRGGDGGTTETTTTTTKPKSLKRNRGDETGSHFSLVHPQDDSEKGGFKLIYDENQSKSKKPRTEKERGGSSNISFQHSTCLSDNVEPDAEAIAQMKEMIYRAAAFRPVNFGLEIVEKPKRKNVKISTDPQTVAARQRRERISEKIRVLQTLVPGGTKMDTASMLDEAANYLKFLRAQVKALENLRPKLDQTNLSFSSAPTSFPLFHPSFLPLQNPNQIHHPEC

SEQ ID NO: 541 - protein, 339 aa, Arabidopsis thaliana
  Clone ID: AT_T22N4.C1.p4.tg
MSSAIVVSQDAESLGLQIYSRKEKSLGVLVSNFLRLYNRDDVDLIGLDDAAGQLGVERRRIYDVVNILESIGIVARRGKNQYSWKGFGEIPRSLDELKEEGMRERLGYSSSNNSDKVSNGCEREEPLTLTPDDQENSSSSKMDQKKEKSLWLLAQNFVKMFLCSDDDLITLDSAAKALLSDSPDSVHMRTKVRRLYDIANVFASMNLIEKTHIPVTRKPAYRWLGSKSIAERGLSLFNSGEPKRVFGTEITNLRAKRNKTYCSSIRKQIGYKKHDEENTEQESKPAASKYVFGPFSPIGASKTNNDKVGKGRLLEIEALASTYQPQYCNQGNNHTLIVS

SEQ ID NO: 542 - protein, 323 aa, Arabidopsis thaliana
  Clone ID: AT_T24C20.C1.p40.tg
MVGLDDAASKLGVERRRIYDIVNVLESVGVLTRRAKNQYTWKGFSAIPGALKELQEEGVKDTFHRFYVNENVKGSDDEDDDEESSQPHSSSQTDSSKPGSLPQSSDPSKIDNRREKSLGLLTQNFIKLFICSEAIRIISLDDAAKLLLGDAHNTSIMRTKVRRLYDIANVLSSMNLIEKTHTLDSRKPAFKWLGYNGEPTFTLSSDLLQLESRKRAFGTDITNVNVKRSKSSSSSQENATERRLKMKKHSTPESSYNKSFDVHESRHGSRGGYHFGPFAPGTGTYPTAGLEDNSRRAFDVENLDSDYRPSYQNQGAYILFTSI

SEQ ID NO: 543 - protein, 426 aa, Arabidopsis thaliana
  Clone ID: AT_T2E6.C1.p2.tg
MAATSNSGEDPTLSYHHRSPFRFELLQSISSSDPRYSSLTPSSTNRPFSVSQSLPNSQLSPLISPHWDDSYSQITQKVQKSRKNHRIQLGSIANMSGGESIDIAKVIVKQESSPQNVKRVYNKSKGGTKLLKAGKRMANGEVQNGGLNGASINCRYDSSLGLLTKKFVKLIQEAEDGTLDLNYCAVVLEVQKRRIYDITNVLEGIGLIEKTTKNHIRWKGADNLGQKDLGDQISRLKSEVESMQSEESRLDDLIRERQEALRSLEEDDYCRRYMFMTEEDITSLPRFQNQTLLAIKAPTASYIEVPDPDEMSFPQQYRMVIRSRMGPIDVYLLRYLVTHSTLCVWSYLYICQSVLITGNKHDRSKYKGDSAETSDKLGNESDQKAPVGVDTPSLKIVTSDTDLKADYWFESDAEVSLTDLWSNFNS

SEQ ID NO: 544 - protein, 221 aa, Arabidopsis thaliana
  Clone ID: AT_K18I23.C1.p13.tg
MSRVLSVKRTLAENPLSLKCAIDTNRKNRRCALMAIRPRTRKRVQAVRRAADGSAFKKCEECGVMIAIALYDMHECGEKRREVKRFKYIASGNIDNISKPIGSFEDEPRSPFVFFLEEFRENYNGDLVDASRICFNVWKNMSAEDQKPFNARAMEVDSAHSRKLNEEAKTIYKADEEADSKTVGRYDKFYESYVQIEEEEDYDSSDHFGHEFWEDDTMLDY

SEQ ID NO: 545 - protein, 502 aa, Arabidopsis thaliana
  Clone ID: AT_F2D10.C1.p15.tg
METKYRFEISDGDSWRLSKTTLTTSSKSGLKKRMKPVYVDGNLHWLRNDWSIIAFNPETEQARLIPCSFHPTPDTKVLFAANDETNLLTLISGTKKAISVYTLLGYHKWTLASQFKNVSMEESDLECWNVVAYDGKCLVVREKMIRSSDIELHVYDMEADSWGVFETAKCWSQDFYKFKPSFFSIEDDEQTKVLVPSDDQRLSYLTTIMEMIQPESIMKGAKSKTETRSSKLSVTKKPAKGAGRGKAAAKDPNKPKRPASAFFVFMEDFRETFKKENPKNKSVATVGKAAGDKWKSLSDSEKAPYVAKAEKRKVEYEKNIKAYNKKLEEGPKEDEESDKSVSEVNDEDDAEDGSEEVSESIMKGAKSKAETRSTKLSVTKKPAKGAKGAAKDPNKPKRPSSAFFVFMEDFRVTYKEEHPKNKSVAAVGKAGGEKWKSLSDSEKAPYVAKADKRKVEYEKNMKAYNKKLEEGPKEDEESDKSVSEVNDEDDAEDGSEEEEDDD

SEQ ID NO: 546 - protein, 446 aa, Arabidopsis thaliana
  Clone ID: AT_T22B4.C1.p60.tg
MSTVSSDPAHAKKSRNSRKALKQKNEIVESSPVSDKGKETKSFEKDLMEMQAMLEKMKIEKEKTEDLLKEKDEILRKKEVEQEKLKTELKKLQKMKEFKPNMTFAFSQSLAQTEEEKKGKKKKKDCAETKRPSTPYILWCKDNWNEVKKQNPEADFKETSNILGAKWKGISAEEKKPYEEKYQADKEAYLQVITKEKREREAMKLLDDEQKQKTAMELLDQYLHFVQEAEHDNKKKAKKIKDPLKPKQPISAYLIYANERRAALKGENKSVIEVAKMAGEEWKNLSEEKKAPYDQMAKKNKEIYLQEMEGYKRTKEEEAMSQKKEEEEFMKLHKQEALQLLKKKEKTDNIIKKTKETAKNKKKNENVDPNKPKKPTSSYFLFCKDARKSVLEEHPGINNSTVTAHISLKWMELGEEEKQVYNSKAAELMEAYKKEVEEYNKTKTSS

SEQ ID NO: 547 - protein, 456 aa, Arabidopsis thaliana
  Clone ID: AT_F9D16.C1.p270.tg
MATNADPAPTKKPRNSRKALKQKNELVETPPSPVSVKGKSAKSFEQDLMEMQTMLEKMKIEKDKTEELLKEKDEILRKKEEELETRDAEQEKLKVELKKLQKMKEFKPNMTFACGQSSLTQAEQEKANKKKKKDCPETKRPSSSYVLWCKDQWTEVKKENPEADFKETSNILGAKWKSLSAEDKKPYEERYQVEKEAYLQVIAKEKREKEAMKLLEDDQKQRTAMELLDQYLNFVQEAEQDNKKKNKKEKDPLKPKHPVSAFLVYANERRAALREENKSVVEVAKITGEEWKNLSDKKKAPYEKVAKKNKETYLQAMEEYKRTKEEEALSQKKEEEELLKLHKQEALQMLKKKEKTDNLIKKEKATKKKKNENVDPNKPKKPASSYFLFSKDERKKLTEERPGTNNATVTALISLKWKELSEEEKQVYNGKAAKLMEAYKKEVEAYNKKSAATTSS

SEQ ID NO: 548 - protein, 646 aa, Arabidopsis thaliana
  Clone ID: AT_T19N8.C1.p2.tg
MADGHSFNNISLSGRGGKNPGLLKINSGGIQWKKQGGGKAVEVDRSDIVSVSWTKVTKSNQLGVKTKDGLYYKFVGFRDQDVPSLSSFFQSSYGKTPDEKQLSVSGRNWGEVDLHGNTLTFLVGSKQAFEVSLADVSQTQLQGKNDVTLEFHVDDTAGANEKDSLMEISFHIPNSNTQFVGDENRPPSQVFNDTIVAMADVSPGVEDAVVTFESIAILTPRGRYNVELHLSFLRLQGQANDFKIQYSSVVRLFLLPKSNQPHTFVVISLDPPIRKGQTMYPHIVMQFETDTVVESELSISDELMNTKFKDKLERSYKGLIHEVFTTVLRWLSGAKITKPGKFRSSQDGFAVKSSLKAEDGVLYPLEKGFFFLPKPPTLILHDEIDYVEFERHAAGGANMHYFDLLIRLKTDHEHLFRNIQRNEYHNLYTFISSKGLKIMNLGGAGTADGVAAVLGDNDDDDAVDPHLTRIRNQAADESDEEDEDFVMGEDDDGGSPTDDSGGDDSDASEGGVGEIKEKSIKKEPKKEASSSKGLPPKRKTVAADEGSSKRKKPKKKKDPNAPKRAMSGFMFFSQMERDNIKKEHPGIAFGEVGKVLGDKWRQMSADDKEPYEAKAQVDKQRYKDEISDYKNPQPMNVDSGNDSDSN

SEQ ID NO: 549 - protein, 226 aa, Arabidopsis thaliana
  Clone ID: AT_K19M13.C1.p4.tg
MAGPSTTSNAPKQRKRVEAETSSNTSTTLRRAKDGSAFALCLCVFGCCCCCCSEAQVVETQAEAKKKPAEKKKTTSDGPKPKRLKKTNDEKKSSSTSNKPKRPLTAFFIFMSDFRKTFKSEHNGSLAKDAAKIGGEKWKSLTEEEKKVYLDKAAELKAEYNKSLESNDADEEEEDEEKQSDDVDDAEEKQVDDDDEVEEKEVENTDDDKKEAEGKEEEEEEILDDY

SEQ ID NO: 550 - protein, 366 aa, Arabidopsis thaliana
  Clone ID: AT_MEB5.C1.p23.tg
MGYNEGGADSFNGGRKLRPLIPRLTSCPTAAVNTNSDHRFNMVSLSLVSNAHFLALVTIFTAVVTMTAEQNKRELMMLNSEPQHPPVMVSSRWNPTPDQLRVLEELYRQGTRTPSADHIQQITAQLRRYGKIEGKNVFYWFQNHKARERQKRRRQMETGHEETVLSTASLVSNHGFDKKDPPGYKVEQVKNWICSVGCDTQPEKPSRDYHLEEPANIRVEHNARCGGDERRSFLGINTTWQMMQLPPSFYSSSHHHHQRNLILNSPTVSSNMSNSNNAVSASKDTVTVSPVFLRTREATNTETCHRNGDDNKDQEQHEDCSNGELDHQEQTLELFPLRKEGFCSDGEKDKNISGIHCFYEFLPLKN

SEQ ID NO: 551 - protein, 182 aa, Arabidopsis thaliana
  Clone ID: AT_F11B9.C1.p120.tg
MSFSVKGRSLRGNNNGGTGTKCGRWNPTVEQLKILTDLFRAGLRTPTTDQIQKISTELSFYGKIESKNVFYWFQNHKARERQKRRKISIDFDHHHHQPSTRDVFEISEEDCQEEEKVIETLQLFPVNSFEDSNSKVDKMRARGNNQYREYIRETTTTSFSPYSSCGAEMEHPPPLDLRLSFL

SEQ ID NO: 552 - protein, 253 aa, Arabidopsis thaliana
  Clone ID: AT_MCL19.C1.p2.tg
MSSSNKNWPSMFKSKPCNNNHHHQHEIDTPSYMHYSNCNLSSSFSSDRIPDPKPRWNPKPEQIRILESIFNSGTINPPREEIQRIRIRLQEYGQIGDANVFYWFQNRKSRAKHKLRVHHKSPKMSKKDKTVIPSTDADHCFGFVNQETGLYPVQNNELVVTEPAGFLFPVHNDPSAAQSAFGFGDFVVPVVTEEGMAFSTVNNGVNLETNENFDKIPAINLYGGDGNGGGNCFPPLTVPLTINQSQGKLIISK

SEQ ID NO: 553 - protein, 122 aa, Arabidopsis thaliana
  Clone ID: AT_MJJ3.C1.p18.tg
MSSRGFNIKARGLCNNNNGGGGTGAKCGRWNPTVEQVKLLTDLFKAGLRTPSTDQIQKISMELSFYGKIESKNVFYWFQNHKARERQKCRKISTVKFDHRQDTDLSKPRRDNVRRHQLPAKG

SEQ ID NO: 554 - protein, 199 aa, Arabidopsis thaliana
  Clone ID: AT_T12J13.C1.p6.tg
MDQEQTPHSPTRHSRSPPSSASGSTSAEPVRSRWSPKPEQILILESIFHSGMVNPPKEETVRIRKMLEKFGAVGDANVFYWFQNRRSRSRRRQRQLQAAAAAADATTNTSSSSSSYGGGCDNQSNSGMENLLTMSGQMSYHEATHHHYQNHSSNVTSILCPSDQNSNFQYQQGCFRVGKKSILGGFQPENRFVFIWRLS

SEQ ID NO: 555 - protein, 268 aa, Arabidopsis thaliana
  Clone ID: AT_MVA3.C1.p160.tg
MNQEGASHSPSSTSTEPVRARWSPKPEQILILESIFNSGTVNPPKDETVRIRKMLEKFGAVGDANVFYWFQNRRSRSRRRHRQLLAATTAAATSIGAEDHQHMTAMSMHQYPCSNNEIDLGFGSCSNLSANYFLNGSSSSQIPSFFLGLSSSSGGCENNNGMENLFKMYGHESDHNHQQQHHSSNAASVLNPSDQNSNSQYEQEGFMTVFINGVPMEVTKGAIDMKTMFGDDSVLLHSSGLPLPTDEFGFLMHSLQHGQTYFLVTNNI

SEQ ID NO: 556 - protein, 262 aa, Arabidopsis thaliana
  Clone ID: AT_mnc17.C1.p230.tg
MENEVNAGTASSSRWNPTKDQITLLENLYKEGIRTPSADQIQQITGRLRAYGHIEGKNVFYWFQNHKARQRQKQKQERMAYFNRLLHKTSRFFYPPPCSNGTVGCVSPYYLQQASDHHMNQHGSVYTNDLLHRNNVMIPSGGYEKRTVTQHQKQLSDIRTTAATRMPISPSSLRFDRFALRDNCYAGEDINVNSSGRKTLPLFPLQPLNASNADGMGSSSFALGSDSPVDCSSDGAGREQPFIDFFSGGSTSTRFDSNGNGL

SEQ ID NO: 557 - protein, 350 aa, Arabidopsis thaliana
  Clone ID: AT_F2I11.C1.p160.tg
MALSSAGVVSHLHPPSFSSSSGLSVNRVLFRNRNASPCGLSLPILNPSRSVLVFARGKNRKGFVSSSSSSPKKNKKKSLDGADNGGGEEEEDPFEALFNLLEEDLKNDNSDDEEISEEELEALADELARALGVGDDVDDIDLFGSVTGDVDVDVDNDDDDNDDDDNDDDDDDSEEDERPTKLKNWQLKRLAYALKAGRRKTSIKNLAAEVCLDRAYVLELLRDPPPKLLMLSATLPDEKPPVAAPENSSPDPSPVESLSAEDVVVEPKEKVKDEAVHVMQQRWSAQKRVKKAHIETLEKVYRRSKRPTNAVVSSIVQVTNLPRKRVLKWFEDKRAEDGVPDKRAPYQAPV

SEQ ID NO: 558 - protein, 197 aa, Arabidopsis thaliana
  Clone ID: AT_F2D10.C1.p17.tg
MEQESLNGRYGSRVMTDEQMETLRKQIAIYAVLCDQLVFLHNSLSSVPLLSSGMNPMRGEYFDPMVASSSAHGMSTRPRWTPTTTQLQILENIYKEGSGTPNPRRIKEITMELSEHGQIMEKNVYHWFQNRRARSKRKQPPTTTITSSQADDAAVTTTEERGRCGDDSGGFESYEHILFPSPDLGIEHLLNRDKFID

SEQ ID NO: 559 - protein, 476 aa, Arabidopsis thaliana
  Clone ID: AT_F4C21.C1.p18.tg
MALENFYNEHKYPTEEMKGKLAEEVGLTEKQVSGWFCHRRLKDKRHVKEDGNAIGSQDRSSVVLQDRGSGLRQDSCGSTKQTDYWNPKPREVESQRLYMGNADGEDSTSSDRSSSLRKNLVSSKDGIRDVESSRYVAHKDVIQHPQFMRSYGYNKPSGYLKVKGESENFAITAVKRQLGRQYQEDGPPLGVEFDPLPPGAFEPQTNPIVHEPIYVGNQRRPHLPHLLGTRKSFNPGPSYELARKSKLHSPDPDSEDDEHDDDDNIMVGMEPGLRDKKSFGEPRLKSPSTSFYNSVPRHKSFKETFKGSPREIPVTNSKKGWISSKSWAEGSRNHLVANVQNLSGSNIETNQSHDYDNNISNGGRKTGYLTKSSKLLPPSRSRSPESMDRGPSSGMAGIYHGERNQMKMQREKLHSTDEPPVAKRVKHGYIQQVYAPKSSSYSEILERKSQINRSGVELPSSLSGDDETDESSSSMD

SEQ ID NO: 560 - protein, 382 aa, Arabidopsis thaliana
  Clone ID: AT_F24O1.C1.p38.tg
MESGSNSTSCPMAFAGDNSDGPMCPMMMMMPPIMTSHQHHGHDHQHQQQEHDGYAYQSHHQQSSSLFLQSLAPPQGTKNKVASSSSPSSCAPAYSLMEIHHNEIVAGGINPCSSSSSSASVKAKIMAHPHYHRLLAAYVNCQKVGAPPEVVARLEEACSSAAAAAASMGPTGCLGEDPGLDQFMEAYCEMLVKYEQELSKPFKEAMVFLQRVECQFKSLSLSSPSSFSGYGETAIDRNNNGSSEEEVDMNNEFVDPQAEDRELKGQLLRKYSGYLGSLKQEFMKKRKKGKLPKEARQQLLDWWSRHYKWPYPSEQQKLALAESTGLDQKQINNWFINQRKRHWKPSEDMQFVVMDATHPHHYFMDNVLGNPFPMDHISSTML

SEQ ID NO: 561 - protein, 721 aa, Arabidopsis thaliana
  Clone ID: AT_YUP8H12.C1.p16.tg
MFEPNMLLAAMNNADSNNHNYNHEDNNNEGFLRDDEFDSPNTKSGSENQEGGSGNDQDPLHPNKKKRYHRHTQLQIQEMEAFFKECPHPDDKQRKQLSRELNLEPLQVKFWFQNKRTQMKNHHERHENSHLRAENEKLRNDNLRYREALANASCPNCGGPTAIGEMSFDEHQLRLENARLREEIDRISAIAAKYVGKPVSNYPLMSPPPLPPRPLELAMGNIGGEAYGNNPNDLLKSITAPTESDKPVIIDLSVAAMEELMRMVQVDEPLWKSLVLDEEEYARTFPRGIGPRPAGYRSEASRESAVVIMNHVNIVEILMDVNQWSTIFAGMVSRAMTLAVLSTGVAGNYNGALQVMSAEFQVPSPLVPTRETYFARYCKQQGDGSWAVVDISLDSLQPNPPARCRRRASGCLIQELPNGYSKVTWVEHVEVDDRGVHNLYKHMVSTGHAFGAKRWVAILDRQCERLASVMATNISSGEVGVITNQEGRRSMLKLAERMVISFCAGVSASTAHTWTTLSGTGAEDVRVMTRKSVDDPGRPPGIVLSAATSFWIPVPPKRVFDFLRDENSRNEWDILSNGGVVQEMAHIANGRDTGNCVSLLRVNSANSSQSNMLILQESCTDPTASFVIYAPVDIVAMNIVLNGGDPDYVALLPSGFAILPDGNANSGAPGGDGGSLLTVAFQILVDSVPTAKLSLGSVATVNNLIACTVERIKASMSCETA

SEQ ID NO: 562 - protein, 695 aa, Arabidopsis thaliana
  Clone ID: AT_T17B22.C1.p5.tg
MVVGAQAMNNTLPETPSKMGRGLVIAIPLNRSKDLKRKTFIECPHPDERQRNQLCRELKLEPDQIKFWFQNKRTQSKTQEDRSTNVLLRGENETLQSDNEAMLDALKSVLCPACGGPPFGREERGHNLQKLRFENARLKDHRDRISNFVDQHKPNEPTVEDSLAYVPSLDRISYGINGGNMYEPSSSYGPPNFQIIQPRPLAETDMSLLSEIAASAVEELKRLFLAEEQFWVKSCIDETYVIDTESYERFSHAVKHFSSTTAHVESSKAVTVVHVEAINLIQMFLDPEKWKELFPTIVNKANTIHVLGSGLPIRGNCNVLQVMWEQLHILSPLVPAREFMVVRCCQEIEKGIWIIADVSHRANFDFGNAACYKRPSGCLIQALPDAHSKVMWIEHVEVDHKLDTHKIYRDLLSGGSGYGAKRWIVTLERMCERMALSSIQTLPPSDRSEVITTGEARRSVMKLGERMVKNFNEMLTMSGKIDFPQQSKNGVRVSIRMNIEAGQPPGIVVSASSSLAIPLTPLQVFAFLQNLDTRQQWDILSYGTVVNEIARIVTGSSETNCVTILRPTHEENNDKMVVQDSCKDDMLMLQDCYMDALGGMIVYAPMDMATMHFAVSGEVDPSHIPILPSGFVISSDGRRSTVEDGGTLLTVAFQILVSGKANRSREVNEKSVDTVSALISSTIQRIKGLLNCPEC

SEQ ID NO: 563 - protein, 1694 aa, Arabidopsis thaliana
  Clone ID: AT_MLN1.C1.p10.tg
MEGGSEKTTPEGCGGESKSKRKMKTAAQLEVLENTYSAEPYPSEAIRADLSVKLNLSDRQLQMWFCHRRLKERKSTTPSKRQRKELVTPTAMESWEPPVNAGDLVAGNELDSRRAARGSGGSGVTVVRRFNEPSSAEVRAIGYVEAQLGERLRDNGPVLGMEFDPLPPGAFGMPIEMPSHRKATRQAFETNIYVRSDVKPIKDHVRPIREYQFIPELPSSRTDHSERVSPSHHFGVPLDGSVMRVSAVSAGHRDDYKISPQIPNLNLATHQGKPGHVYSPNLVEYDSPYQKSYMDTAAQVHDDPFVKSEREVGNEDEDDDALQLERHRKNEEARIAREVEAHEKRIRRELEKQDMLRRKREEQIRKEMERQDRERRKEEERLLREKQREEERYLKEQMRELQRREKFLKKETIRAEKMRQKEEMRKEKEVARLKAANERAIARKIAKESMELIEDERLELMEVAALTKGLPSMLALDFETLQNLDEYRDKQAIFPPTSVKLKKPFAVKPWNGSDENVANLLMVWRFLITFADVLGLWPFTLDEFAQAFHDYDPRLMGEIHIVLLKTIIKDIEGVVRTLSTGVGANQNVAANPGGGHPHVVEGAYAWGFDIRSWRKNLNVFTWPEILRQLALSAGLGPQLKKMNIRTVSVHDDNEANNSENVIFNLRKGVAAENAFAKMQERGLSNPRRSRHRLTPGTVKFAAFHVLSLEGEKGLNILEVAEKIQKSGLRDLTTSRTPEASVAAALSRDTKLFERVAPSTYCVRASYRKDAGDAETIFAEARERIRAFKSGITDVEDVDDAERDEDSESDVGEDPEVDVNLKKEDPNPLKVENLIGVEPLLENGKLDTVPMKTELGLPLTPSLPEEMKDEKRDDTLADQSLEDAVANGEDSACFDESKLGEQWVQGLVEGDYSNLSSEERLNALVALIGIATEGNTIRIALEERLEVASALKKQMWGEVQLDKRWKEESLIRANYLSYPTAKPGLNIATPASGNQESSSADVTPISSQDPVSLPQIDVNNVIAGPSLQLQENVPGVENLQYQQQQGYTADRERLRAQLKAYVGYKAEELYVYRSLPLGQDRRRNRYWRFSASASRNDPGCGRIFVELQDGRWRLIDSEEAFDYLVKSLDVRGVRESHLHFMLLKIEASFKEALRRNVAANPGVCSISSSLDSDTAEISTTFKIELGDSNAVERCSVLQRFHSFEKWMWDNMLHPSALSAFKYGAKQSSPLFRICRICAELHFVGDICCPSCGQMHAGPDVGELCFAEQVAQLGDNLRRGDTGFILRSSILSPLRIRLLKVQLALVEASLPPEGLEAFWTENLRKSWGMKLLSSSSHEDLYQVLTTLEAALKRDFLSSNFETTSELLGLQEGALASDLTCGVNVLPWIPKTAGGVALRLFDFDSSIVYTPDQNNDPLKDKESEDFVGLETNILRNLHEKDVMETPVQVAAYKQEENWTDPGLGGVSSSGRGGRPPRGRGRPRARGNGKKPAVSVKPPRGAANSNGETMLRPRAQPRGGRKNGRRSGTKGRKRPTQGTLGICNEVGGGRRVKEVAVTAKTSLPDNDDDWIETPELQDDDGEASSSGRSFQYEDYDDDDVMAPIDDFDGGGESSKLVGRGEFSLHSDDEYEEEEEEEEDMNMKMDVNVVDDEDEDYINEDSYGRKQHGISISNDAATRKRFNKFEDPDLTSSSSSDFQ

SEQ ID NO: 564 - protein, 195 aa, Arabidopsis thaliana
  Clone ID: AT_F2D10.C1.p16.tg
MDREIQNGAYSGRVMTEEQMEILRKQIAVYAVICDQLVLLHNSLSSYHPLSSGVRPMVGGYFDPMGASSSSHRISTRHRWTPTSTQLQILESIYDEGSGTPNRRRIREIATELSEHGQITETNVYNWFQNRRARSKRKQPQTTTANGQADDVAVTTEERRSCGDSGGLESYEHILFPSPDLGIEHLLSIGKFMET

SEQ ID NO: 565 - protein, 708 aa, Arabidopsis thaliana
  Clone ID: AT_F21H2.C1.p11.tg
MDSSHNDSSSDEEGIDSNNRRHHSNHQVQRLEAFFHECPHPDDSQRRQLGNELNLKHKQIKFWFQNRRTQARIHNEKADNIALRVENMKIRCVNEAMEKALETVLCPPCGGPHGKEEQLCNLQKLRTKNVILKTEYERLSSYLTKHGGYSIPSVDALPDLHGPSTYGSTSNNRPASYGSSSNHLPQQSSLLRRPFTRELINTTPLPKPVLLQHFQQLSQLEKNRMFEIAKNAVAEVMSLIQMEHSMWIKSTIDGRAIIDPGNYKRYFTKNSHLKSRSALQSHHESSMEVVVVQMDARNLVDMFLNTEKWARLFPTIVTEAKTIHVLDSMDHPRQTFSRVVYEQLHILSPLVLPREFIILRTCQQMKEDLWLIADVSCYLQNVEFESTAPICTKRPSGVLIQALPHGRSKVTWIEHVEVTDKVWPHQLYRDLLYGGFGYGARRWTATLQRMCERLSLYSMTDFPPTDYPGVVKTIEGRRSVMSLGERMLKNFAWIMKMSDKLDLPQQSGANNSGVRISVRTNTEAGQPPGLIVCAGSSLSLPLPPLQVYDFLRNLEVRHQWDVHCQGNPVTEAARFVTGPDQKNNVTFLQPSSVGEYKLMILQDGFIDALGGMVVYAPMNLNTAYSAISGQVDPSTIPILPSGFIISRDSHPSSSEVDGGSMTLLTLAFQIFVTGPSYYTDLNLKDSATTVNTLVSSAVQRIKAMLNCE

SEQ ID NO: 566 - protein, 687 aa, Arabidopsis thaliana
  Clone ID: AT_F2H15.C1.p22.tg
MEFLGDSQNHDSSETEKKNKKKKRFHRHTPHQIQRLESTFNECQHPDEKQRNQLSRELGLAPRQIKFWFQNRRTQKKAQHERADNCALKEENDKIRCENIAIREAIKHAICPSCGDSPVNEDSYFDEQKLRIENAQLRDELERVSSIAAKFLGRPISHLPPLLNPMHVSPLELFHTGPSLDFDLLPGSCSSMSVPSLPSQPNLVLSEMDKSLMTNIAVTAMEELLRLLQTNEPLWIKTDGCRDVLNLENYENMFTRSSTSGGKKNNLGMEASRSSGVVFTNAITLVDMLMNSVKLTELFPSIVASSKTLAVISSGLRGNHGDALHLMIEELQVLSPLVTTREFCVLRYCQQIEHGTWAIVNVSYEFPQFISQSRSYRFPSGCLIQDMSNGYSKVTWVEHGEFEEQEPIHEMFKDIVHKGLAFGAERWIATLQRMCERFTNLLEPATSSLDLGGVIPSPEGKRSIMRLAHRMVSNFCLSVGTSNNTRSTVVSGLDEFGIRVTSHKSRHEPNGMVLCAATSFWLPISPQNVFNFLKDERTRPQWDVLSNGNSVQEVAHITNGSNPGNCISVLRGFNASSSQNNMLILQESCIDSSSAALVIYTPVDLPALNIAMSGQDTSYIPILPSGFAISPDGSSKGGGSLITVGFQIMVSGLQPAKLNMESMETVNNLINTTVHQIKTTLNCPSTA

SEQ ID NO: 567 - protein, 753 aa, Arabidopsis thaliana
  Clone ID: AT_T9L24.C1.p23.tg
MSFVVGVGGSGSGSGGDGGGSHHHDGSETDRKKKRYHRHTAQQIQRLESSFKECPHPDEKQRNQLSRELGLAPRQIKFWFQNRRTQLKAQHERADNSALKAENDKIRCENIAIREALKHAICPNCGGPPVSEDPYFDEQKLRIENAHLREELERMSTIASKYMGRPISQLSTLHPMHISPLDLSMTSLTGCGPFGHGPSLDFDLLPGSSMAVGPNNNLQSQPNLAISDMDKPIMTGIALTAMEELLRLLQTNEPLWTRTDGCRDILNLGSYENVFPRSSNRGKNQNFRVEASRSSGIVFMNAMALVDMFMDCVKWTELFPSIIAASKTLAVISSGMGGTHEGALHLLYEEMEVLSPLVATREFCELRYCQQTEQGSWIVVNVSYDLPQFVSHSQSYRFPSGCLIQDMPNGYSKVTWVEHIETEEKELVHELYREIIHRGIAFGADRWVTTLQRMCERFASLSVPASSSRDLGGVILSPEGKRSMMRLAQRMISNYCLSVSRSNNTRSTVVSELNEVGIRVTAHKSPEPNGTVLCAATTFWLPNSPQNVFNFLKDERTRPQWDVLSNGNAVQEVAHISNGSHPGNCISVLRGSNATHSNNMLILQESSTDSSGAFVVYSPVDLAALNIAMSGEDPSYIPLLSSGFTISPDGNGSNSEQGGASTSSGRASASGSLITVGFQIMVSNLPTAKLNMESVETLSSLFLLGVSFSSMMEQRRELTPSFAFNAREREEKLINSNCSAASVGAVLFLDKPH

SEQ ID NO: 568 - protein, 495 aa, Arabidopsis thaliana
  Clone ID: AT_T7N9.C1.p11.tg
MENSDTDSEVFFWFQNQNQNHSHKFPSSCFPPSSHSAFYGSSSMINTETATMDEEDVCESYMMREITKKRKLTPIQLRLLEESFEEEKRLEPDRKLWLAEKLGLQPSQVAVWFQNRRARYKTKQLEHDCDSLKASYAKLKTDWDILFVQNQTLKSKVQFLNRLTSHYFQESVQNFDDTFKQVDLLKEKLKMQENLETQSIERKRLGEEGSSVKSDNTQYSEEEGLENQYSFPELAVLGFYYDPTLTASNLRQEPLKVTCADQMTQIQISDVTEPASSAHKKIEVTQRSSSMSRKRDKPYTNRHTPARISKRRRPWAPSSSEHDEIIDKPITKPPPPPALVVMGLPANCSVLELKSRFEIYGSISRIRIHKDGIGSVSYRTAESAEAAIAGSHEPSFGISIDSKKLEVVWATDPLVKWKEGVTAGEGKERTSSFSSKLLRPVMPLRKHGRSSRLASAIVNPRSDNTKGISGDGGISSPATTSEVKQRNIVTYDDIV

SEQ ID NO: 569 - protein, 282 aa, Arabidopsis thaliana
  Clone ID: AT_T2P11.C1.p15.tg
MSCNNNGLAFFPENFSLQNHHQEEEDHPQLLQDFHGTSSQLTPLFKISNPFFFYFSRSSLFLGFLGKRSPMNNVQGFCNLDMNGDEEYSDDGSKMGEKKRRLNMEQLKALEKDFELGNKLESDRKLELARALGLQPRQIAIWFQNRRARSKTKQLEKDYDMLKRQFESLRDENEVLQTQNQKLQAQVMALKSREPIESINLNKETEGSCSDRSENISGDIRPPEIDSQFALGHPPTTTTMQFFQNSSSEQRMVKEENSISNMFCGIDDQSGFWPWLDQQQYN

SEQ ID NO: 570 - protein, 104 aa, Arabidopsis thaliana
  Clone ID: AT_F15H11.C1.p25.tg
MRDFDINQTPKTEEDREWMIGATPHVNEDDSNSGGRRRKKLRLTKEQSHLLEESFIQNHTLTPKQKKDLATFLKLSQRQVEVWFQNRRARYVYIYLFIYYIIHT

SEQ ID NO: 571 - protein, 1703 aa, Arabidopsis thaliana
  Clone ID: AT_F3M18.C1.p28.tg
MGSDGEDQKIRSVVGDANLNNKKKKIDNNSSSKDGRVKPKRQMKTPFQLETLEKVYSEEKYPSEATRAELSEKLDLSDRQLQMWFCHRRLKDKKDGQSNKPVKSSVAAVQSASVNELPAAAGSVPEQDSRSDSGSESGCSPYSNSRRNFASGSSSSRAELDEYETMGKPSYESRLSTMVHRAIVCIEAQLGEPLRDDGPILGMEFDPLPPGAFGTPIAMQKHLLHPYESDLYERHDPRPRRSHAAARSFHEQQSLDDPSSFTPNMYERYSENHARGMDYEVARSRISSFMHANGPVPRSYVTPGHASRNCSTSQQDMPSPIESAHHGDRFLLEKDSSVLGTEDPYLLPDGVRKSSDVHRKGKINDGRLGRGSETRENHGPKDLEKLEIQRKKNEERMRKEMERNERERRKEEERLMRERIKEEERLQREQRREVERREKFLQRENERAEKKKQKDEIRREKDAIRRKLAIEKATARRIAKESMDLIEDEQLELMELAAISKGLPSVLQLDHDTLQNLEVYRDSLSTFPPKSLQLKMPFAISPWKDSDETVGNLLMVWRFLISFSDVLDLWPFTLDEFIQAFHDYDSRLLGEIHVTLLRSIIRDVEDVARTPFSGIGNNQYTTANPEGGHPQIVEGAYAWGFDIRSWKKHLNPLTWPEILRQLALSAGFGPKLKKKHSRLTNTGDKDEAKGCEDVISTIRNGTAAESAFASMREKGLLAPRKSRHRLTPGTVKFAAFHVLSLEGSKGLTVLELADKIQKSGLRDLTTSKTPEASISVALTRDVKLFERIAPSTYCVRAPYVKDPKDGEAILADARKKIRAFENGFTGPEDVNDLERDEDFEIDIDEDPEVDDLATLASASKSAVLGEANVLSGKGVDTMFCDVKADVKSELEKEFSSPPPSTMKSIVPQHSERHKNTVVGGVDAVIDESNQGQSWIQGLTEGDYCHLSVEERLNALVALVGIANEGNSIRTGLEDRMEAANALKKQMWAEAQLDNSCMRDVLKLDLQNLASSKTESTIGLPIIQSSTRERDSFDRDPSQLLDETKPLEDLSNDLHKSSAERALINQDANISQENYASKRSRSQLKSYIGHKAEEVYPYRSLPLGQDRRHNRYWHFAVSVSKSDPCSRLLFVELHDGKWLLIDSEEAFDILVASLDMRGIRESHLRIMLQKIEGSFKENACKDIKLARNPFLTEKSVVNHSPTDSVSPSSSAISGSNSDSMETSTSIRVDLGRNDTENKNLSKRFHDFQRWMWTETYSSLPSCARKYGKKRSELLATCDACVASYLSEYTFCSSCHQRLDVVDSSEILDSGLAVSPLPFGVRLLKPLLVFLEASVPDEALESFWTEDQRKKWGFRLNTSSSPGELLQVLTSLESAIKKESLSSNFMSAKELLGAANAEADDQGSVDVLPWIPKTVSAVALRLSELDASIIYVKPEKPEVIPEDENEQISLFPRDSPFKGKGPREQEDQDEVAPNPGNRNKKRARVSLGSGSNRKVKRKKAQSGLNKFVVGRRNVAVNSNLMAVELNHQVPGKGKRTVRKRPERIDEDNSHLVNRMANIVRPKSEEVEEDEEEEEQTFRDINEDWAAGETPREMEEDWANETPNRMMTPMQVDDESDNSVGVESEDEDGGGQFVDYSQRNKWGLDWNSNLNVAIEEDEEEEVVGVGRVEGEDDAEMSESSEDDDVPANNAANNYDRESEGYSSSDS

SEQ ID NO: 572 - protein, 538 aa, Arabidopsis thaliana
  Clone ID: AT_F6F9.C1.p29.tg
MAVYYTSNVGCYQQEPIFLNHQQQNQQASSSSAAASFTVTGGDTVRNEMVFIPPTTTGDVVTGNGTVSSSDLSFHDGQGLSLSLGTQISVAPFHFHQYQLGFTSQNPSISVKETSPFHVDEMSVKSKEMILLGQSDPSSGYAGNGGNGFYNNYRYNETSGGFMSSVLRSRYLKPAQNLLDEVVSVKKELNQMGKKKMKVNDFNSGSKEIEGGGGELSSDSNGKSIELSTIEREELQNKKNKLLTMVDEVDKRYNQYYHQMEALASSFEIVAGLGSAKPYTSVALNRISRHFRALRDAIKEQIQIVREKLGEKGGESLDEQQGERIPRLRYLDQRLRQQRALHQQLGMVRPAWRPQRGLPENSVSVLRAWLFEHFLHPYPKESEKIMLAKQTGLSKNQVANWFINARVRLWKPMIEEMYKEEFGDESELLISKSSQEPNSTNQEDSSSQQQQQQENNNNSNLAYSSADTTNIVFSSETKPDRVLGNDNDPQQQQINRSSDYDTLMNYHGFGVDDYRYISGSNQQESRFSNSHHLHDFVV

SEQ ID NO: 573 - protein, 225 aa, Arabidopsis thaliana
  Clone ID: AT_MPH15.C1.p6.tg
MPLGAATVVEEEEEEEEAVPSMSVSPPDSVTSSFQLDFGIKSYGYERRSNKRDIDDEVERSASRASNEDNDDENGSTRKKLRLSKDQSAFLEDSFKEHSTLNPKQKIALAKQLNLRPRQVEVWFQNRRARTKLKQTEVDCEYLKRCCESLTEENRRLQKEVKELRTLKTSTPFYMQLPATTLTMCPSCERVATSAAQPSTSAAHNLCLSTSSLIPVKPRPAKQVS

SEQ ID NO: 574 - protein, 145 aa, Arabidopsis thaliana
  Clone ID: AT_F24J7.C1.p180.tg
MGQNFPNGLGTFYIGIYKLVEDPSSDPIISWSKSNNGFVMCNEEARIRSKILLRFNCGKLSEFLSELKYYVSFLYILRIEFWNHGFTRVKKTDSGKMEFRNEDFVRGQPERLRDMMLKACRKHRAKFKAKEAAKEAAKELQRLQI

SEQ ID NO: 575 - protein, 628 aa, Arabidopsis thaliana
  Clone ID: AT_T26F17.C1.p2.tg
MTGTTLILEPVMDSKDELVKQHAKVAEDAVAGWEKAENEVVELKQKLEDAADKNIVLEDRVSHLDGALKECVRQLRQFRDEQEKNIQAAVTESTKELHSANTGLEKRVLELQKEAEAAKSENMMLRREFLTQREDLEIVMIERDLSTQAAETASKQHLDIIKKLAKLEAECRKLRILAKTSSSLSSNQSVDSHSDGGRERVEGSCSDSWASSAFISELDQIKNEKGGNRSLQGTTSSTEIDLMDDFLEMERLVALPTETQAKNSKDGYELSLMEKLEKIQAEKDDLEREVKCCREAEKRLSLEIEAVVGDKMELEDMLKRVEAEKAELKTSFDVLKDKYQESRVCFQEVDTKLEKLQAEKDELDSEVICCKEAEKRFSLELEAVVGDKIEMEDELEKMEAEKAELKISFDVIKDQYQESRVCFQEVEMKLEAMKRELKLANESKTQAESRVTRMEAEVRKERIVSDGLKEKCETFEEELRREIEEKTMIKREKVEPKIKQEDIATAAGKFADCQKTIASLGKQLQSLATLEEFLIDTASIPGSARSVHNKEALLGKDPHECIKTINGRSLEFLAIQNSNNKTSPPCSSSSDSTTVSLIMSSNRGSSEKNRNGFATVFTRSRNSVNLGI

SEQ ID NO: 576 - protein, 125 aa, Arabidopsis thaliana
  Clone ID: AT_T5M16.C1.p16.tg
MGYNFYMRVYEVVDDASTDAIISWSESNNSFIIWNVGEFYRRILPKYVDLGTNLSRFFSNLRSHGFKIVKGRTGVLEFGHEDFIRDKLELMKKMVSDKRKARKAAKSKARKARVQVEFLFQHLQI

SEQ ID NO: 577 - protein, 331 aa, Arabidopsis thaliana
  Clone ID: AT_MJP23.C1.p4.tg
MTAIPNVVDIESSSSSLCQETATETVTVERGSSDSSSKPDDVVLLIKEEEDDAVNLSLGFWKLHEIGLITPFLRKTFEIVDDKVTDPVVSWSPTRKSFIIWDSYEFSENLLPKYFKHKNFSSFIRQLNSYGFKKVDSDRWEFANEGFQGGKKHLLKNIKRRSKNTKCCNKEASTTTTETEVESLKEEQSPMRLEMLKLKQQQEESQHQMVTVQEKIHGVDTEQQHMLSFFAKLAKDQRFVERLVKKRKMKIQRELEAAEFVKKLKLLQDQETQKNLLDVEREFMAMAATEHNPEPDILVNNQSGNTRCQLNSEDLLVDGGSMDVNGRIEIE

SEQ ID NO: 578 - protein, 163 aa, Arabidopsis thaliana
  Clone ID: AT_T16N11.C1.p9.tg
MANESNNLGLEITELRLGLPGDIVVSGESISGKKRASPEVEIDLKCEPAKKSQVVGWPPVCSYRRKNSLERTKSSYVKVSVDGAAFLRKIDLEMYKCYQDLASALQILFGCYINFDDTLKESECVPIYEDKDGDWMLAGDVPWEMFLGSCKRLRIMKRSCNRG

SEQ ID NO: 579 - protein, 179 aa, Arabidopsis thaliana
  Clone ID: AT_F5I6.C1.p14.tg
MSPEEYVRVWPDSGDLGGTELTLALPGTPTNASEGPKKFGNKRRFLETVDLKLGEAHENNYISSMVTNDQLVGWPPVATARKTVRRKYVKVALDGAAYLRKVDLGMYDCYGQLFTALENMFQGIITICRVTELERKGEFVATYEDKDGDLMLVGDVPWMMFVESCKRMRLMKTGDAIGL

SEQ ID NO: 580 - protein, 147 aa, Arabidopsis thaliana
  Clone ID: AT_T1N24.C1.p24.tg
MEEEKRLELRLAPPCHQFTSNNNINGSKQKSSTKETSFLSNNRVEVAPVVGWPPVRSSRRNLTAQLKEEMKKKESDEEKELYVKINMEGVPIGRKVNLSAYNNYQQLSHAVDQLFSKKDSWDLNRQYTLVYEDTEGDKVLVGDVPWE

SEQ ID NO: 581 - protein, 171 aa, Arabidopsis thaliana
  Clone ID: AT_MUA2.C1.p1.tg
MNSFEPQSQDSLQRRFHQDNSTTQQPRDTTTPFIPKPASKNHNNSNSSSGAAGRSFQGFGLNVEDDLVSSVVPPVTVVLEGRSICQRISLDKHGSYQSLASALRQMFVDGADSTDDLDLSNAIPGHLIAYEDMENDLLLAGDLTWKDFVRVAKRIRILPVKGNTRQVKRNE

SEQ ID NO: 582 - protein, 842 aa, Arabidopsis thaliana
  Clone ID: AT_F10M6.C1.p80.tg
MELDLGLSLSPHKSSKLGFNFDLNKHCAIEGAASCLGTEKLRFEATFGLGNVEENCYMPKQRLFALNGQPNEEDEDPLESESSIVYDDEEENSEVVGWPPVKTCMIKRITAMNNNISNPTTATVGSSSSSSISSRSSMYVKVKMDGVAIARKVDIKLFNSYESLTNSLITMFTEYEDCDREDTNYTFTFQGKEGDWLLRGDVTWNGIMALSMRKAIGVVKDQTSIGIAKVASNMAPDLEVAIVKATSHDDDQSSDKYIREILSLTSLSRGYVHACVTSVSRRLKKTRDWIVALKALMLVHRLLNEGDPLFQEEILYATRRGTRILNMSDFRDEAHSSSWDHSAFVRTYASYLDQRLELALFERRGRNGGGSSSSHQSNGDDGYNRSRDDFRSPPPRTYDYETGNGFGMPKRSRSFGDVNEIGAREEKKSVTPLREMTPERIFGKMGHLQRLLDRFLSCRPTGLAKNSRMILIAMYPVVKESFRLYADICEVLAVLLDKFFDMEYTDCVKAFDAYASAAKQIDELIAFYHWCKDTGVARSSEYPEVQRITSKLLETLEEFVRDRAKRAKSPERKEIEAPPAPAPPVEEPVDMNEIKALPPPENHTPPPPPAPEPKPQQPQVTDDLVNLREDDVSGDDQGNKFALALFAGPPANNGKWEAFSSDNNVTSAWQNPAAELGKADWELALVETASNLEHQKAAMGGGLDPLLLNGMYDQGAVRQHVSTSELTGGSSSSVALPLPGKVNSHILALPAPDGTVQKVNQDPFAASLTIPPPSYVQMAEMDKKQYLLTQEQQLWQQYQQEGMRGQASLAKMNTAQTAMPYGMPPVNGMGPSPMGYYYNNPY

SEQ ID NO: 583 - protein, 2322 aa, Arabidopsis thaliana
  Clone ID: AT_F3I3.C1.p40.tg
MRNSFPPSDGGRSTTDRRQQSFPSSSTNRYNSRSAQSSPPLNHCTTWNQQHSQYHNTNFPPNYRRDRAPSSGFSPPVTRARPNFIVQLLHPAAANSDTKLSKKQEIESIALLCEIPEESVHVPQFGCIAASFSFRQWVDARSAVVALWDYRLQGRHDFVPELIPNVVVPSDMDELKDRLRDLFSSHVLSLMENGQGVKKVRMEIDDKSRQVASFSSKRGLKFEVFEKKKALEAERDLVVNRLDEFNNAMKSILRYLIGQDGYEFDVDDEDDEDVAVFSLEGAYDWRRIHYLILRECRRLEDGLPIYAYRRQILKKIHCEQIMVLIGETGSGKSTQLVQFLADSGVAASESIVCTQPRKIAAMTLTDRVREESSGCYEENTVSCTPTFSSTEEISSKVVYMTDNCLLQHYMKDRSLSGISCVIIDEAHERSLNTDLLLALLRKLLSRRIDLRLVIMSATADANQLSQYLFDCGILHVNGRNFPVEIVYSPSGTEENSVVGRIASYAGDVVKMAVEIHKTEKEGTILAFLTSQAEVEWACERFVAPSAIALPLHGKLSFEEQFMVFQNYPGRRKVIFATNIAETSLTIPGVKYVIDSGMVKESKYEPRTGMSILKVCQVSQSSARQRAGRAGRTEPGRCYRLYSKTDFDSMNLNQEPEIRRVHLGVALLRMLALGIDNIAAFEFVDAPVPEAIAMAIQNLVQLGAVVEKNGVLELTQEGHCLVKLGLEPKLGKLILGCFRHRMGKEGIVLAAVMANASSIFCRVGNFDDKMKADRLKVQFCNDNGDLFTLLSVYKEWASLPRDRRNKWCWENSLNAKSMRRCEDTVKELEICIERELTLVSPSYWVWNPNEGTKHDKYLKMVILASLAENVAMYTGYDQLGYEVALTSQQVQLHPSCSLLAFGQKPSWVVFGELLSIVDQYLVCVTAFDFEALYMLDPPPPFDASQMDERRLRVKKVVGCSSTVLKRFCGKSNRSLLSIVSRARSLCSDERIGIQVDVDQNEIRLYASPLDMEKVSALVNDALECEKKWMRNECLEKYLFHGRGQIPIALFGSGAQIKHLEVDQRFLTVDVHYYGDDVVDDRELLTFLEKKIDGCICSIYKFAANKQDCDEKEKWGRITFLTPESAMKATEIQKFDFKGSVLKVFPSLSTGGGIFKMPYFSSVTAKIRWPRKESSGRGCLKCPSGDIHSILGDITSLEIGTNYVHIQRDQLSNDSILISGLGDLSEAEVLDVLEFRTQRRDLNFFIFRKKYSVQCPSPTACEEELHKRIFARMSAKNPEPNCVQVQVFEPKEDNYFMRALIKFDGRLHLEAAKALQELNGEVLPGCLPWQKIKCEQLFQSSIICSASIYNTVKRQLNVLLARFERQKGGECCLEPTHNGAYRVKITAYATRPVAEMRRELEELLRGKPINHPGFTPRVVQHLMSRDGINLMRKIQQETETYILLDRHNLTVRICGTSEKIAKAEQELVQSLMDYHESKQLEIHLRGPEIRPDLMKEVVKRFGPELQGIKEKVHGVDLKLNTRYHVIQVHGSKEMRQEVQKMVNELAREKSALGEKPDEIELECPICLSEVDDGYSLEGCSHLFCKACLLEQFEASMRNFDAFPILCSHIDCGAPIVVADMRALLSQEKLDELISASLSAFVTSSDGKLRFCSTPDCPSIYRVAGPQESGEPFICGACHSETCTRCHLEYHPLITCERYKKFKENPDLSLKDWAKGKDVKECPICKSTIEKTDGCNHLQCRCGKHICWTCLDVFTQAEPCYAHLRTIHGGIGLVELAQFDIRIEPTGLTKLFSVPKSFCNFFLLHILLTVKASSPPMLLSPAMFSDHHCFTLTARMSDSDEAKTSEEESQLAEQETETQEGEMTKNLKKRDLDAVEDEDSNNESSRLEKLEKKIKKETARKLETDFVLTGEEDDDALPLACSICQNPFLDPVVTNCNHYFCDKCALKHHTENDTCFVCNEPTLGLFDTAVEIKERIEEEREKARAMVKEVTAMLEKASTMADDAKGVAQKVVKMVEEIETMVEKVAAMATKAGETATMAADMVKEAEETMETAKANMSKAFVLYFVCFYYIHFQQDSSKGKKRKKIRDIWLVGDGDDRRRRYRYRDVRSSSDGTVLKVASSSPLQREPVYLCSRQIHSSSCSSFYLLVSLSLKAKDSEYTYMIQVWSLVRRFDQPQKYKPFISRCTVNGDPEIGCLREVNVKSGLPATTSTERLEQLDDEEHILGINIIGGDHRLKNYSSILTVHPEMIDGRSGTMVMESFVVDVPQGNTKDDTCYFVESLIKCNLKSLACVSERLAAQDITNSIATFCNASNGYREKNHTETNL

SEQ ID NO: 584 - protein, 1751 aa, Arabidopsis thaliana
  Clone ID: AT_F12B17.C1.p280.tg
MRNSFPPSDGGRSATDRRQQSSHSSSTNRYNSRSAQSSPPLNHRPTWNQQHSQYPNSNFPPNYRRDRNPSSGYSPPVTRARPNFIVQLLHPAAANSDTKLCFSTKKQEIESLALLCEIPEESIHVPQFGCIAGSFSFRQWVDARSAVVALWDYRLQGKHEFVPELIPNVIVPSDMNELKDRLRDLFSSHILSLMENGEGVKKVRLEIEEKSRQVVSFSSKRGLKFEVFEKKKAIEAERDLVVNRLEEFNNAMKSILRYLIGQDGYEFDLDDEEEGDVAVFCLEGAYDWRRIHCLIRRECRRLEDGLPIYAYRRQILKKIHREQIMVLIGETGSGKSTQLVQFLADSGVAASESIVCTQPRKIAAMTLADRVREESSGCYEENTVSCTPTFSSTEEISSKVVYMTDNCLLQHYMKDRSLSGISCVIIDEAHERSLNTDLLLALLKKLLSRRIDLRLVIMSATADAKQLSQYFFSCGILLVNGRNFPVEIVYSPSDTEENSVVGGIASYVGDVVKMAVEIHKTEKEGTILAFLTSQAEVEWACERFITPSAIALPLHGKLSFEEQFRVFQNHPGRRKVIFATNIAETSLTIPGVKYVIDSGMVKESKYEPRTGMSILKVCRVSQSSARQRAGRAGRTEPGRCYRLYSKNDFDSMNLNQEPEIRRVHLGVALLRMLALGVNNIAEFNFVDAPVPEAIAMAVQNLVQLGAVVEKNGVHELTQEGHCLVKLGLEPKLGKLILGCFRHRMGKEGIVLAAVMANASSIFCRVGNFDDKMKADRLKVQFCNQNGDLFTLLSVYKEWASLPRERRNKWCWENSLNAKSMRRCEDTVKELEICIERELTLVSPSYWVWNPNEGTKHDKHLKMVILASLAENVAMYTGYNQLGYEVALTGQQVQLHPSCSLLAFGQKPSWVVFGELLSIVDQYLVCVTACDFEALYMLDPPPPFDVSQMDERRLRIKKVVGCSSTVLKRFCGKSNRSLLSIVSRARSLCSDERIGIQVDVDQNEIRLYAPPLDMEKVSALVNDALECEKKWMHNECLEKYLYHGRGQVPIALFGSGAQIKHLEVDQRFLTVDVLYYGDDVVDDRELLTFLEKKIDGSICSIYKFAANKQDCDEKEKWGRITFLTPESAMKATEIQKFYFKGSVLKLFPSLSTGGGIFKMPYFSSVTAKIRWPRRESSGRGCLKCPSGDIHRILGDISSLEIGTNYVHIQRDQQSNDSILISGLGDLSEAEVLDVLEFRTQRRDLNFFIFRKKYSVQCPSPTACEEELHKRIFARMSAKNPEPNCVQVQVFEPKEDNYFMRALIKFDGRLHFEAAKALQELNGEVLPGCLPWQKIKCEQLFQSSIICSASIYNTVKRQLNVLLARFERQKGGECCLEPTHNGAYRVKITAYATRPVAEMRRELEELLRGRPINHPGFTRRVLQHLMSRDGINLMRKIQQETETYILLDRHNLTVRICGTSEKIAKAEQELIQALMDYHESKQLEIHLRGPEIRPDLMKEVVKRFGPELQGIKEKVHGVDLKLNTRYHVIQVHGSKEMRQEVQKMVNELAREKSALGEKPDEIEVECPICLSEVDDGYSLEGCSHLFCKACLLEQFEASMRNFDAFPILCSHIDCGAPIVLADMRALLSQEKLDELFSASLSSFVTSSDGKFRFCSTPDCPSVYRVAGPQESGEPFICGACHSEICTRCHLEYHPLITCERYKKFKENPDLSLKDWAKGKNVKECPICKSTIEKTDGCNHMKCRTIHGGIGLVE

SEQ ID NO: 585 - protein, 316 aa, Arabidopsis thaliana
  Clone ID: AT_MBK20.C1.p8.tg
MCVSTTFWLYCKGLVSEEVIRDESKQIGGFGVAICDHEDNRLYEMNKVLGGEESTHQQAAELAALIHALNWALELDLGRVTFFCDDSNILEYVTGKAEPNESTVATLVKEVSLLQSKFSFCEALPVMKDITFVLKLAKDAIASQIRWREGDVYMETCPVCYEHVTSDEKFEVPGCFHRFCFDCIKKQADVALEFAKPVVNCPSFGCNSELQREDCEGVLKPKQLDRMTMYKKASMIKAKVLDFVCCTTCDNVMAKPDLIEYTKTFFVDAELSGVRKCTECGYCFCGECRAGWHSGMTCEEYFKRESNEPSPEDVER

SEQ ID NO: 586 - protein, 518 aa, Arabidopsis thaliana
  Clone ID: AT_F7H1.C1.p11.tg
MDDNLSGEEEDYYYSSDQESLNGIDNDESVSIPVSSRSNTVKREDLRRVMELLSVKEHHARTLLIHYRWDVEKLFAVLVEKGKDSLFSGAGVTLLENQSCDSSVSGSSSMMSCDICVEDVPGYQLTRMDCGHSFCNNCWTGHFTVKINEGQSKRIICMAHKCNAICDEDVVRALVSKSQPDLAEKFDRFLLESYIEDNKMVKWCPSTPHCGNAIRVEDDELSHSPCSCVMWELWRKKCFDESETVNWITVHTKPCPKCHKPVEKNGGCNLVTCLCRQSFCWLCGEATGRDHTWARISGHSCGRFQEDKEKQMERAKRDLKRYMHYHNRYKAHIDSSKLEAKLSNNISKKVSISEKRELQLKDFSWATNGLHRLFRSRRVLSYSYPFAFYMFGDELFKDEMSSEEREIKQNLFEDQQQQLEANVEKLSKFLEEPFDQFADDKVMQIRIQVINLSVAVDTLCENMYECIENDLLGSLQLGIHNITPYRSNGIERASDFYSSQNSKEAVGQSSDCGTSSKS

SEQ ID NO: 587 - protein, 348 aa, Arabidopsis thaliana
  Clone ID: AT_F9K21.C1.p120.tg
MKGPIHHDSNITPLEAELTALKRGLTEAVMGRCVPEENKTALLMIDVQRIREGFKSSFPIFVEGKRISYAYKLARETIVSEISISVNPPRQPKATRKTTCKICLDDDINENQMFCVGKCRHRFCSDCMRRHIEVRLLEGSVMRCPHYRCKTTLKFGGCINLLTPKIREMWQQRIKEDLIPVTGRIYCPNSRCSALMSETELSISTKEDEVRRCCFKCGQIFCIKCKVSWHSNLSCNDYKKLNPYPTENDGKIKALANQKRWRQCGKCQHMIELSKGCVQVKCRCGHKFCYRCGVQAGGCKHGHGLPPRPPPPPPSPPPTPVNICCIFFISSILFGLFVYIFLLINRKH

SEQ ID NO: 588 - protein, 537 aa, Arabidopsis thaliana
  Clone ID: AT_MGF10.C1.p11.tg
MDDDYMMLDDDYGEEEDENYSEDDNYSEAEVDLQPVTSTKSTSQVIKKESLVAAQKEILVRVMELLSVKENQARTLLIYYQWNVEKLFSVFADQGKDRMFSCAGLTVFVPSLVTSKKTMKCDVCMEDDLPSNVMTRMECGHRFCNDCWIGHFTVKINEGESKRILCMAHECKAICDEDVVRKLVSPELADRYDRFLIESYVEDNNMVKWCPSKPHCGSAIRKIEDGHDVVEVGCSCGLQFCFSCLSESHSPCSCLMWKLWKKKCEDESETVNWITVNTKLCPKCSKPIQKRDGCNLMTCKCGQHFCWLCGQATGRDHTYTSIAGHSCGRYKDEKVRQLERAQRDLDRYTHYHYRYKAHIDSLKLEDKLRKSILEKAVSNSETKDQKVFKEYSWVTDAVNRLFISRRILSQSYPFAFYMFGEELFKDEMSEKEREIKKNLFEDQQQQLEGNVEKLSKILEEPFDEYDHEKVVEMMRHLTNLTAVVDNLCKEMYECIENELLGPIQFGNHNIAPYRSKGIEQATEFCAESSDCGSSGSS

SEQ ID NO: 589 - protein, 545 aa, Arabidopsis thaliana
  Clone ID: AT_T20M3.C1.p14.tg
MDSDDDMHDMDSVDYDYYSGGTYDDNDSDETDFGFGEADTDDAAIIASYRSKEEDIRRHQNDDVGRVSAVLSITDVEASTLLLHYHWSVSKVNDEWFADEERVRRTVGILEGPVVTTPDGREFTCGICFDSYTLEEIVSVSCGHPFCATCWTGYISTTINDGPGCLMLKCPDPSCPAAIGRDMIDKLASKEDKEKYYRYFLRSYVEVNREMKWCPAPGCEHAIDFAGGTESYDVSCLCSHSFCWNCTEEAHRPVDCDTVGKWILKNSAESENMNWILANSKPCPKCKRPIEKNHGCMHMTCTPPCKFEFCWLCLNAWTEHGERTGGFYACNRYEAAKQEGLYDEAERRREMAKNSLERYTHYYERWASNQVSRQKAMGDLQKMQSEKLGKLSDIQCTPESQLKFIAEAWLQIIECRRVLKWTYAYGYYLQDHAKKPFFEYLQGEAESGLERLHKCVEKDIEVFELAEGPSEEFNHFRTKLTGLTSITKTFFENLVKALENGLADVDSQAASSKPANSKPSSKTKGGGKGKGSSKNGGSSRNPDGN

SEQ ID NO: 590 - protein, 373 aa, Arabidopsis thaliana
  Clone ID: AT_F13B15.C1.p2.tg
MALIRGLRESFDLGIRQVVVYCDDQLLYQYIVGRGKIKKKVVHLVDEFQLLLEEMTYTDADLIALNDVNFAFKLAREAIVSRDDVKAEICSICFEETEGERMFFTTEKCVHRHCFPCVKQYVEVKLLSGTVPTCLDDGCKFKLTLESCSKVLTLELIEMWKQKMKEDSIPAAERIYCPYPNCSMLMSKTELSSESDLSNDRSCVKCCGLFCIDCKVPSHSDLSCAEYKKLHHDPLVDELKLKSLAKDKKWRQCKMCRHMIELSHACNHMTCRCGYQFCYQCEVEWKNDQKTCSSGCLLTGHGYYDDYDYNEPEYDFEVDTCNYYSDEEAMTRREMIRMWNTEQFFSEEENADGNDDNWDDYNNYGGLTVFWRL

SEQ ID NO: 591 - protein, 575 aa, Arabidopsis thaliana
  Clone ID: AT_T8F5.C1.p21.tg
MEADDDFYSGTENYSDYADSDEDDADGEYEFVDDAADDSDDLIFRRRQQNYSVLSEADICKLQEDDISRISTVLSISRNSSAILLRHYNWCVSRVHDEWFADEEKVRDAVGLLEKPVVDFPTDGENSAVSFWQLDCGICFETFLSDKLHAAACGHPFCDSCWEGYITTAINDGPGCLTLRCPDPSCRAAVGQDMINLLAPDKDKQKYTSYFVRSYVEDNRKTKWCPAPGCDYAVNFVVGSGNYDVNCRCCYSFCWNCAEEAHRPVDCDTVSKWVLKNSAESENMNWILANSKPCPKCKRPIEKNQGCMHITCTPPCKFEFCWLCLGAWTEHGEKTGGFYACNRYEAAKQDGIYDETEKRREMAKNSLERYTHYYERWATNQSSRQKALLDLKKMQTDDIEKLSDIQCQPESQLKFIIEAWLQIVECRRVLKWTYAYGFYIPDQEHGKRVFFEYLQGEAESGLERLHQCAEKELLPYLDAKGPSEDFNEFRTKLAGLTSVTKNYFENLVRALENGLSDVNSHDAYDRTSSSKSLGGKTKGSSSKASSSDSSHWPCEYCTYVNPRSTTICQMCEHGR

SEQ ID NO: 592 - protein, 320 aa, Arabidopsis thaliana
  Clone ID: AT_F4P12.C1.p390.tg
MATQSVNAVIVDLPGDVNDDGDNSDCFIFSTPPLSARGSTKRDAISVENYDRDRKLQRLWVYPPHKTVIKSESPIYIDLDLYDDEDDDIRILCFAPPIHREKGQSSSSKTATFDCEICVDSKSIIESFRIGGCSHFYCNDCVSKYIAAKLQDNILSIECPVSGCSGRLEPDQCRQILPKEVFDRWGDALCEAVVMRSKKFYCPYKDCSALVFLEESEVKMKDSECPHCHRMVCVECGTQWHPEMTCEEFQKLAANERGRDDILLATMAKQKKWKRCPSCKFYIEKSQGCLYMKCRCGLAFCYNCGTPSRDHTHYCYNCKR

SEQ ID NO: 593 - protein, 408 aa, Arabidopsis thaliana
  Clone ID: AT_F9K21.C1.p160.tg
MEEESTLVRAEDPKHVGRVSSEIKPDSYRLYFKGLVSEETVELLAGFGVAICDKDDNLLFQMKEQVHDSRVTVLEVEIMALKRGLTEAVGLGIDNISIYSDHYRIFELVMEKSASAEENFALLMDNVQHIRQRLTSSFPVLVTRNQIKFVYELAMETIVSEISIHIPDHDKTCSICSDDNFEPELMFSVALCGHEFCVECVKRHIEVRLLAGGVPRCLHYQCESKLTLANCANLLTSKLKAMWELRIEEESIPVEERVYCPNPRCSSLMSVTKLSNSTREDVTMRSCVKCGEPFCINCKLPWHSNLSCNDYKSLGPNPTADDIKLKALANQKMWRQCENCKNVIELSEGCMHITCRCGHQFCYKCGAKWITGRVFCTHSRPPYTPSMTSHEEELEKYIGDLRRGTQDD

SEQ ID NO: 594 - protein, 408 aa, Arabidopsis thaliana
  Clone ID: AT_K12B20.C1.p10.tg
MDYAVTKDIPNRKGEGSSKVGQSTFETQSCVDNVVYKLYFKGLVSGETATDKKAIVKVGFGVAICDEADNLFYGMNKSLYEAVINREEADILALITGLYESIHRGIIGREKPQQKNVHLLEEVQRLRGRLASTGTVLVATRDDNFALRLAIDALVKATQEKPLTCSICSDKTDAEHMLLNDKCLHRHCFSCVKQQVKVKLRSGIVPPCLEDGCKSELTLESCSMVLTPKLIEMWKRKMEEDLIPDAEKIYCPYRSCSMLMSKTELSREAEQSNVRACIKCSELFCIDCKVPWHSDLSCADYKRIHSERLVNDMMLKVLANDQMWRQCSECKHMIELTEGCNHITCSCQLMDNREDEEDYNLHVDAEVNNDDDDDEDYVFDEDYEEDDDDDDDDDGTTYSLEDFRREIS

SEQ ID NO: 595 - protein, 222 aa, Arabidopsis thaliana
  Clone ID: AT_F9K21.C1.p50.tg
MKGETCVICLEETKADRMFVMDKCLHRHCYPCVNQLVEVKLRNGTVPTCLDYECKLKLSLENCFKVLKPKVIELWKHMMKEESIPLAKRIYCPYINCSTLMSKTEISRSNKSNDRACIKCSGLVCIDCKVPWHSDLSCAEYKKLHPDPVLDDLTLKLLANDQKWRQCVKCRHLIELNQGCNHMTCRCGYQFCYKCGVEWKKGQVTCPTGCPRTGQGYFYDGE

SEQ ID NO: 596 - protein, 493 aa, Arabidopsis thaliana
  Clone ID: AT_MGF10.C1.p12.tg
MDDEYMSLEEEEDNCYPSEFDDHDQMCSNAEESDLQHSREPTSQVMEFLSVTENQARTLLIQYQWNVDKLFSVYTDQGKDVLFSRAEEEEGEDKEEEEGGEDEEEEEGGEDEEAEEGGEDEEAEEGVEDEEEEEDEKDDEVQLVSTELAEKFDRFLIESYVEDNNMVKWCPSTPHCGNAIRNIKDDGDVDEVECSCGLQFCFSCLSESHSPCSCLMWKLWKKKCEDESETVNWMTVNTKLCPKCSKPIQKRDGCNHMTCKCGQHFCWLCGQATGRDHSYSSIAGHSCGRYKEEKVRQLERAQRDLDRYTHYHYRYKAHIDSLKLEDKLKKSILKKAVLNSETKDQKVFKEYSWIIDAVNRLFRSRRILSYSYPFVFYMFGKELFKDDMSDEERNIKKNLFEDQQQQLEGNVERLSKILEEPFDEYDHEKVVEMMRHLTNLTAVVDNLCKEMYECIENELLGPLISGIHNIAPYRSKGIEQAAEFSASSACGSS

SEQ ID NO: 597 - protein, 257 aa, Arabidopsis thaliana
  Clone ID: AT_F9K21.C1.p90.tg
MERSVPHHEKFALLMDDVHRIRQQFTFSIPILVTGKQANFTYKLAKETLVSRNIRPMPRTTQKKTCGICFVDDIEGQEMFSAALCSHYFCVECMKQRIEVSLNEGGVPRCPRHGCKSALTLRSCDHLLTPKQREMWEQRIKEESIPVCNRFHCPNPKCWALMSKTELTESTDDGVRRCCSKCRKPFCIDCNVSWHSNLSCKEYKMKGNKATTTVWLYVLLCMRNPMEAWRLLSSSPIGDETGGRFYGLHCPHFSFFP

SEQ ID NO: 598 - protein, 373 aa, Arabidopsis thaliana
  Clone ID: AT_F9K21.C1.p60.tg
MAPNPTGKPSPDGSSSDSYNLYFKGSLAGFGVAIYREEDDSILFKKKVSLHYPDFTAWEAELMALKLGLTKAVSFRINHISMFFDNPEIFELVMGRSVPKDKKIALIMDEVQRIRQQFSSSIPFLVASNEIKFVYKLAKETLVSNISIPRPQKKTCGNCFNDGIKGENMFSADLCSHYFCVECMKEHIEVSLNEGGLPRCPHDGCTSNLTLRSCDHLLTPKQREMWEKRIKEESIPVCDRFHCPNPRCWALMSKTELTESTEEDGVRRCCYKCRKHFCINCKVPWHSNLSCKEHKSSGREPITTVWRQCRSCLHKIKLSEERMPVTCRCGYKFCYACGAQWKLGGCCSHHLQELIMFKYLARVVVVFVLPVTI

SEQ ID NO: 599 - protein, 346 aa, Arabidopsis thaliana
  Clone ID: AT_T28A8.C1.p40.tg
MEESTLVPSGAIYKLYFKGIVIEETSQLLAGFGVAIFDQDDKLLFQMKRPIHGSDITVLEAELTALKQGLTETMKLGLDRISICCDHDHIYELVMGRSTPEQDNIAMLMNDVQRMRQQLRYSNPILVTRDQISFAYKLAMETVVSEISICMPATCSICFNNVLEAEKMFSVAICGHQFCVECVKHYIEVKLLEGGVPRCLDYQCESKLTLTSCGNLLTPKLKAIWKQRIEEELILVAERVYCPNPRCSGLMSKTELSTSTEEDVSTRTCCVKCGEPFCINCKVPWHSNLSCDDYKRLGPNPTKNDIKLKVLANQQKWSQCAKCQHMIARIEGCNVIICRYHHRYIL

SEQ ID NO: 600 - protein, 638 aa, Arabidopsis thaliana
  Clone ID: AT_T19L18.C1.p6.tg
MEEDDLNPAGKPLYRLYFKGLVTEEKEMLLAGFGVAICGDKDDLLFDLKVSIHDPTITLLEVELIALKSGLNQAVSLGINHISICCDHEYIFELVMGISTPKQESIALLLRDVQGIRKYLTSSIPVMLTQNQSNLAYDFAIEAISSEIIIDIPAQKETCNICLNDDINADQMFSVDKSGHMCCSECVKRHIEVRLLEGSLITCPHYRCNSLLTSVRCGNLLTPKLNKMWEQKTKDELIPVMDRVYCPNPRCSTLMSETELSGLNIGVRRCCVKCGEPFCVKCKVSWHNNLSCDEYKTLHPNPTENDGRLRDLANEKSWRQCSKCKHMIELSSGCISVVCRKKLQVDMEEEGTLVRADNLKHAGTPSPSKFSPYSLYFKGLMKGPIHDSAITLLEAELMALKYGLSEAVTLGINHISICCDNNQIFEWVMGRSTPQEENIAMLIRDVQGIRKQFTSSIAVLVTRNQVEFAYKVAMEAICFKTKIAFSVSSDVPALFHPKKTCTICFDDDINADMMFYIDQCGHMFCSECVKRHIEGSLITCPSYRCKSKLTYGSCVNILTPKVKEMWIQRMGEDSIPVTDRVYCPNPTCSALMSVTELDQLTGNVDMSFAMDVELMLDVALMVMYRIFQLNVESQKSKH

SEQ ID NO: 601 - protein, 594 aa, Arabidopsis thaliana
  Clone ID: AT_F10M10.C1.p140.tg
MDDYFSAEEEACYYSSDQDSLDGIDNEESELQPLSSKRSNTQVITQESLLAAQREDLLRVMELLSIKEHHARTLLIHYQWDVEKLFAVFVEKGKDSLFSGAGVTVFDYQYGNSSFPQSSQMSCDVCMEDLPGDHMTRMDCGHCFCNNCWTEHFTVQINEGQSKRIRCMAHQCNAICDEDIVRSLVSKKRPDLAAKFDRYLLESYIEDNRMVKWCPSTPHCGNAIRAEDDKLCEVECSCGLQFCFSCLCQAHSPCSCLMWELWRKKCRDESETINWITVHTKLCPKCYKPVEKNGGCNLVRCICGQCFCWLCGGATGSDHTYRSIAGHSCGRYQDDKEKQMERAKRDLNRYTHYHHRYKAHTDSSKLEDKLRDTIHEKVSKSEKRELKLKDFSWVTNGLDRLFRSRRVLSYSYAFAYYMFGEEMFKDEMTPEEREIKKNLFEDQQQQLESNVEKLSQFLEEPFDEFSNDKVMAIRIQIINLSVAVDTLCKKMYECIENDLLGSLQLGIHNISPYRSKGIEQAAQFYASWNSKDADKFQPLDSGVTSRPEQASGSRSSEDTICSSSQKRPKKEGSFLNNKVTLLDLNLPADFVDQN

SEQ ID NO: 602 - protein, 546 aa, Arabidopsis thaliana
  Clone ID: AT_F13B15.C1.p3.tg
MERHDQELRYQKRRLRPCSFPCRWIQRQRPATSDSNQRQQPATATSDNIHCSFVCRWTQRPITATIANNCRCVRLIAKNFSDQKLRSLIAGDYRYFWSLNQRQANEQLLVVVAGFSRQRQANEQGLNSIITGDIPNSKGEGSSPAAKFMDNVVYRLCFKGLVNYEAVADDVEKAVKAGFGVAICDEKDNLLHEIKESLRDIEISRRGVEIMALVRGLSESFDLGMRNVVIYCDDDWIYQSIIGRGKSKKKIDHLVEEVQGILEKMACIDAVLVARNDVKFAFRLAREAIGRNSVDVNAEQGETCGIFFEETDVEHMFVTEKCLHRHCFPCVKQHVKVKLRSGTEPTCLEYGCKFKLTLERCSKVLTLKLIEMWKQKMKEDSIPAAERIYCPYPNCSMLMSKTELSSEADLSNVRTCVKCCGLFCIDCKVPSHTDLSYDDYKKLHPDPLVDDLKLKSLANDKMWRQCVKCRHMIELSHGCNHMTCSYDAPRDDQDVVYKYPSPEQFFSEERNADGDDYIWDDYNNYGGLTGDKGGFDEGFFRDYYSL

SEQ ID NO: 603 - protein, 532 aa, Arabidopsis thaliana
  Clone ID: AT_T16H5.C1.p30.tg
MENQEDSCECEELPLNHLGDEEEFRSCCGDEELWLKGSDDIAKVVEEEKKDDLDDEFSVKMVFKGVSIFERGDLGSGYSGIGVVLERSGDLELIQVQKKLDFYVEESVANYLALMDGLEVALQNNLSSVVAVTDSELLYNQITREEQLEIPLLVALRERVLEKTSNLNGFVLKLAPFCDLDEALSLAQVAVGIVSSNLDGDKPIENCSICCEDRQSEMMLSLKCTHKFCSHCMKTYVEGKVKTSEVPIRCPQVQCKHYLSAAECKSFLPVTTFKSFEEANVCSKNNGKIYCPYPNCSFLLDPQECLSSGRASSSSSTQSENSCCVECPVCERFVCVDCGVPWHASMSCEEFQILPVDERYPDDITLHRLARYKRWRRCQQCRIMIELAQGCNHMTCRCGHEFCYSCGAEYREGQQTCTCAFWDDDEEEQENAVEENTIQEVEQWPWDTFNSIPTVMDAYSEQERSQLALIQRFLAGGGFSLSDHHTTYQSPPPPCTESSYVEAAMKDLHQLPWLERFVSVISDDYYEEYNSQ

SEQ ID NO: 604 - protein, 312 aa, Arabidopsis thaliana
  Clone ID: AT_F9K21.C1.p150.tg
MEDDPKPAGEIKIESYSLYFKGLVSEETTELLAGFAVAICDKDDNLLFQMKEQVHDSRVVTLMEVELMALKRGLTEVVRLGIDHISIYCDHYQIFELVMERSVSEQENILMLMDDVQRIRKRLTSSVPVLVMTRNQIEFVYELAMETIVSEIRIDMPDHNKTCSICSGDNIEPEQIFSVALCGHEFCMECVKQHIEVKLLSGGVPRCLHYQCESNLTLGSCGNILTSKLKAMWELRIEEESIPVAERVYCPNPLCSSLMSVTKLSNSTREDVTMRTCVKCGEPFCINCKLPWHSNLSCNDYKSLGPNPTADI

SEQ ID NO: 605 - protein, 503 aa, Arabidopsis thaliana
  Clone ID: AT_MBK5.C1.p24.tg
MEKLMTESGLKPVVIDSNQDLSRVYCGICSNIGDDDYDGDAVVVDGDLISTPFCSHKFCKACWSKYLKKNFFSVEKNHTAISCPDRDCRAAVGPETVEKLTVRDQAMYELYILKSYREKYLGWKLKLCPARGCNYVIEFHLASEDEEHSLNIVCLCGHIFCWRCMLESHRPVTCNNASDWLSRDLEKLIEEVDKPSTVSWIDANTKPCPHCFIPVEIDGERPWAQFLTCVCSGRFCWKCFRSPETHGTSGSCLAPARSSNVGFNHWNRAKPGISCLDLWNASQVNLVNAKYELEAFEESIIKKPSDLKEQDVKVLREGLMLIVQCRQFLKWSCAYDYIHTEYDMAKREYLRFLQQNASGIVHSFSQSIKEETEAKELTCGKLLSETTNIGNFFYHFIKTLREGLPEVQAESYDNYGGPYWLCDRCTYGNSWFQRAFTMLCDKQRLALMFSDSIRKYVVLLLSFFIPRSTTVVLLSGTKSPEDGLKQKMKSTAFTSEDPKFLVN

SEQ ID NO: 606 - protein, 655 aa, Arabidopsis thaliana
  Clone ID: AT_f15l12.C1.p110.tg
MDFDSEYAFRLQMEEALAASLSSQSRTPQRPPSPPIVATCGVLIVENNPNDSKTAKTSSGYGFDFKRAVGGGNSKAKGKTHESVTGVRTDERNPNIGLGNSRSTSTGHGNTKPLPQETVRPAQLVGEGSSRVNTAAGKINGNLLYRLYFKGLVSDENGKGKMTDVVSGFGVAICDQRDNLLFEMKGPLIDNGMSRQGAELKALIRGLTEALKLGIKHIVFFCDSYPIFQYVTGKWMAKQKKISLLLDDLQSIMQHFSSYQHVLVARNDVKFAYKLARESILSMVTPHEDPRQAKAVLKEECAICFNDIVAEGMFSVDKCRHRFCFQCVKQHVEVKLLHGMAPKCPHDGCKSELVIDACGKLLTPKLSKLWQQRLQENAIPVTERVYCPYPRCSALMSKTKISESAKSLLSLYPKSGVRRCVECRGLFCVDCKVPWHGNLSCTEYKKLHPEPPADDVKLKSLANNKMWRQCGKCQHMIELSQGCNHITCRCGHEFCYNCGGGWNKIMGTCLNRCPTWNEEYITRQDPARANVAANNYFDDEDDDDVDGDYDYDDFFHPHFGHAMNDRNPEEPFDPFFDLPDGVLFTPQMLSSKSRQQLYLPDSDDSDDNATTQNAPAADENCPYFGKYGKYTIMYDSDGYELEDFTNPFHPDYPHF

SEQ ID NO: 607 - protein, 350 aa, Arabidopsis thaliana
  Clone ID: AT_F13B15.C1.p4.tg
MERDDINLTFQKRRIDSATTENSPNPKGDDSSKVVNSASPATQSYRLYFKGLVSDQTLAEGGKRIVNAGFGVAICDNTDEFLFEIKESLSNAEISRKGVEIVALIRGLSECLSFGFMNVVIYCDDHQIYQYELFSSQIIERSLRRKLLVEEVKRLREQMTFSEAVLVARNDVKFAYRLAREEIVSKSSSVNVKEAQGETCVICLEETVADRMFFTDKCLHRYCFSCVKQTCVKCNGLFCIDCKVPSHSDLSCADYKKLHPELLVDDIKLKLLANENMWRQCVMCRHLIELSDGCNHMTCRCGYQFCYGCGIEWKKNQDTCPSGCREMGHGDADSDDDDDDVDDDEDDYCM

SEQ ID NO: 608 - protein, 468 aa, Arabidopsis thaliana
  Clone ID: AT_F3K23.C1.p18.tg
MEKHDLTLISKKRRIDFATTGDIPNLKGEGVSMVAESASASNIFADSLVYRLFFKGLVSDETTTDMEEIVKAGFGIAICDEANTLLYNMKKSLNGDDVINPEEVEIKALICVLNVSIQMELRNVMICCGDYQIFQILTGRGKPQQNIVHLVEQVQHLRGKLSSTEVVLVPRADVIILAIEAIGGETCCICRENTDADRMFFTENCFHRQCFSCVNRHVQRMLLCGISPTCLHFPCNSELTFESCSKVLTPNLIEFWKRKIEEDLVPAADKIYCPYRRCSMLMSKTALSRETDQSNVRACIKCCRLFCIDCKVPSHAGLSCVDYKKLNPDPLYDVKLKSLANKKKWRQCVQCSNLVELFEGCNHITCRCGFEFCYVCGKEWNQRGCLSPGCDDDDDDDDDDDDDDDDDDDDDDDDDDDEDDEDDGYIDSDDDDVDGDDNDDGSELDGINFEDFAVHLPKDVNEQKDESN

SEQ ID NO: 609 - protein, 308 aa, Arabidopsis thaliana
  Clone ID: AT_MLN21.C1.p3.tg
MGSSSSSSSTKVDTDMLVDETYLSALFDYDEIFPIADESYATEIHLQEAMFSSFGASTVGVNHHPQVHRNLVTLVKQEPEIKAENEPMEPSRRLCMICMDEKPSSDIFRGTTNCTHAYCTDCTVRYVATKIKENASRIKCPDVECTRLIEPYTCRDLIPKDVFDRWEKILCESLISSWDKFYCPFKDCSAMMVNNENGDANVTQTECRSCHRLFCVQCKVTWHAGIGCDEFQRFGNTKKKSSDEDDALLIQMAKNKQWRRCPSCKFYVDKVEGVDISFAMVVDLCGVLLTHAKFVSKRPIDGLFDKFV

SEQ ID NO: 610 - protein, 215 aa, Arabidopsis thaliana
  Clone ID: AT_F28K20.C1.p7.tg
MRKGKRVIKKIEEKIKRQVTFAKRKKSLIKKAYELSVLCDVHLGLIIFSHSNRLYDFCSNSTSMENLIMRYQKEKEGQTTAEHSFHSDQCSDCVKTKESMMREIENLKLNLQLYDGHGLNLLTYDELLSFELHLESSLQHARARKSEFMHQQQQQQTDQKLKGKEKGQGSSWEQLMWQAERQMMTCQRQKDPAPANEGGVPFLRWGTTHRRSSPP

SEQ ID NO: 611 - protein, 673 aa, Arabidopsis thaliana
  Clone ID: AT_F28K20.C1.p8.tg
MNQIKDPNPNLPERLFAVDCYPDKARLNIYSRPEYLGTIANLLKGSEEWERIKSSQFGKLFEFPVARCSHSGKLIHGLLSRQVVTKKKHELWFVFGGHPIRFSIREFHIVTGLRCGKLPTEDEVKKHQDSKYLSVWNRLFGEKRMVTIGDVLEMLQKKKLSSWKKLCLALIVIVDGVVVCNDQSFVTLDFVEMLNDIDFFLEYPWGRKAFLATIRRFGPPKDAPNPLGKLKKRLKQKTSACYGFPLALQLQVFESIPVILERIKDPNDLRDFTERSSEGLSIAFLLRKSYILDAEVDDKLVVAHTLEPKGMINESELVWETEVSDPKVDYILRLINEGHCFKPFEWPHLKAANQEVNIPDIDGDSLEDVTDVSQARPKKPLTRSSKKEKEVVKPPSIHKHTSQEKIKAKVHVGGESNDPGYVTLAYLNDMKEWILKQNQDLRNKIREDVKEIVVGPKSPAGGASNLRQSNRLNTNSKGKTDASPPKKTGNTETRKRKRKQVEVHSLSSGSESAGDIEGEEDVQSTWKEDGNAPSSGTFDECDDYGGALKITQEGDVMQEESDFDHCSSNCTKMKESMMREIENLELKLQLYGGHGLNNLTYDELLHFEHQLESSLHIARAHKQEQQQQQTDKLKENLMVCQRHEDDDIMHRQVKKENPPAFFSSSRRHNQPQD

SEQ ID NO: 612 - protein, 1121 aa, Arabidopsis thaliana
  Clone ID: AT_F19H22.C1.p150.tg
MASSSSRTRSSRPPSPASSTSSSHLSNRLIPRSNSTSASSLITSAAGIASRSMTPSRTFSDSGLIGSGSFGIGSPVPYPSEELLGDPMDDTISSERDSISVTVRFRPLRYARSDLAMDQIYCRDYSFHVDAIGVNSLLGEYQRGDEVAWYPDGDTLVRHEYNPLTAYAFDKVFGPQATTIDVYDVAARPVVKAAMEGVNGTVFAYGVTSSGKTHTMHVRVLKKKNPYTPFSLVFLQNTCAMNWDLFFNLVPLWYLLGDQESPGIIPLAIKDVFSIIQDVSGLNGTPGREFLLRVSYLEIYNEVINDLLDPTGQNLRVREDSQGTYVEGIKEEVVLSPGHALSFIAAGEEHRHVGSNNFNLLSSRSHTIFTLMVESSATGDEYDGVIFSQLNLIDLAGSESSKTETTGLRRKEGSYINKSLLTLGTVIGKLSEGKATHIPYRDSKLTRLLQSSLSGHGHVSLICTITPASSSSEETHNTLKFASRAKSIEIYASRNQIIDEKSLIKKYQREISTLKLELDQLRRGMLVGVSHEELMSLKQQLEEGQVKMQSRLEEEEEAKAALMSRIQKLTKLILVSTKNSIPGYSGDIPTHQRSLSAGKDDKFDSLLLESDNLGSPSSTLALLSEGSLGFNHRRSSSKLNDENSPGAEFTQGVMTPDEIDLLVEQVKMLAGEIAFSTSTLKRLVDQSVNDPENSQTQNLEREIHEKQRQMRGLEQLIIESGEASIANASLVEMQQKVMSLMTQCNEKSFELEIKSADNCILQEQLQEKCTENKELHEKVNLLEQRLNAVSSEKSSPSCSNKAVSGEYADELKKKIQSQEIENEELKLEHVQIVEENSGLRVQNQKLAEEASYAKELASAAAVELKNLASEVTKLSLQNTKLEKELAAARDLAQTRNPMNGVNRKYNDGARSGRKGRISSSRSSGDEFDAWNLDPEDLKMELQVRKQREVALESALAEKEFIEDEYRKKAEEAKRREEALENDLANMWVLVAKLKKDNGALPEPNGTDPGRELEKSQSHAVLKERQVSSAPRQPEVVVVAKTEETPKEEPLVARLKARMQEMKEKEMKSQANGDANSHICKVCFESPTAAILLPCRHFCCKSQLHLHETSCLFFYQRVVLKR

SEQ ID NO: 613 - protein, 544 aa, Arabidopsis thaliana
  Clone ID: AT_T26J13.C1.p3.tg
MAPKRASPMQSSLYSIENSDQSNESSCVLIRFLQVITRLQWMVRISPVNPDPKAFKSNFPETTQSKSQWKKRKIGFRSIRFDGERGRSDEEEAKRSNEQDERALQFLRILQQQLRKEVERLRLLIKRMTGKEDIVSFTELLALQSHLMDVRSIVLEQKKEVELEEAERPHKQKKEAEHDADGMRRGVLVPCKFSASSLGERQEDPNGEAPLLQMQREFEQRSSESLQSEFDKLWLFNERMNGRELEGMTSFDLSILHIQILRALRALIDQKLGPRQEHRAWQRGELSPGDVRRIMTRMLTLPCNVDFFSFQESSEDSIILISGRACRRPDINFGFPSIRLEISRMGRGRIKMKLKGRRRDLTKKKVRELCDYCGFSSGIIRYDEQRPHERDHEAVSMENELKRLRLLTRRMTCKDLDGLTFPELLSLKSHLQTALLIVKDQTKKIEQLLKEDDGWMLIRSQLQLQFERRNAEPMMIEYGRLWLLKEVDVSFTLFLMVCFFFLLFVKTDRRMNGRQLDGVGVRDRFFFFGYRVYSDRRLRTIRVF

SEQ ID NO: 614 - protein, 644 aa, Arabidopsis thaliana
  Clone ID: AT_K1F13.C1.p30.tg
MASDYYSSDDEGFGEKVGLIGEKDRFEAETIHVIEVSQHEADIQKAKQRSLATHEAEKLDLATHEAEQLDLAIQEFSRQEEEEERRRTRELENDAQIANVLQHEERERLINKKTALEDEEDELLARTLEESLKENNRRKMFEEQVNKDEQLALIVQESLNMEEYPIRLEEYKSISRRAPLDVDEQFAKAVKESLKNKGKGKQFEDEQVKKDEQLALIVQESLNMVESPPRLEENNNISTRAPVDEDEQLAKAVEESLKGKGQIKQSKDEVEGDGMLLELNPPPSLCGGCNFAVEHGGSVNILGVLWHPGCFCCRACHKPIAIHDIENHVSNSRGKFHKSCYERYCYVCKEKKMKTYNNHPFWEERYCPVHEADGTPKCCSCERLEPRESNYVMLADGRWLCLECMNSAVMDSDECQPLHFDMRDFFEGLNMKIEKEFPFLLVEKQALNKAEKEEKIDYQYEVVTRGICLSEEQIVDSVSQRPVRGPNNKLVGMATESQKVTRECEVTAILILYGLPRLLTGYILAHEMMHAYLRLNGHRNLNNILEEGICQVLGHLWLDSQTYATADATADASSSASSSSRTPPAASASKKGEWSDFDKKLVEFCKNQIETDDSPVYGLGFRTVNEMVTNSSLQETLKEILRQR

SEQ ID NO: 615 - protein, 713 aa, Arabidopsis thaliana
  Clone ID: AT_K1F13.C1.p31.tg
MPISDVASLVGGAALGAPLSEIFKLVIEEAKKVKDFKPLSQDLASTMERLVPIFNEIDMMQQGSNRGTSELKVLTETMERAGEMVHKCSRIQWYSIAKKALYTREIKAINQDFLKFCQIELQLIQHRNQLQYMRSMGMASVSTKADLLSDIGNEFSKLCLVAQPEVVTKFWLKRPLMELKKMLFEDGVVTVVVSAPYALGKTTLVTKLCHDADVKEKFKQIFFISVSKFPNVRLIGHKLLEHIGCKANEYENDLDAMLYIQQLLKQLGRNGSILLVLDDVWAEEESLLQKFLIQLPDYKILVTSRFEFTSFGPTFHLKPLIDDEVECRDEIEENEKLPEVNPPLSMCGGCNSAVKHEESVNILGVLWHPGCFCCRSCDKPIAIHELENHVRKCSSFDNCLVSNSRGKFHKSCYERYCYVCKEKKMKTYNIHPFWEERYCPVHEADGTPKCCSCERLEPRGTKYGKLSDGRWLCLECGKSAMDSDECQPLYFDMRDFFESLNMKIEKEFPLILVRKELLNKKEEKIDNHYEVLIRAYCMSEQKIMTYVSEEPRTGQNKQLIDMDTEPQGVVHECKVTAILILYGLPRLLTGYILAHEMMHAWLRLNGHMNLNNILEEGICQVLGHLWLESQTYATADTTADAASASSSSSRTPPAASASKKGEWSDFDKKLVEFCKNQIETDESPVYGLGFRTVNEMVTNSSLQETLKEILRRR

SEQ ID NO: 616 - protein, 529 aa, Arabidopsis thaliana
  Clone ID: AT_K1F13.C1.p29.tg
MWCLSCFKPSTKHDPSEDRFEEETNIVTGISLYEDVILRQRRSEADQIEWAIQDSFNPQETSRCRQREEDDQIARGLQYVEETELDKSVVDEEDQQLSKIVEESLKEKGKSKQFEDDQVENDEQQALMVQESLYMVELSAQLEEDKNISTIPPLNEDAQLQKVIWESAKGKGQIEHFKDPVEEDGNLPRVDLNVNHPHSICDGCKSAIEYGRSVHALGVNWHPECFCCRYCDKPIAMHEYKEHPFWKEKYCPFHEVDGTPKCCSCERLEPWGTKYVMLADNRWLCVKCMECAVMDTYECQPLHFEIREFFGSLNMKVEKEFPLLLVEKEALKKAEAQEKIDNQHGVVTRGICLSEGQIVNSVFKKPTMGPNGELVSLGTEPQKVVGGCEVTAILILYGLPRLLTGYILAHEMMHAWLRLNGYRNLKLELEEGICQVLGHMWLESQTYSSSAAASSASSSSRTPAANASKKGAQSDYEKKLVEFCKDQIETDDSPVYGVGFRKVNQMVSDSSLHKILKSIQHWTKPDSNL

SEQ ID NO: 617 - protein, 532 aa, Arabidopsis thaliana
  Clone ID: AT_T29M8.C1.p12.tg
MGWFNKIFKGSNQRLRVGNNKHNHNVYYDNYPTASHDDEPSAADTDADNDEPHHTQEPSTSEDNTSNDQENEDIDRAIALSLLEENQEQTSISGKYSMPVDEDEQLARALQESMVVGNSPRHKSGSTYDNGNAYGAGDLYGNGHMYGGGNVYANGDIYYPRPITFQMDFRICAGCNMEIGHGRFLNCLNSLWHPECFRCYGCSQPISEYEFSTSGNYPFHKACYRERYHPKCDVCSHFIPTNHAGLIEYRAHPFWVQKYCPSHEHDATPRCCSCERMEPRNTRYVELNDGRKLCLECLDSAVMDTMQCQPLYLQIQNFYEGLNMKVEQEVPLLLVERQALNEAREGEKNGHYHMPETRGLCLSEEQTVSTVRKRSKHGTGKWAGNITEPYKLTRQCEVTAILILFGLPRLLTGSILAHEMMHAWMRLKGFRTLSQDVEEGICQVMAHKWLDAELAAGSTNSNAASSSSSSQGLKKGPRSQYERKLGEFFKHQIESDASPVYGDGFRAGRLAVHKYGLRKTLEHIQMTGRFPV

SEQ ID NO: 618 - protein, 1575 aa, Arabidopsis thaliana
  Clone ID: AT_MPI7.C1.p30.tg
MEPPAARVTPSIKADCSHSVNIICEETVLHSLVSHLSAALRREGISVFVDACGLQETKFFSIKQNQPLTDGARVLVVVISDEVEFYDPWFPKFLKVIQGWQNNGHVVVPVFYGVDSLTRVYGILSNNVLTDSELVEEIVRDVYGKLYPAERVGIYARLLEIEKLLYKQHRDIRSIGIWGMPGIGKTTLAKAVFNHMSTDYDASCFIENFDEAFHKEGLHRLLKERIGKILKDEFDIESSYIMRPTLHRDKLYDKRILVVLDDVRDSLAAESFLKRLDWFGSGSLIIITSVDKQVFAFCQINQIYTVQGLNVHEALQLFSQSVFGINEPEQNDRKLSMKVIDYVNGNPLALSIYGRELMGKKSEMETAFFELKHCPPLKIQDVLKNAYSALSDNEKNIVLDIAFFFKGETVNYVMQLLEESHYFPRLAIDVLVDKCVLTISENTVQMNNLIQDTCQEIFNGEIETCTRMWEPSRIRYLLEYDELEGSGETKAMPKSGLVAEHIESIFLDTSNVKFDVKHDAFKNMFNLKFLKIYNSCSKYISGLNFPKGLDSLPYELRLLHWENYPLQSLPQDFDFGHLVKLSMPYSQLHKLGTRVKDLVMLKRLILSHSLQLVECDILIYAQNIELIDLQGCTGLQRFPDTSQLQNLRVVNLSGCTEIKCFSGVPPNIEELHLQGTRIREIPIFNATHPPKVKLDRKKLWNLLENFSDVEHIDLECVTNLATVTSNNHVMGKLVCLNMKYCSNLRGLPDMVSLESLKVLYLSGCSELEKIMGFPRNLKKLYVGGTAIRELPQLPNSLEFLNAHGCKHLKSINLDFEQLPRHFIFSNCYRFSSQVIAEFVEKGLVASLARAKQEELIKAPEVIICIPMDTRQRSSFRLQAGRNAMTDLVPWMQKPISGFSMSVVVSFQDDYHNDVGLRIRCVGTWKTWNNQPDRIVERFFQCWAPTEAPKVVADHIFVLYDTKMHPSDSEENHISMWAHEVKFEFHTVSGENNPLGASCKVTECGVEVITAATGDTSVSGIIRESETITIIEKEDTIIDEEDTPLLSRKPEETNRSRSSSELQKLSSTSSKPKNLRSRSRRTTALEEALEEALKEREKLEDTRELQIALIESKKIKKIKQADERDQIKHADEREQRKHSKDHEEEEIESNEKEERRHSKDYVIEELVLKGKGKRKQLDDDKADEKEQIKHSKDHVEEEVNPPLSKCKDCKSAIEDGISINAYGSVWHPQCFCCLRCREPIAMNEISDLRGMYHKPCYKELRHPNCYVCEKKIPRTAEGLKYHEHPFWMETYCPSHDGDGTPKCCSCERLEHCGTQYVMLADFRWLCRECMDSAIMDSDECQPLHFEIREFFEGLHMKIEEEFPVYLVEKNALNKAEKEEKIGDQCLMVVRGICLSEEQIVTSVSQGVRRMLNKQILDTVTESQRVVRKCEVTAILILYGLPRLLTGYILAHEMMHAYLRLNGYRNLNMVLEEGLCQVLGYMWLECQTYVFDTATIASSSSSSRTPLSTTTSKKVDPSDFEKRLVNFCKHQIETDESPFFGDGFRKVNKMMASNNHSLKDTLKEIISISKTPQYSKL

SEQ ID NO: 619 - protein, 434 aa, Arabidopsis thaliana
  Clone ID: AT_T5I7.C1.p13.tg
MDSSSSSSSSSPSSSYGVARVSHISNPCIFGEVGSSSSSTYRDKKWKLMKWVSKLFKSGSNGGGSGAHTNHHPPQFQEDENMVFPLPPSSLDDRSRGARDKEELDRSISLSLADNTKRPHGYGWSMDNNRDFPRPFHGGLNPSSFIPPYEPSYQYRRRQRICGGCNSDIGSGNYLGCMGTFFHPECFRCHSCGYAITEHEIPTNDAGLIEYRCHPFWNQKYCPSHEYDKTARCCSCERLESWDVRYYTLEDGRSLCLECMETAITDTGECQPLYHAIRDYYEGMYMKLDQQIPMLLVQREALNDAIVGEKNVLRRPRLGAHRLVGFRNLNPEVEEGICQVLSYMWLESEVLSDPSTRNLPSTSSVATSSSSSFSNKKGGKSNVEKKLGEFFKHQIAHDASPAYGGGFRAANAAACKYGLRRTLDHIRLTGTFPL

SEQ ID NO: 620 - protein, 289 aa, Arabidopsis thaliana
  Clone ID: AT_F28P22.C1.p7.tg
MGNQKLKWTAEEEEALLAGIRKHGPGKWKNILRDPEFADQLIHRSNIDLKDKWRNLSVPPGTQSLTNKARPAKVKEEGDTPAADANDAVTIPRPIPTIPPPPGRRTLPSELIPDENTKNAPRYDGVIFEALSALADGNGSDVSSIYHFIEPRHEVPPNFRRILSTRLRRLAAQSKLEKVSTFKSIQNFYKIPDPSGTKIGVPKPKETHTKLRQANNQTSADSQQMIEEAAITAACKVVEAENKIDVAKLAAEEFEKMTKIAEENRKLLVIATEMHELCKKKPDSFLIIG

SEQ ID NO: 621 - protein, 249 aa, Arabidopsis thaliana
  Clone ID: AT_F20D21.C1.p6.tg
MVSGDTKSDANNVTYGDLPSSPAATDSSEPSSYAEQLERLMMIDSEEDRGPSGFTTDELIFQALETVYENHNGLDVDAIFTFIKERNELQEDFRERLENQLRYLVSEGQVYKVGNLYKIPRGVFDTPVVSVGDSNQRETMDPEDSTGTKAQDTPSTCASFAPPTTEVDPRIIALAKEVAEAEHLELEAKEAYELADKHAQLLKLESNITLQLAVLTVKRFSCCKSFDLLVRFKVDIFDHRFLFSVFGFE

SEQ ID NO: 622 - protein, 427 aa, Arabidopsis thaliana
  Clone ID: AT_MBG14.C1.p3.tg
MFQLSPHVSMPHPPYSEMICAAIAALNEPDGSSKMAISRYIERCYTGLTSAHAALLTHHLKTLKTSGVLSMVKKSYKIAGSSTPPASVAVAAAAAAQGLDVPRSEILHSSNNDPMASGSASQPLKRGRGRPPKPKPESQPQPLQQLPPTNQVQANGQPIWEQQQVQSPVPVPTPVTESAKRGPGRPRKNGSAAPATAPIVQASVMAGIMKRRGRPPGRRAAGRQRKPKSVSSTASVYPYVANGARRRGRPRRVVDPSSIVSVAPVGGENVAAVAPGMKRGRGRPPKIGGVISRLIMKPKRGRGRPVGRPRKIGTSVTTGTQDSGELKKKFDIFQEKVKEIVKVLKDGVTSENQAVVQAIKDLEALTVTETVEPQVMEEVQPEETAAPQTEAQQTEAAETQGGQEEGQEREGETQTQTEAEAMQEALF

SEQ ID NO: 623 - protein, 479 aa, Arabidopsis thaliana
  Clone ID: AT_T1N15.C1.p22.tg
MDPSLSATNDPHHPPPPQFTSFPPFTNTNPFASPNHPFFTGPTAVAPPNNIHLYQAAPPQQPQTSPVPPHPSISHPPYSDMICTAIAALNEPDGSSKQAISRYIERIYTGIPTAHGALLTHHLKTLKTSGILVMVKKSYKLASTPPPPPPTSVAPSLEPPRSDFIVNENQPLPDPVLASSTPQTIKRGRGRPPKAKPDVVQPQPLTNGKLTWEQSELPVSRPEEIQIQPPQLPLQPQQPVKRPPGRPRKDGTSPTVKPAASVSGGVETVKRRGRPPSGRAAGRERKPIVVSAPASVFPYVANGGVRRRGRPKRVDAGGASSVAPPPPPPTNVESGGEEVAVKKRGRGRPPKIGGVIRKPMKPMRSFARTGKPVGRPRKNAVSVGASGRQDGDYGELKKKFELFQARAKDIVIVLKSEIGGSGNQAVVQAIQDLEGIAETTNEPKHMEEVQLPDEEHLETEPEAEGQGQTEAEAMQEALF

SEQ ID NO: 624 - protein, 299 aa, Arabidopsis thaliana
  Clone ID: AT_K9I9.C1.p15.tg
MGAPKQKWTPEEEAALKAGVLKHGTGKWRTILSDTEFSLILKSRSNVDLKDKWRNISVTALWGSRKKAKLALKRTPPGTKQDDNNTALTIVALTNDDERAKPTSPGGSGGGSPRTCASKRSITSLDKIIFEAITNLRELRGSDRTSIFLYIEENFKTPPNMKRHVAVRLKHLSSNGTLVKIKHKYRFSSNFIPAGARQKAPQLFLEGNNKKDPTKPEENGANSLTKFRVDGELYMIKGMTAQEAAEAAARAVAEAEFAITEAEQAAKEAERAEAEAEAAQIFAKAAMKALKFRIRNHPW

SEQ ID NO: 625 - protein, 197 aa, Arabidopsis thaliana
  Clone ID: AT_F20D21.C1.p8.tg
MSNDARYDAMVFEAVSTINDENGSNLKEILRFIEGQHEVPQNFKKLLSYSLGILVSQDKLKKVRNRYKISVTKAIKPTLTLRPKDSTKPPELPNWYEEQQDFRMFLSECLIILVSQGKLEKVLDRYKISELENKVLEVAPEVVAMKLAESDNKRLIAAEAVEEEERMHKLVEESHTMLQLCLEIHQQCALGQEVVLL

SEQ ID NO: 626 - protein, 105 aa, Arabidopsis thaliana
  Clone ID: AT_MFH8.C1.p14.tg
MDNTDRRRRRKQHKIALHDSEVSSIEWEFINMTEQEEDLIFRMYRLVGDRWDLIAGRVPGRQPEEIERYWIMRNSEGFADKRRQLHSSSHKHTKPHRPRFSIYPS

SEQ ID NO: 627 - protein, 390 aa, Arabidopsis thaliana
  Clone ID: AT_F7H2.C1.p6.tg
MEVMDKWVAEFFLRRQLNPRVYAFPLLSALKPVDSDDCVKLKLTAVLRDISNSMIQGTVDEGMLDLLEILEKLLLQEHSVIMGSLKSAYCWTAVECTLRFMWPVNASDGFFGDALERIWRNRIGTLKEKESDLVTRELLKWESDLNKAFEEPEIYQKIRETNIRYNAISHLNQLLKEQWALLGCSSLESEARKRFLKRKDSPYASRRGGNREKANDVEEVGGVENPDGVGKVNEHEQEHEPSLNKGEMLVARELKDFLLEIQRLIDPITRQDQEPNNAMEHSVDVTPQPDGANRTDAEDSEGTSSSRRVRPHLPTPEPLNVSPLKKGRLERPRPRRPMKFWTSEEVAALREGVKEYGKSWKDIKNSYPVVFADRSEVDLKDKWRNLLGRQ

SEQ ID NO: 628 - protein, 545 aa, Arabidopsis thaliana
  Clone ID: AT_T22F8.C1.p60.tg
MDLDFDDQPSDHAAPADALPSETNVPDSGSINKSTIGTLSEENEDAFPRGVHWSVKPSILRACNNVNLVGNRRDDGIEATTSFPDDPRTQDSAIFGDYVTPETGADEGRVDMETLDIVQEEGTTSSYVQHTGKLQPKPRLLETVVEEPEPHYSAGDTGYFPMGTNESEFMANVESRNGFSTYEDLQEEELNIPEAPRETVGEMEAQNASGGWEQEEQGVSPCINNTVTGEEENCMGNTVEEQSKRESKTGKSKRATSRKRKKTSEEPNKSSEKTEQKKFKHSSRRQKRTLEKELLETPDHEIRSLPLRDMLRLVEYKEWMQKKEAKGAGVQPSQESNNMNGSGSQYHSQGFDEEDEFGDFGIESSEYQENNVVKPDSPVNYQTYMNKTSRTRWSKEDTELFYEGIQEFGSNLSMIQQLFPERTREQMKLKFKLEERRNPLKLNDALSSRSKHFTHFKNVIKKLQQEAAAAKEGEEEEEAGAEAETTDVPENEEPEKSEETERASDGVAAGVKESDGGDVENGVRSDGGDECDDDEDFWNSYKSDM

SEQ ID NO: 629 - protein, 351 aa, Arabidopsis thaliana
  Clone ID: AT_F21E1.C1.p20.tg
MPPETFIGRGVSSGGAAKHDSDRCFKIGRKQKLVTPYGMPVPKSPLYQPKDIVWVALTGIFISCQNKRTWEQPWSDDAVSTAPGESSENTSGSSFEKKSKKPKSSVSSSHLCFSSRQSADDANSPSPKDVSNKTPKDVTHGSNKDVSNKTSKDVITHGSNKTRPAIPIGPRFQAEIPVWIAPTKKGKFYGSPGDSNTLRWLGTGVWPTYSLKKTVHSKKVGEGRSDSCSCASPRSTNCIKRHKKEAQELLEKEINRAFSTWEFDQMGEEIVLKSWTAKEERRFEALVKKNPLSSSDGFWEFASNAFPQKSKKDLLSYYYNVFLIKRMRLLKSSAANNIDSDDDHYDDFLAG

SEQ ID NO: 630 - protein, 567 aa, Arabidopsis thaliana
  Clone ID: AT_F21M12.C1.p10.tg
MVANNNTSSNRRKRIITEGDIATLLLRYDMETILRMLQEISYCSETKMDWNALVKKTTTGITNAREYQLLWRHLSYRHPLLPVEDDALPLDDDSDMECELEASPAVSHEASVEAIAHVKVMAASYVLSESDILDDSTVEAPLTINIPYALPEGSQEPSESPWSSRGMNINFPVCLQKVTSTEGMNGNGSAGISMAFRRKRKRWSAEEDEELFAAVKRCGEGNWAHIVKGDFRGERTASQLSQTAFYAGLMPTTSSCTITETEANGGSSSQGQQQSKPIVQALPRAGTSLPAAKSRVVKKTTASSTSRSDLMVTANSVAAAACMGDVLTAASGRKVEPGKTDAPRVPKTKPVKHASTVCMPQPSGSLSMPKVEPGTSVAASIRSLANGKLKPVMASSSSNKPPLIAPRSEGSSMLSASAPLASLSRIVSNQRVFAGSVPATEIVTCKPDGGQKGQARGNEASSSAAIQPHQITSRNLEISQGKQATQAQSPNLLPRKVPVVRTAVHCATNQKLMDKPSDQTVVPIRGAGSQSKAKGEVNSKVGPVIKVSSVCGKPLEVATVAGTGQGV

SEQ ID NO: 631 - protein, 1841 aa, Arabidopsis thaliana
  Clone ID: AT_K7P8.C1.p15.tg
MHGSVSGYLLVNAEVDSMGGVIDSGGGIGVKTSPRRTAIEKAQAELRTYDDKPLLFYLLQGGNPLDFKFGIATSHSVQSTSLTDQQAEHFVNSEVKDSFALTASPHGDSVESSGRPGVPTISEPNTADNLLLFDSENKSVEGERNLRHPNRQNRTSESERSSKAHTNQNTKETEDSAIFRPYARRNRSKISRDPARSSSTDLVQNRGGLATSISIRRGSVEGKGCIPEAANQKDMHTTSVSCPVFANSNGNIVPKNRVSSNSLNTKVDGEPVVRESTAGSKTSLLKDEADISYSKSSAYLPVGESGLAGEKAQLVSTGGSPKAATIAGQKNSSTQLNGLRDSTVEEESLTNRGATGTNGLESESSHANNVEVNVDNERDLYKVDKLDSDEISMQKTLRVEGLLDQTVGEMTKTKIEDETGQSTTIISECIPECEMQMKSVKIENQSHRSTAEMQTKEKSSETEKRLQDGLVVLENDSKVGSILSENPSSTLCSGIPQASVDTSSCTVGNSLLSGTDIEALKHQPSSDAVMLDTVKEDAILEEARIIQAKKKRIAELSCGTAPVEVREKSQWDFVLEEMAWLANDFAQERLWKMTAATQICHRVALTCQLRFEERNQHRKLKKIASVLSYAILQFWSSVEAEVPGELEETSLGIVKETCQESNCLNGIRCLAAGVKEYASRFLKYNNSSISYHSAALSTPDNMCDPEILDISMVDQLTEASLFYSVPSGAMEVYLKSIESHLTRCEKSGSSMQEEVDTSAYDTAGDIGYNVTAFDEDEGETSTYYLPGAFESSRSFNISHKKRKNLMKSHSARSYDLGDDLPYVNNTGGSNSSSLIVKRPDSNINAGSVPTRRVRTASRHRVVSPFGCATTGNLPVPSKTDASSGDTSSFQDEYSSLHGGSAVQKGTEVESSVNFEKLLPYDMAETSGKPKKKKKTHQGSAYDQTWHLNPSVHVEQKDHWKKRPENNFDMNGLYGPHSAKKQKTTKQLVENNFDMAIPHTGSIPSPAASQMSNMSNPNKSIKFIGGRDRGRKIKGLKISPGQHGSGNPWSLFEDQALVVLVHDMGPNWELISDAMNSTLKIKYIYRNPTECKDRHKILMDKTAGDGADSAEDSGNSQSYPSTLPGIPKGSARQLFQRLQGPMEEDTLKSHFEKICLIGKKLHYRKTQGTPVLPTSGAHPSTPGSSGVVLSNNLPTTSGLQSASVRDGRFNVPRGSLPLDEQHRLQQFNQTLSGRNLQQPSLSTPAAVSGSDRGHRMVPGGNAMGVSGMNRNTPMSRPGFQGMASAAMPNTGNMHTSGMVGIPNTGNIHSGGGASQGNSMIRPREAVQHMMRMQAAQGNSPGIPAFSNLSSGFTNQTTPVQAYPGHLSQQHQMSPQSHVLGNSHHPHLQSPSQATGAQQEAFAIRQRQIHQRYLQQQQQQFPASGSMMPHVQQPQGSSVSSSSQNSPQTQPPVSPQPLSMPPVSPSPNINAMAQQKPQKSQLALHGLGRSPQSGTSGVNNQAGKQRQRQLQQSARQHPHQRQPTQGQQLNKQLKGMGRGNMIHQNITVDQSHLNGLTMPQGNQATEKGEIAVSVRPDQQSSVGTTTSTDLQSKPFVSPLSSNHSQQLPKSFPGALSPSPQQQMQLHSDNSIQGQSSPATPCNILSTSSLSIAPAVAPSNHQHLLIHQKQRNQVQSTAQRVVQHNHLGNSELSKKSQAECMPRVPQSVTNTTQTASMGTTKGMPQASNDLKNIKAVGSTAVPALEPPSCVASVQSTASKVVNNSNTDSAGNDPVSTPNQGLAQKHGIKGVTQRQQQSLPSEEKRPKLPEKPTVQNQKHLASEEQPHLEEAQELSSSKPPDTKVE

SEQ ID NO: 632 - protein, 1843 aa, Arabidopsis thaliana
  Clone ID: AT_K7P8.C1.p16.tg
MHGSVSGYLLVNAEVDSMGGVIDSGGGIGVKTSPRRTAIEKAQAELRTYDDKPLLFYLLQGGNPLDFKFGIATSHSVQSTSLTDQQAEHFVNSEVKDSFALTASPHGDSVESSGRPGVPTISEPNTADNLLLFDSENKSVEGERNLRHPNRQNRTSESERSSKAHTNQNTKETEDSAIFRPYARRNRSKISRDPARSSSTDLVQNRGGLATSISIRRGSVEGKGCIPEAANQKDMHTTSVSCPVFANSNGNIVPKNRVSSNSLNTKVDGEPVVRESTAGSKTSLLKDEADISYSKSSAYLPVGESGLAGEKAQLVSTGGSPKAATIAGQKNSSTQLNGLRDSTVEEESLTNRGATGTNGLESESSHANNVEVNVDNERDLYKVDKLDSDEISMQKTLRVEGLLDQTVGEMTKTKIEDETGQSTTIISECIPECEMQMKSVKIENQSHRSTAEMQTKEKSSETEKRLQDGLVVLENDSKVGSILSENPSSTLCSGIPQASVDTSSCTVGNSLLSGTDIEALKHQPSSDAVMLDTVKEDAILEEARIIQAKKKRIAELSCGTAPVEVREKSQWDFVLEEMAWLANDFAQERLWKMTAAAQICHRVALTCQLRFEERNQHRKLKKIASVLSNAILQFWSSVEAEVPGELEETSLGIVKETCQESNCLNGRRCLAAGVKEYASRFLKYNNSSISYHSAAPSTPDNMCDPEILDISMVDQLTEASLFYSVPSGAMEVYLKSIESHLTRCEKSGSSMQEEVDTSAYDTAGDIGYNVTAFDEDEGETSTYYLPGAFESSRSFNISHKKRKNLMKSHSARSYDLGDDLPYVNNTGGSNSSSLMAKRPDSNINAGSVPTRRVRTASRQRVVSPFGCATTGNLPVPSKTDASSGDTSSFQDEYSSLHGGSAVQKGTEVESSVNFEKLLPYDMAETSGRPKKKKKTHQGSAYDQTWHLDPSVHVEQKDHWKKRPENNFDMNGLYGPHSAKKQKTTKQLVENNFDMAIPHTGSIPSPAASQMSNMSNPNKSIKFIGGRDRGRKIKGLKISPGQHGSGNPWSLFEDQALVVLVHDMGPNWELISDAMNSTLKIKCIYRNPTECKDRHKILMDKTAGDGADSAEDSGNSQSYPSTLPGIPKGSARQLFQRLQGPMEEDTLKSHFEKICLIGKKLHYRKTQGTPVLPTSGAHPSTPGSSGVVLSNNLPTTSGLQSASVRDGRFNVPRGSLPLDEQHRLQQFNQTLSGRNLQQPSLSTPAAVSGSDRGHRMVPGGNAMGVSGMNRNTPMSRPGFQGMASSAMPNTGSMLSSGMVEIPNTGNIHSGGGASQGNSMIRPREAVQHMMRMQAAQGNSPGIPAFSNLSSGFTNQTTPVQAYPGHLSQQHQMSPQSHVLGNSHHPHLQSPSQATGAQQEAFAIRQRQIHQRYLQQQQQQQQFPASGSMMPHVQQPQGSSVSSSPQNSPQTQPPVSPQPLSMPPVSPSPNINAMAQQKPQKSQLALHGLGRSPQSGTSGVNNQAGKQRQRQLQQSARQHPHQRQPTQGQQLNKQLKGMGRGNMIHQNITVDQSHLNGLTMPQGNQATEKGEIAVPVRPDQQSSVGTTTSTNLQSKPFVSPLSSNHSQQLPKSFPGALPPSPQQQMQLHSDNSIQGQSSPATPCNILSTSSPSIAPAVAPSNHQHLLIHQKQRNQVQSTAQRVVQHNHLGNSELSKKSQAERMPRVPQSVTNTTQTVSMGTTKGMPQASNDLKNIKAVGSTAVPALEPPSCVASVQITASKVVNSSNTDSAGNDPVSTPNQGLAQKHGIKGVTQRQQQSLPSEEKRPKLPEKPTVQNQKHLASEEQPHLEEAQELSSSKPPDTKVE

SEQ ID NO: 633 - protein, 390 aa, Arabidopsis thaliana
  Clone ID: AT_F4H5.C1.p3.tg
MALSQWKEAILEGIFMEIEDGIVEEKNLERLENLVEILHKEGSKVPKSVTEAYCKVAVECTVKCLAYEKDAKKAYTEAIKTIWLGRIMPLCDKVSCLVTLDLLKCCRRLWKAHTDDKACKTLMDEDTRDKALVCLRKVVLDLNPNLVLENLNMDESDEIESSEESEETESMVEAREGVGNQNSQASEAMEEDDQESLLDTELERPTSGGSKAVYVPSQFNPIPSAVVDRALRKLRASKIELMKALEKGRPSNLNNETITEQENDVANPSATNAAPRPSLMEPRSTAHTYEWNDSIDDSDGEMGDDIERINKSKRKRIVVSPLKRNRCSEGARRPKLPWSTAETLAVLKGYEKYGANWKRIKDENPVLVRRTNGDIKDKFRVEMRREERRH

SEQ ID NO: 634 - protein, 1055 aa, Arabidopsis thaliana
  Clone ID: AT_F22F7.C1.p18.tg
MAPVRKSRSVNKRFTNETSPRKDAGKSKKNKLRKKKLSDKLGPQWTRLELERFYDAYRKHGQEWRRVAAAIRNSRSVDMVEALFNMNRAYLSLPEGTASVAGLIAMMTDHYSVMEGSGSEGEGHDASEVPRKQQKRKRAKPQRSDSPEEVDIQQSIGSPDGCLTFLKQARANVHVGTQRHATGKRTPRVPVQTSFMRDDREGSTPPNKRARKQFDANDDVAHFLALALTDASRRGGSPKVSESPNRRTELSDSSPIKSWGKMSRTRKSQSKHCGSSIFEEWMESSRERKLDSDKDTTLLMDMERAGEMEAPRKGKRVYKKRVKVEEAECNDSDDNGEACSATQGLRSKSQRRKAAIEASREKYSPRSPKKRDDKHTSGAFDALQALAELSASMLPANLMESELSAQLKEERTEYDMDEKSSTPEATSTSSHGEKANVEPDDSLLHAISSVENANKRKSKPSRLVSTDCDDVPTGKLQPQTSGSLRKRKPKVLGDEAPAEFSQNKSINKKELPQDENNMKSLVKTKRAGQVPAQSKQMKTVKALEESAITSDKKRPGMDIVASPKQVSDSGPTSLSQKPPNRRKKSLQKSLQEKAKSSETTHKAARSSRSLSEQELLLKDKLATSLSFPFARRRCIFEWFYSAIDHPWFSKMEFVDYLNHVGLGHIPRLTRLEWSVIKSSLGRPRRFSERFLHEEREKLKQYRESVRKHYTELRTGAREGLPTDLARPLAVGNRVIAIHPKTREIHDGKILTVDHNKCNVLFDDLGVELVMDIDCMPLNPLEYMPEGLRRQIDKCLSMKKEAQLSGNTNLGVSVLFPPCGLENVSFSMNPPLNQGDMIAPILHGKVSSNTSSPRQTNHSYITTYNKAKEAEIQRAQALQHALDEKEMEPEMLEIVKGSKTRAQAMVDAAIKAASSVKEGEDVNTMIQEALELVGKNQLLRSSMVKHHEHVNGSIEHHHNPSPSNGSEPVANNDLNSQDGSEKNAQMPSELITSCVATWLMIQMCTERQYPPADVAQLIDAAVTSLQPRCPQNLPIYREIQTCMGRIKTQIMSLVPT

SEQ ID NO: 635 - protein, 232 aa, Arabidopsis thaliana
  Clone ID: AT_F7P1.C1.p70.tg
MDSYTSGFMDLLQSQQESYNNENNPQLSDEDHEDVNTPKVAIPKKKWSAKEDVILISAWLNTSKDPVVGNEQKAPAFWKRIATYVAASPDLVGFPKRESAQCKQRWAKMNELVMKFVGCYATETNQKASGQTENDVMLFANELFENDMKKKFSLDHAWRLVRHEQKWIISNTPKEKRMSKRRKVGSQAKSSQPINLEDYDVMARPLRVKVPKAKTKKIPNVKKKKKLIQCDI

SEQ ID NO: 636 - protein, 217 aa, Arabidopsis thaliana
  Clone ID: AT_F21O3.C1.p28.tg
MAASANPSGNNQEGSSATQKVSSSSAAAANGAAVNSVDNGGNTGAAADNSQTIGALRHNPGISTDWTLEEQSLLEDLLVKYATEPSVFRYAKIAMKMKDKTVRDVALRCRWMTNQLTVFHLHVVADGLQKKENGKRRKEDHSSRKSKDKKEKATDSSAKSSSHLNVHPNGPSYAPPMMPIDTDDGISYKAIGGVSGDLLEQNAQMFNQLSTNFSAFQ

SEQ ID NO: 637 - protein, 101 aa, Arabidopsis thaliana
  Clone ID: AT_F2G1.C1.p8.tg
MASGSMSSYGSGSWTVKQNKAFERALAVYDQDTPDRWHNVARAVGGKTPEEAKRQYDLLVRDIESIENGHVPFPDYKTTTGNSNRGRLRDEEKRMRSMKLQ

SEQ ID NO: 638 - protein, 512 aa, Arabidopsis thaliana
  Clone ID: AT_F4P12.C1.p140.tg
MTRRKSTVVLPQPIRRSARLISLQNRDSQVKPRKDLGFGSEPTKKTRREVLRGLSKRLVYSSDSPIEDSRSKKLNISKDGFPSLRRSLRLSSRECPEVNKEKPKTASTSSSRTKSSTTVSSSCALRRSPRFSSGGGESVDQSSSSIGKKSGNSVLSSCSTKSISSEKVKGGDGLKSKDRSRSRVRPKTKKMFSGCDDNEEEEEEVSVCLTERKRMRIAKPNEEENAEAKADEVKRKGKEEEEEEDEEEGLKAKNKLEKGGWTEELELALQGAYLTVKPSPNFWKKVAKMVPGKSAQECFDRVNSALITPRQAQPRRATKTILSTIPQFSLSASKLLKPNSPKTKIRQRRNNLSKKVVRHLLEKQNHMDQGLGFDLFSVLEPNTTSNFLSTPMEKGRSLPKILESPVPCSSKDPTTLVSPPVLKQVKNKALHEKYIDHLHIRDAKRKAESTRLAGKENIRPIEIQKKDSVRAAKDALFFDVQDAIQKLKGLEAENSSSSSEFCYDHVETDEED

SEQ ID NO: 639 - protein, 493 aa, Arabidopsis thaliana
  Clone ID: AT_T1K7.C1.p5.tg
MGFKRPFEDEKFHELPLKHSRQLDYNDKSTQFEEVSPHHAGFQKTVATVNEGNLCKSQGGESSEGDMFDEESNYVYPGHDMDDTFTWDTQGCGGRDATYSPHSGKYFELDIPPRVFAPVETFYYLLLDQRAKKQVPIGPGHQAEIPEWEGSQTGNIETSGMSVQNHISGCADGEKLFGTSVIPMPGLTTVAHIDDIVGKGRKFCVCRDRDSVRCVCQHIKEAREELVKTFGNETFKELGLCEMGEKGALKWSDEDAQLFHEVVYSNPVTLGQNFWRHLEAAFCSRTQKEIVSFYFNVFVLRRRAIQNRAFILDIDSDDDEWHGCYGGSSGTRYVEEDEEDSAIESPLHQGTKKVYPLHHEEGEEDVSHSSNDEDDDDTKEGGTGLYDEHKMSSTVEYMDRFSGNNGERLNVEDDSCTSFELARNAVNCAEKDETVPGEQQKKLKDCNDPIDTKVWDASRCLNVPTNGKDLQPTRRIMEEIFGNGCWENKARNK

SEQ ID NO: 640 - protein, 1239 aa, Arabidopsis thaliana
  Clone ID: AT_F1N19.C1.p13.tg
MKSLDQVETLISGPPSEPSSPNRDLDKDEEEEEECEYDDEEEDVDFNPFLKDSPSREASSSLSSEVETLDGEIVNSITTVPQTLEGRQGKEDIAMPSNDVSCQEPPIPDERTVGAANENGEQLVIQTQKQDLMSTEEDDAICKRTRARYSLASFTLDDLEAFLQETDDEDDIPNVDDEEEYRKFLAAVLHSGDTEVPLAQTGTNDDDDDDDEDNDLDFEIELEEALETDDEEIIPEKVTTGDNISTKRRPVTRQKRRQNISIHHKNNSPEQAGRLLRPLVPILPIAPPGRRVSATEAVASSENRTINGFTQAQMGELHSLIHDHLQLLIQVYSLCALDHSRQSIGTHVQGLLSEMLKQHQGYISRRSHLLVTGSASSVLDVVGLAGRYLVDVSDAVQDYRRCQVESGFDTSSQRVPLFTLPHQEVGGEIVNYPLSSPSSSKSPSGQQQAKKTLAATLVESAQKQSVALVHKDIAKLAKRFMPLFKVSLYPHKPPHAAVANRVLFTDAEDELLALGIMEYNSDWKAIKQRFLPSKGEHQIYVRQKNRRSSKAPENPIKAVLRMKSSPLTPQEILRIQEGLKYFKYDWTSVWKFVVPYRDPSLLPRQWRTALGIQKSYKLDAVKKEKRRLYDTNRKFREQQASAKEDRYGASKANEYHVGGELVESSGEAYLHEGFLADWRPGMPTFFSSAPMHSFDKAKDVPGDRHESVQTCIVEGSKNPELCGAQILTCTQRLAPSFIPMYRHTSGTAPGASKAPIIARPYRSRKVFNRSVVRLAPDLPPVNLPSSVRVISQSVFAKNQSETSSKTCIINGGMSDVSGRGNFGIETPCFSADRDNNGPPSEKVVDLQEDVPAESSSGMDKQSNDSDLQMHPLLFRTPEHGQITCYPANRDPGGSSFSFFSENRPQLLSLFNSPKQINHSADQLHRNSSSNEYETAQGDICFHPLLQRTEYETSYVISRRGNLDPDIGKKDKLCQLQDTSGAVEKTAIPVTGRNDVSLEPFSSSTPGKNVNLDIYLSTSSSKVNNGGSVSAANISEAPDICMAQLNDGSEVPGSAPPSDNISRCIEEMADQSNLGIVMEQEELSDSDDEMMEEEHVEFECEEMADSEGEEGSECEENIEMQDKDNRNSVVEITSTDVDSGKELGKDSPNSPWLSLDPSSRRLSSNVKDREKIEATNETTISQFGPSRSRKKGTPVKSRDAESKEEAGVARLRLGPLALPPMKKPRKCGGQAETSPSIETT

SEQ ID NO: 641 - protein, 451 aa, Arabidopsis thaliana
  Clone ID: AT_F16A14.C1.p25.tg
PLPNFLRISAQIPSFFQIDLQIYCFLRMGFKRTFDAEDVQELNVKNGRQISYCNKLAKLDEGVPYRLSLEKPGVVGYDISDLYGYKCEDNVDKGFETNAPFSWITTGLSEEDSQSGATIQSTISHESPESDIPWRPVCSGEEDGYWCPISPRKTVPIGSDYQADIPECVKEEANDQSGQGVGYDEEQVTGKCVIPMPDCETEVCKIGKGRKECICLDKGSIRCVQQHIMENREDLFATIGYDRCLDIGLCEMGEEVAARLTEDEEDLFHEIVYSNPVSMDRDFWKHLKSAFPSRTMKEIVSYYFNVFILRRRAIQNRSKSLDVDSDDDEWQVEYDNTFYGAETPSDDKAEKSLSRDEGEEVNANEDSYMSFENQSNAIYSRCPVRNREESNIGNYWRHCNDLVDQSYSFDPCDSILPDHCWTKNIDLLPTSNIIDEIFGQDHPWDDFSRGK

SEQ ID NO: 642 - protein, 1039 aa, Arabidopsis thaliana
  Clone ID: AT_F24P17.C1.p13.tg
MARNSNSDEAFSSEEEEERVKDNEEEDEEELEAVARSSGSDDDEVAAADESPVSDGEAAPVEDDYEDEEDEEKAEISKREKARLKEMQKLKKQKIQEMLESQNASIDADMNNKGKGRLKYLLQQTELFAHFAKSDGSSSQKKAKGRGRHASKITEEEEDEEYLKEEEDGLTGSGNTRLLTQPSCIQGKMRDYQLAGLNWLIRLYENGINGILADEMGLGKTLQTISLLAYLHEYRGINGPHMVVAPKSTLGNWMNEIRRFCPVLRAVKFLGNPEERRHIREDLLVAGKFDICVTSFEMAIKEKTALRRFSWRYIIIDEAHRIKNENSLLSKTMRLFSTNYRLLITGTPLQNNLHELWALLNFLLPEIFSSAETFDEWFQISGENDQQEVVQQLHKVLRPFLLRRLKSDVEKGLPPKKETILKVGMSQMQKQYYKALLQKDLEAVNAGGERKRLLNIAMQLRKCCNHPYLFQGAEPGPPYTTGDHLITNAGKMVLLDKLLPKLKERDSRVLIFSQMTRLLDILEDYLMYRGYLYCRIDGNTGGDERDASIEAYNKPGSEKFVFLLSTRAGGLGINLATADVVILYDSDWNPQVDLQAQDRAAIEEKVIERAYKKLALDALVIQQGRLAEQKSKSVNKDELLQMVRYGAEMVFSSKDSTITDEDIDRIIAKGEEATAELDAKMKKFTEDAIQFKMDDSADFYDFDDDNKDENKLDFKKIVSDNWNDPPKRERKRNYSESEYFKQTLRQGAPAKPKEPRIPRMPQLHDFQFFNIQRLTELYEKEVRYLMQTHQKNQLKDTIDVEEPEGGDPLTTEEVEEKEGLLEEGFSTWSRRDFNTFLRACEKYGRNDIKSIASEMEGKTEEEVERYAKVFKERYKELNDYDRIIKNIERGEARISRKDEIMKAIGKKLDRYRNPWLELKIQYGQNKGKLYNEECDRFMICMIHKLGYGNWDELKAAFRTSSVFRFDWFVKSRTSQELARRCDTLIRLIEKENQEFDERERQARKEKKLAKSATPSKRPLGRQASESPSSTKKRKHLSMR

SEQ ID NO: 643 - protein, 85 aa, Arabidopsis thaliana
  Clone ID: AT_C7A10.C1.p790.tg
MASNSMSSSASWTRKENKLFERALATYDQDTPDRWHNVARAVGGKSAEENITTIIHKKAFINNRHALSSFLCVSSCFTRPEKKKI

SEQ ID NO: 644 - protein, 873 aa, Arabidopsis thaliana
  Clone ID: AT_F16M22.C1.p4.tg
MVDNSNNKKRKEFISEADIATLLQRYDTVTILKLLQEMAYYAEAKMNWNELVKKTSTGITSAREYQLLWRHLAYRDSLVPVGNNARVLDDDSDMECELEASPGVSVDVVTEAVAHVKVMAASYVPSESDIPEDSTVEAPLTINIPYSLHRGPQEPSDSYWSSRGMNITFPVFLPKAAEGHNGNGLASSLAPRKRRKKWSAEEDEELIAAVKRHGEGSWALISKEEFEGERTASQLSQVYFLVSSVKKDIWGQHCMGICDAVYLAYICNLAEFTYLQRWGAIRRRTDTSNTSTQTGLQRTEAQMAANRALSLAVGNRLPSKKLAVGMTPMLSSGTIKGAQANGASSGSTLQGQQQPQPQIQALSRATTSVPVAKSRVPVKKTTGNSTSRADLMVTANSVAAAACMSGLATAVTVPKIEPGKNAVSALVPKTEPVKTASTVSMPRPSGISSALNTEPVKTAVAASLPRSSGIISAPKVEPVKTAASAASLPRPSGMISAPKVEPVKTTASVASLPRPSGIISAPKAEPVKTAASAASSPRPSGMISAPKVESVKTTASMPRPSGIISAPKAELVKSAASAASLPCTSGIISSPKAELVKSAASAASFPRPSSMLSAPKADPVKIVPAAATNTKSVGPLNLRHAVNGSPNHTIPSSPFTKPLHMAPLSKGSTIQSNSVPPSFASSRLVPTQRAPAATVVTPQKPSVVAAATVVTPQKPSVGAAATVVTPQKPSVGAAANVVTPQKPSVGSAATVVTPQKPSVGAAVTVTSKPVGVQKEQTQGNRASPLVTATLPPNKTIPANSVIGTAKAVAAKVETPPSLMPKKNEVVGSCTDKSSLDKPPEKESTTTVSPLAVAATKSKPKDEATVTGTGLKEL

SEQ ID NO: 645 - protein, 548 aa, Arabidopsis thaliana
  Clone ID: AT_F17A17.C1.p8.tg
MGRSKLASRPAEEDLNPGKSKRKKISLGPENAAASISTGIEAGNERKPGLYCCNYCDKDLSGLVRFKCAVCMDFDLCVECFSVGVELNRHKNSHPYRVMDNLSFSLVTSDWNADEEILLLEAIATYGFGNWKEVADHVGSKTTTECIKHFNSAYMQSPCFPLPDLSHTIGKSKDELLAMSKDSAVKTEIPAFVRLSPKEELPVSAEIKHEASGKVNEIDPPLSALAGVKKKGNVPQAKDIIKLEAAKQQSDRSVGEKKLRLPGEKVPLVTELYGYNLKREEFEIEHDNDAEQLLADMEFKDSDTDAEREQKLQVLRIYSKRLDERKRRKEFVLERNLLYPDQYEMSLSAEERKIYKSCKVFARFQSKEEHKELIKKVIEEHQILRRIEDLQEARTAGCRTTSDANRFIEEKRKKEAEESMLLRLNHGAPGSIAGKTLKSPRGLPRNLHPFGSDSLPKVTPPRIYSGLDTWDVDGLLGADLLSETEKKMCNETRILPVHYLKMLDILTREIKKGQIKKKSDAYSFFKVEPSKVDRVYDMLVHKGIGDST

SEQ ID NO: 646 - protein, 243 aa, Arabidopsis thaliana
  Clone ID: AT_T9L24.C1.p18.tg
MIMCSRGHWRPAEDEKLKDLVEQYGPHNWNAIALKLPGRSGKSCRLRWFNQLDPRINRNPFTEEEEERLLAAHRIHGNRWSIIARLFPGRTDNAVKNHWHVIMARRTRQTSKPRLLPSTTSSSSLMASEQIMMSSGGYNHNYSSDDRKKIFPADFINFPYKFSHINHLHFLKEFFTGKIALNHKANQSKKPMEFYNFLQVNTDSNKSEIIDQDSGQSKRSDSDTKHESHVPFFDFLSVGNSAS

SEQ ID NO: 647 - protein, 663 aa, Arabidopsis thaliana
  Clone ID: AT_F24K9.C1.p12.tg
MLNHCDRNQGGYSLGVRCSSYKLFIMPSRRSESAIRLITYSEELVDGKPFFAFSNCLPVKALNREPAGHAFHSAALKLHGCAEEPTDDEGGDKKVGDDKEKEYVPSFNSYANKGKKKSGTQQQDHYALLGLSNLRYLATEDQIRKSYREAALKHHPDKLAKAKEAKKDEIESRFKAIQEAYEVLMDPTRRRIFDSTDEFDDEVPSDCLPQDFFKVFGPAFKRNARWSVNQRIPDLGDENTPLKDVDKFYNFWYAFKSWREFPDEEEHDLEQADSREERRWMEKENAKKTVKARKEEHARIRTLVDNAYRKDPRIVKRKEEEKAEKQQKKDAKIQAKKKQEEDAAIAAEEEKRRKEEEEKRAAESAQQQKKTKEREKKLLRKERNRLRTLSAPLVAQRLLDISEEDIENLCMSLNTEQLQNLCDKMGNKEGLELAKVIKDGCNSSRNDEAESKEKVSKKTNGGTEPTTRVSQLDSSTQKKQPWSKEEIDMLRKGMIKYPKGTSRRWEVISEYIGTGRSVEEILKATKTVLLQKPDSAKAFDSFLEKRKPSASITSPLSTREELGESLPTMTTTTNAKPSKETVVGKSSSSQSSDNNGEVGGSSDADSWSTVQERALVQALKTFPKETSQRWERVAAAVPGKTMNQCKKKFAELKEIIRNKKTGV

SEQ ID NO: 648 - protein, 277 aa, Arabidopsis thaliana
  Clone ID: AT_MJJ3.C1.p20.tg
METLHPLLSHVPTSDHRFVVQEMMCLQSSSWTKEENKKFERALAVYADDTPDRWFKVAAMIPGKTISDVMRQYSKLEEDLFDIEAGLVPIPGYRSVTPCGFDQVVSPRDFDAYRKLPNGARGFDQDRRKGVPWTEEEHRRFLLGLLKYGKGDWRNISRNFVGSKTPTQVASHAQKYYQRQLSGAKDKRRPSIHDITTVNLLNANLSRPSSDHGCLVSKQAEPKLGFTDRDNAEEGVMFLGQNLSSVFSSYDPAIKFSGANVYGEGGYCISQDLETRK

SEQ ID NO: 649 - protein, 374 aa, Arabidopsis thaliana
  Clone ID: AT_MPA24.C1.p14.tg
MGRAPCCDKANVKKGPWSPEEDAKLKDYIENSGTGGNWIALPQKIGLRRCGKSCRLRWLNYLRPNIKHGGFSEEEDNIICNLYVTIGSRWSIIAAQLPGRTDNDIKNYWNTRLKKKLLNKQRKEFQEARMKQEMVMMKRQQQGQGQGQSNGSTDLYLNNMFGSSPWPLLPQLPPPHHQIPLGMMEPTSCNYYQTTPSCNLEQKPLITLKNMVKIEEEQERTNPDHHHQDSVTNPFDFSFSQLLLDPNYYLGSGGGGEGDFAIMSSSTNSPLPNTSSDQHPSQQQEILQWFGSSNFQTEAINDMFINNNNNIVNLETIENTKVYGDASVAGAAVRAALGGGTTSTSADQSTISWEDITSLVNSEDASYFNAPNHV

SEQ ID NO: 650 - protein, 358 aa, Arabidopsis thaliana
  Clone ID: AT_MDC16.C1.p1.tg
MGHHSCCNKQKVKRGLWSPEEDEKLINYINSYGHGCWSSVPKHAGLQRCGKSCRLRWINYLRPDLKRGSFSPQEAALIIELHSILGNRWAQIAKHLPGRTDNEVKNFWNSSIKKKLMSHHHHGHHHHHLSSMASLLTNLPYHNGFNPTTVDDESSRFMSNIITNTNPNFITPSHLSLPSPHVMTPLMFPTSREGDFKFLTTNNPNQSHHHDNNHYNNLDILSPTPTINNHHQPSLSSCPHDNNLQWPALPDFPASTISGFQETLQDYDDANKLNVFVTPFNDNAKKLLCGEVLEGKVLSSSSPISQDHGLFLPTTYNFQMTSTSDHQHHHRVDSYINHMIIPSSSSSSPISCGQYVIT

SEQ ID NO: 651 - protein, 307 aa, Arabidopsis thaliana
  Clone ID: AT_F14D16.C1.p6.tg
MVRSCSSKSKNPWTNEEDTTQKFVFASASKNGCAAPKKIGLRRCGKSCRVRKTDHSGTKHESFTSEDEDLIIKMHAAMGSRWQLIAQHLPGKTEEEVKMFWNTKLKKKLSEMGIDHVTHRPFSHVLAEYGNINGGGNLNPNPSNQAGSLGRNHSLNDDGHQQQPNDSGDLMFHLQAIKLMTDSSNQVKPESTFVYASSSSSNSSPPLFSSTCSTIAQENSEVNFTWSDFLLDQETFHENQQNHPQELDSLFGNDFSEVTAATMANTSTVPSQIEEESLSNGFVESIIAKEKEFFLGFPSYLEQPFHF

SEQ ID NO: 652 - protein, 346 aa, Arabidopsis thaliana
  Clone ID: AT_F15H18.C1.p7.tg
MAAEDRSEELSSNVENGSCNSNEGINPETSSHWIENVVKVRKPYTVTKQREKWSEEEHDRFLEAIKLYGRGWRQIQEHIGTKTAVQIRSHAQKFFSKMAQEADSRSEGSVKAIVIPPPRPKRKPAHPYPRKSPVPYTQSPPPNLSAMEKGTKSPTSVLSSFGSEDQVNRCSSPNSCTSDIQSIGATSIDKKNNYTTSKQPFKDDSDIGSTPISSITLFGKIVLVAEESHKPSSYNDDDLKQMTCQENHYSGMLVDTNLSLGVWETFCTGSNAFGSVTEASENLEKSAEPISSSWKRLSSLEKQGSCNPVNASGFRPYKRCLSEREVTSSLTLVASDEKKSQRARIC

SEQ ID NO: 653 - protein, 1677 aa, Arabidopsis thaliana
  Clone ID: AT_T25B15.C1.p20.tg
MPQDHASWDRKELLRQRKHDRPEQSFESPPFRWRDSPSSHHVPREFSSRLGSGDFRRPSSLTQLLRLIGSELMRLLFKGAIFNTQGGRHQFVEETSHGYTSSRSSARMFDNYRPSASRGDWRYTRNCRDDRVSVSQKEWKCNTWEMSNGSSRSFERPFGIRNGRRSVDERPLHASDTHSTVVNSLDPANSAHYLDNEISTPVRSLKIKNEHKFSDQRLSLPSDPHSECISLFERPSSENNYGNKVCSPAKQCNDLMYGRRLVSDNSLDAPIPNAELEGTWEQLRLKDPQDNNSLHGINDIDGDRKCAKESSLGATGKLPLWNSSGSFASQSSGFSHSSSLKSLGAVDSSDRKIEVLPKIVTVTQSSSGDATACATTTHLSEEMSSRKKQRLGWGEGLAKYEKKKVDVNPNEDGTTLMENGLEELHSLNKNIADKSPTAAIVPDYGSPTTPSSVACSSSPGFADKSSPKAAIAASDVSNMCRSPSPVSSIHLERFPINIEELDNISMERFGCLLNELLGTDDSGTGDSSSVQLTSMNTLLAWKGEILKAVEMTESEIDLLENKHRTLKLEGRRHSRVVGPSSYCCDGDANVPKEQASCSLDPKATASSVAKTLVRAPVHQAGLAKVPADVFEDSPGEVKPLSQSFATVEREEDILPIPSMKAAVSSKEINTPAFANQETIEVSSADDSMASKEDLFWAKLLSANKKYACESSGVFNQLLPRDFNSSDNSRFPGICQTQFDSHVQEKIADRVGLLRAREKILLLQFKAFQLSWKKDLDQLALAKYQSKSSKKTELYPNAKNGGYLKLPQSVRLRFSSSAPRRDSVVPTTELVSYMEKLLPGTHLKPFRDILKMPAMILDEKERVMSRFISSNGLIEDPCDVEKERTMINPWTSEEKEIFLNLLAMHGKDFKKIASSLTQKTTADCIDYYYKNHKSDCFGKIKKQRAYGKEGKHTYMLAPRKKWKREMGAASLDILGDVSIIAANAGKVASTRPISSKKITLRGCSSANSLQHDGNNSEGCSYSFDFPRKRTAGADVLAVGPLSPEQINSCLRTSVSSRERCMDHLKFNHVVKKPRISHTLHNENSNTLHNENSNEEDDSCSEESCGETGPIHWTDDERSAFIQGFSLFGKNFASISRYVGTRSPDQCKVFFSKVRKCLGLESIKFGSGNVSTSVSVDNGNEGGGSDLEDPCPMESNSGIVNNGVCAKMGMNSPTSPFNMNQDGVNQSGSANVKADLSRSEEENGQKYLCLKDDNNLVNNAYVNGGFPSLVSESCRDLVDINTVESQSQAAGKSKSNDLMSMEIDEGVLTSVTISSEPLYCGLSVLSNVIVETPTEISRKGSGDQGATMPKFSSKNQDGVMQAANRTRNSGLEPESAPSGFRYPECLHHVPIEVCTENPIGVSAPRGNPNCHAESESGNSLVGQVDETHDLGWPKNNLELDGRLQVLGHVNPEQIGLLKATNTESCQNPQRSVTQDLSRISRSKSDLIVKTQRTGEGFSLTKCTSSAPKPLAVSHKEGRSGHSRSHSFSLSDTERLHKNGDVKLFGTVLTTDENGIKQKHNPCGIVRSSSTLSRDHDTRHHYINQQHLQNVPITSYGFWDGNRIQTGLTSLPESAKLLASCPEAFSTHLKQQVGNSKEILVDVNGGILSFGKHNEDRAESSSAKDEGNIGGVNGVAEAAT

SEQ ID NO: 654 - protein, 267 aa, Arabidopsis thaliana
  Clone ID: AT_F7J8.C1.p180.tg
MSSSTMYRGVNMFSPANTNWIFQEVREATWTAEENKRFEKALAYLDDKDNLESWSKIADLIPGKTVADVIKRYKELEDDVSDIEAGLIPIPGYGGDASSAANSDYFFGLENSSYGYDYVVGGKRSSPAMTDCFRSPMPEKERKKGVPWTEDEHLRFLMGLKKYGKGDWRNIAKSFVTTRTPTQVASHAQKYFLRQLTDGKDKRRSSIHDITTVNIPDADASATATTADVALSPTPANSFDVFLQPNPHYSFASASASSYYNAFPQWS

SEQ ID NO: 655 - protein, 298 aa, Arabidopsis thaliana
  Clone ID: AT_MAH20.C1.p8.tg
MTVEEVSDGSVWSREDDIAFERALANNTDESEERWEKIAADVPGKSVEQIKEHYELLVEDVTRIESGCVPLPAYGSPEGSNGHAGDEGASSKKGGNSHAGESNQAGKSKSDQERRKGIAWTEDEHRLFLLGLDKYGKGDWRSISRNFVVTRTPTQVASHAQKYFIRLNSMNKDRRRSSIHDITSVGNADVSTPQGPITGQNNSNNNNNNNNNNSSPAVAGGGNKSAKQAVSQAPPGPPMYGTPAIGQPAVGTPVNLPAPPHMAYGVHAAPVPGSVVPGAAMNIGQMPYTMPRTPTAHR

SEQ ID NO: 656 - protein, 588 aa, Arabidopsis thaliana
  Clone ID: AT_MEE6.C1.p9.tg
MAEEKKNKKKKSDAKVDSEETGEEFISEHSSMKDKEKKRKKNKRENKDGFTGEDMEITGRESEKLGDEVFIVKKKKKSKKPIRIDSEAVDAVKKKSKKRSKETKADSEAEDDGVEKKSKEKSKETKVDSEAHDGVKRKKKKSKKESGGDVIENTESSKVSDKKKGKRKRDDTDLGAEENIDKEVKRKNNKKKPSVDSDVEDINLDSTNDGKKKRKKKKQSEDSETEENGLNSTKDAKKRRKKKKKKKQSEVSEAEEKSDKSDEDLTTPSTSSKRVKFSDQVEFFPSDDDEGTEDDDEEEVKVVRGKRFTKEEDEMVKNAVLEYIDNHALGDEGIKMVMECKAYPQLKGCWKEITSALPWRTYNSVYHRAHTIFEAGSQGIWTKEDIELVMEFQKTHGNDWKTLADAMGKHRKHVKDAWRRGRLAGKKKGHWMREEYQNLFDLVNKDLRMKAFKEKHSKHGMLKDNIPWMAISDVLETRDHVTCCQKWYEQLISPMVAKGMWANVDDYRLLEELLKLDAACIDDVDWDNLLENRDGEACRKRWNQMIIHIGVPKSKTFAEQVEILSDRYCPDIAEDREDFDNRPYDPED

SEQ ID NO: 657 - protein, 193 aa, Arabidopsis thaliana
  Clone ID: AT_MHC9.C1.p12.tg
MAPSRSKKSKYKKKPRAKAVSPHKDEESMSKTKQRKRKLSDMLGPQWSKEELERFYEGYRKFGKEWKKVAGFVHSRSAEMVEALYTMNKAYLSLPEGTASVVGLTAMMTDHYSVLHGGSDSEQENNEGIETPRSAPKRSRVKSSDHPSIGLEGLSDRLQFRSSSGFMPSLKKRRTGSVLCFSLPQNLFPISQA

SEQ ID NO: 658 - protein, 200 aa, Arabidopsis thaliana
  Clone ID: AT_MGF10.C1.p18.tg
MLQKDGWTEEEDIILIKAHKEIGNRWAEIARKLPGRTENTIKNHWNATKRRQHSRRTKGKDEISLSLGSNTLQNYIRSVTYNDDPFMTANANANIGPRNMRGKGKNVMVAVSEYDEGECKYIVDGVNNLGLEDGRIKMPSLAAMSASGSASTSGSASGSGSGVTMEIDEPMTDSWMVMHGCDEVMMNEIALLEMIAHGRL

SEQ ID NO: 659 - protein, 414 aa, Arabidopsis thaliana
  Clone ID: AT_F14J9.C1.p20.tg
MGRHSCCYKQKLRKGLWSPEEDEKLLTHITNHGHGCWSSVPKLAGLQRCGKSCRLRWINYLRPDLKRGAFSPEEENLIVELHAVLGNRWSQIASRLPGRTDNEIKNLWNSSIKKKLKQRGIDPNTHKPISEVESFSDKDKPTTSNNKRSGNDHKSPSSSSATNQDFFLERPSDLSDYFGFQKLNFNSNLGLSVTTDSSLCSMIPPQFSPGNMVGSVLQTPVCVKPSISLPPDNNSSSPISGGDHVKLAAPNWEFQTNNNNTSNFFDNGGFSWSIPNSSTSSSQVKPNHNFEEIKWSEYLNTPFFIGSTVQSQTSQPIYIKSETDYLANVSNMTDPWSQNENLGTTETSDVFSKDLQRMAVSFDFMYSILDDSSERSVFAINLLKNNDERNKSVSVCFRERIVIHSHILHHFSDL

SEQ ID NO: 660 - protein, 342 aa, Arabidopsis thaliana
  Clone ID: AT_K21P3.C1.p23.tg
MGRAPCCEKIGLKRGRWTAEEDEILTKYIQTNGEGSWRSLPKKAGLLRCGKSCRLRWINYLRRDLKRGNITSDEEEIIVKLHSLLGNRWSLIATHLPGRTDNEIKNYWNSHLSRKIYAFTAVSGDGHNLLVNDVVLKKSCSSSSGAKNNNKTKKKKKGRTSRSSMKKHKQMVTASQCFSQPKELESDFSEGGQNGNFEGESLGPYEWLDGELERLLSSCVWECTSEEAVIGVNDEKVCESGDNSSCCVNLFEEEQGSETKIGHVGITEVDHDMTVEREREGSFLSSNSNENNDKDWWVGLCNSSEVGFGVDEELLDWEFQGNVTCQSDDLWDLSDIGEITLE

SEQ ID NO: 661 - protein, 280 aa, Arabidopsis thaliana
  Clone ID: AT_F22O13.C1.p32.tg
MGRPPCCDKIGIKKGPWTPEEDIILVSYIQEHGPGNWRSVPTNTGLLRCSKSCRLRWTNYLRPGIKRGNFTPHEEGMIIHLQALLGNKWASIASYLPQRTDNDIKNYWNTHLKKKLNKSDSDERSRSENIALQTSSTRNTINHRSTYASSTENISRLLEGWMRASPKSSTSTTFLEHKMQNRTNNFIDHHSDQFPYEQLQGSWEEGHSKGINGDDDQGIKNSENNNGDDVHHEDGDHEDDDDHNATPPLTFIEKWLLEETSTTGGQMEEMSHLMELSNML

SEQ ID NO: 662 - protein, 263 aa, Arabidopsis thaliana
  Clone ID: AT_F11B9.C1.p122.tg
METLHPFSHLPISDHRFVVQEMVSLHSSSSGSWTKEENKMFERALAIYAEDSPDRWFKVASMIPGKTVFDVMKQYSKLEEDVFDIEAGRVPIPGYPAASSPLGFDTDMCRKRPSGARGSDQDRKKGVPWTEEEHRRFLLGLLKYGKGDWRNISRNFVVSKTPTQVASHAQKYYQRQLSGAKDKRRPSIHDITTGNLLNANLNRSFSDHRDILPDLGFIDKDDTEEGVIFMGQNLSSENLFSPSPTSFEAAINFAGENVFSAGA

SEQ ID NO: 663 - protein, 553 aa, Arabidopsis thaliana
  Clone ID: AT_F24K9.C1.p11.tg
MSYTTATADSDDGMHSSIHNESPAPDSISNGCRSRGKRSVLKKGPWTSTEDGILIDYVKKHGEGNWNAVQKHTSLARCGKSCRLRWANHLRPNLKKGAFSQEEEQLIVEMHAKMGNKWAQMAEHLPGRTDNEIKNYWNTRIKRRQRAGLPLYPPEIYVDDLHWSEEYTKSNIIRVDRRRRHQDFLQLGNSKDNVLFDDLNFAASLLPAASDLSDLVACNMLGTGASSSRYESYMPPILPSPKQIWESGSRFPMCSSNIKHEFQSPEHFQNTAVQKNPRSCSISPCDVDHHPYENQHSSHMMMVPDSHTVTYGMHPTSKPLFGAVKLELPSFQYSETSAFDQWKTTPSPPHSDLLDSVDAYIQSPPPSQVEESDCFSSCDTGLLDMLLHEAKIKTSAKHSLLMSSPQKSFSSTTCTTNVTQNVPRGSENLIKSGEYEDSQKYLGRSEITSPSQLSAGGFSSAFAGNVVKTEELDQVWEPKRVDITRPDVLLASSWLDQGCYGIVSDTSSMSDALALLGGDDIGNSYVTVGSSSGQAPRGVGSYGWTNMPPVWSL

SEQ ID NO: 664 - protein, 578 aa, Arabidopsis thaliana
  Clone ID: AT_T8L23.C1.p3.tg
MKRHSCCYKQKLRKGLWSPEEDEKLLNYITKHGHGCWSSVPKLAGLERCGKSCRLRWINYLRPDLKRGAFSSEEQNLIVELHAVLGNRWSQIAARLPGRTDNEIKNLWNSCIKKKLMKKGIDPITHKPLSEVGKETNRSDNNNSTSFSSETNQDLFVKKTSDFAEYSAFQKEESNSVSLRNSLSSMIPTQFNIDDGSVSNAGFDTQVCVKPSIILLPPPNNTSSTVSGQDHVNVSEPNWESNSGTTSHLNNPGMEEMKWSEEYLNESLFSTQVYVKSETDFNSNIAFPWSQSQACDVFPKDLQRMAFSFGGQSFFPWVTTLRRGRQQVIGFSVDQIDRTTNSFKIVIINEVRNSNETTYEFEINVGYSWKLSETTLTCCTSNLDDRMKKPVYMKGGLHWLRNDGAIVAFNPETEKARLISIRFPKELCSKTLFTAADNNLILISATEEVFYVYAVENILTDPKWVVLKQIRNGVLDEKMLYSWYPEAYDGKCLMLREILKKDHYKQVLHGYDLRANKWEVIGSIPGWYTSALDFYQFTPSLSSVIGPDAKEEEEILACDHKKISSINSIIRMLDGISS

SEQ ID NO: 665 - protein, 97 aa, Arabidopsis thaliana
  Clone ID: AT_T22F8.C1.p150.tg
MASSSMSSQSSGSWTAKQNKAFEQALATYDQDTPNRWQNVAKVVGGKTTEEVKRHYELLVQDINSIENGHVPFPNYRTSGGCTNGRLSQEEKRYVLS

SEQ ID NO: 666 - protein, 294 aa, Arabidopsis thaliana
  Clone ID: AT_YUP8H12R.C1.p35.tg
MGKGRAPCCDKTKVKRGPWSPEEDIKLISFIQKFGHENWRSLPKQSGLLRCGKSCRLRWINYLRPDLKRGNFTSEEEETIIKLHHNYGNKWSKIASQLPGRTDNEIKNVWHTHLKKRLAQSSGTADEPASPCSSDSVSRGKDDKSSHVEDSLNRETNHRNELSTSMSSGGSNQQDDPKIDELRFEYIEEAYSEFNDIIIQEVDKPDLLEIPFDSDPDIWSFLDTSNSFQQSTANENSSGSRATTEEESDEDEVKKWFKHLESELGLEEDDNQQQYKEEESSSSSLLKNYELMIH

SEQ ID NO: 667 - protein, 713 aa, Arabidopsis thaliana
  Clone ID: AT_T1J8.C1.p14.tg
MQAELIPEGPNGEGRLSNQNSNPNLLSSASISITQFPAKKPTRQWAAWTHQEEESFFTALRQVGKNFEKITSRVQSKNKDQVRHYYYRLVRRMNKLLGPDLSLDAKNPKDTNAAMLRWWSLLEKYSCKASKLHLKPRRFKLFIEALEHQLLKDRRKSIRKRTCQGENLSSASLGNISSHSRERGLDNRPFKLILSDGQNVKKLGPGRASTKHGESLSVNLGDEKEDTAFGRGGRQRRKQAGYRKWEKAAIDGVSLVADAAEHLERTSIDKDMDDQTDLGPTRYLTGKSPLSLCSAGDVPLSDANMQFSAKLKLQLFPIDECTRRSLEMDKHNPHLELTLSNRKKISSVLEHLNRKWGSSSCATGELLLFPYNARKETVTCHQRYGWFVHDASGSIISQVPTSDPCPSLEDDMNVDRLNEVNMLLTESGPLSVHSTAEQTTSVEPSQGLVCASGVHDRPARSRDDYEPASTSITPLEHLSGGNAQSPGEWADSLTNISIGDLLSEVPDDIDSDGVDPPATEGSHYLLRDVPFTSDSFDAAIAAHILRHQNKPSAQLPLTSGSSSLWDDEETRDAFSFQKNRFANSTELASVASPKGVGRVNGEPSQLVEASSGDEGSYNPHDDGDPMEEGPADPHTMDSPGKTPCGLADVYWPDSLGPLDLDIRSSKYTDDLILSESLGGLSRLIATSLDAFQNCSLFGFDNKKDKSNMKFHDK

SEQ ID NO: 668 - protein, 486 aa, Arabidopsis thaliana
  Clone ID: AT_T8I13.C1.p5.tg
MGGTDAKDILGLPKTPLSLTQEKKSRPQKESHRKPDGISREVYALTGGVAPLMPSIDLKRRPPADEKVAWKWLSFTNSARKDDLQLYHWVRVVNDVPPTGDYSFAKYNKSVDILKYTDEEYENHLTDSVWTKEETDQLFEFCQNFDLRFVVIADRFPVSRTVEELKDRYYSVNRALLRARAQSPADVANHPLMKQSLLVMLSGENISLNAFFPMYWHKQEPYDITRDRERKRALSMVLSQSRHQEKKDAEILAEAKRITEMRLAARRAEEPDVSANENAGLDKADGVVPGRSVSPTSNSQLPATAVAPSTLTMADYASTLASLRMVSEVSLPSSLSLFYLLHVYLRTYGLEQMVQAASSAVGLRTIKRVEQTLQDLGVNLKPKVPTKTVCDEHLELRKEILTLLNLQKQLQYKESEGSSHREGSYAAMPDTPKDRVFAPDPFSFGAERPIKKEQKRKVVHIRGPGRQADTPSPAHKRPRKLKASDL

SEQ ID NO: 669 - protein, 663 aa, Arabidopsis thaliana
  Clone ID: AT_K16F4.C1.p7.tg
MQSWGINSAIKLLTYSSELKDGQALYASSNCHPVKALNREPAGHAFHSAALKLRGCAKEATSKNEDTDKKVPKEKDGEYIPSYDSHNIKGKKKSGKLQHDHYALLGLGNLRYLATDDQIRKSYRDAALKHHPDKLATLLLLEETEEAKQAKKDEIESHFKLIQEAYEVLMDSTKRRIFDSTDEFDDKVPTDCAPQDFFKVFGPAFKRNARWSNSPLPDLGDENTPLKEVDRFYSTWYTFKSWREFPEEEEHDIEQAESREEKRWMERENARKTQKARKEEYARIRTLVDNAYKKDIRIQKRKDDEKAKKLQKKEAKVMAKRQQEEAAAAAIEEEKRRKEEEAKRAAEAAQLHKRAKEREKKLLRKERSRLRVLSAPVLSQRLLGISDEHVEDLCMSLNTEQLRKLCDKMENKEGMALAKVIKNGSNIDDDKIEIEEEEVQVAVKQNGHIEANGHVEANGHVEAKVDTATHEKKEKPWSKEEIDMLRKGTTKFPKGTSQRWEVISEYIGTGRSVEEILKATKTVLLQKPDSAKAFDSFLENRKPAASINSPLSTREELGEPIIPTKAHEDNNSTKTETAEQNGKTKENNNSNGNSEPAAASGSDPDGWSAVQERALVQALKTFPKETNQRWERVATAVPGKTMNQCKKKFADLKDVIRTKKPTA

SEQ ID NO: 670 - protein, 250 aa, Arabidopsis thaliana
  Clone ID: AT_T4C9.C1.p190.tg
MMALPKLAGLRRCGKSCRLRWTNYLRPDLKRGLLSDAEEQLVIDLHALLGNRWSKIAARLPGRTDNEIKNHWNTHIKKKLLKMEIDPSTHQPLNKVFTDTNLVDKSETSSKADNVNDNKIVEIDGTTTNTIDDSIITHQNSSNDDYELLGDIIHNYGDLFNILWTNDEPPLVDDASWSNHNVGIGGTAAVAASDKNNTAAEEDFPERSFEKQNGESWMFLDYCQEFGVEDFGFECYHGFGQSSMKTGHKD

SEQ ID NO: 671 - protein, 286 aa, Arabidopsis thaliana
  Clone ID: AT_T22E19.C1.p5.tg
MENSMKKKKSFKESEDEELRRGPWTLEEDTLLTNYILHNGEGRWNHVAKCAGLKRTGKSCRLRWLNYLKPDIRRGNLTPQEQLLILELHSKWGNRWSKIAQYLPGRTDNEIKNYWRTRVQKQARQLNIESNSDKFFDAVRSFWVPRLIEKMEQNSSTTTTYCCPQNNNNNSLLLPSQSHDSLSMQKDIDYSGFSNIDGSSSTSTCMSHLTTVPHFMDQSNTNIIDGSMCFHEGNVQEFGGYVPGMEDYMVNSDISMECHVADGYSAYEDVTQDPMWNVDDIWQFRE

SEQ ID NO: 672 - protein, 435 aa, Arabidopsis thaliana
  Clone ID: AT_T30B22.C1.p7.tg
MEATDPSAEIELYTIPAQSSWFLWDDIHEIERREFAEFFTESSITRTPKVYKEYRDFIINKFREDTCRRLTFTSVRKFLVGDVNLLQKVFLFLEKWGLINFSSSLKKNDHLLSVDNAKIEQGTPAGIRVTATPNSLRPITAPPLVEERVETGIKVPPLTSYSDVFSDLKKPDHVLVCAHCGERCDSPFYQHNKGIVNICEKCFKNGNYGENNTADDFKLIGNSAAAVWTEEEILLLLESVLKHGDDWELISQSVSTKSRLDCISKLIELPFGEFLMGSASGRLNPSILTEDENTEQVQTDGQEHEETETREEKEDRVNEDEPPAKRKRVALISEGDTLRIRASVATALGAAAAQAKILADQEEREMEQLAATVIEQQLKKLQSKLKFLDDLESIMDEEEKVIEGVKETIIQERVSVLQCAFRSGITKRWDHTYVK

SEQ ID NO: 673 - protein, 267 aa, Arabidopsis thaliana
  Clone ID: AT_F6A14.C1.p18.tg
MGRTTWFDVDGMKKGEWTAEEDQKLGAYINEHGVCDWRSLPKRAGLQRCGKSCRLRWLNYLKPGIRRGKFTPQEEEEIIQLHAVLGNRWAAMAKKMQNRTDNDIKNHWNSCLKKRLSRKGIDPMTHEPIIKHLTVNTTNADCGNSSTTTSPSTTESSPSSGSSRLLNKLAAGISSRQHSLDRIKYILSNSIIESSDQAKEEEEKEEEEEERDSMMGQKIDGSEGEDIQIWGEEEVRRLMEIDAMDMYEMTSYDAVMYESSHILDHLF

SEQ ID NO: 674 - protein, 206 aa, Arabidopsis thaliana
  Clone ID: AT_F13M14.C1.p12.tg
MASSPRWTEDDNRRFKSALSQFPPDNKRLVNVAQHLPKPLEEVKYYYEKLVNDVYLPKPLENVTQHLQKPMEMEEMKYMYEKMANDVNQMPEYVPLAESSQSKRRKKDTPNPWTEEEHRLFLQGLKKYGEGASTLTSTNFVKTKTPRQVSSHAQYYKRQKSDNKKEKRRSIFDITLESTEGNPDSGNQNPPDDDDPSQGQGTCLGV

SEQ ID NO: 675 - protein, 333 aa, Arabidopsis thaliana
  Clone ID: AT_F2P9.C1.p5.tg
MVRTPCCRAEGLKKGAWTQEEDQKLIAYVQRHGEGGWRTLPDKAGLKRCGKSCRLRWANYLRPDIKRGEFSQDEEDSIINLHAIHGNKWSAIARKIPRRTDNEIKNHWNTHIKKCLVKKGIDPLTHKSLLDGAGKSSDHSAHPEKSSVHDDKDDQNSNNKKLSGSSSARFLNRVANRFGHRINHNVLSDIIGSNGLLTSHTTPTTSVSEGERSTSSSSTHTSSNLPINRSITVDATSLSSSTFSDSPDPCLYEEIVGDIEDMTRFSSRCLSHVLSHEDLLMSVESCLENTSFMREITMIFQEDKIETTSFNDSYVTPINEVDDSCEGIDNYFG

SEQ ID NO: 676 - protein, 448 aa, Arabidopsis thaliana
  Clone ID: AT_F14L17.C1.p9.tg
MEDTKKKKKKNINNNQDSKKKERHIVTWSQEEDVILREQITLHGTENWAIIASKFKDKSTRQCRRRWYTYLNSDFKRGGWSPEEDMLLCEAQRVFGNRWTEIAKVVSGRTDNAVKNRFTTLCKKRAKHEAMTKDSNSNTKRMLFLDGISTPRKSENETPIAKKLKRSHILDLTEISNYGRAEACVNQQIRSPFSVLARNATGIDSLEEQNQTSNVNESDGEGMFLKKDDPKVTALMQQAELLSSLAQKVNADNTEQSMENAWKVLQDFLNKGKENDLFRYGIPDIDFKIEEFKDLIEDLRSGYEDNQLSWRQPDLHDSPASSEYSSGSTIMVDQSGDKTQPFSADTQTEHKQVGEELLVPKNPDENMPISGEEKFSSPIQVTPLFRSLADGIPSPQFSESVSFAPSLFIIQYLGFEKTMSLKRLIAFVGEELPAKNTRDRVLISMSKC

SEQ ID NO: 677 - protein, 338 aa, Arabidopsis thaliana
  Clone ID: AT_MBK20.C1.p16.tg
MSKRPYCIGEGLKKGAWTTEEDKKLISYIHDHGEGGWRDIPEKAGLKRCGKSCRLRWTNYLKPDIKRGEFSYEEEQIIIMLHASRGNKWSVIARHLPKRTDNEVKNYWNTHLKKRLIDDGIDPVTHKPLASSNPNPVEPMKFDFQKKSNQDEHSSQSSSTTPASLPLSSNLNSVKSKISSGETQIESGHVSCKKRFGRSSSTSRLLNKVAARASSIGNILSTSIEGTLRSPASSSGLPDSFSQSYEYMIDNKEDLGTSIDLNIPEYDFPQFLEQLINDDDENENIVGPEQDLLMSDFPSTFVDEDDILGDITSWSTYLLDHPNFMYESDQDSDEKNFL

SEQ ID NO: 678 - protein, 310 aa, Arabidopsis thaliana
  Clone ID: AT_MQN23.C1.p17.tg
MGRSPSSDETGLKKGPWLPEEDDKLINYIHKHGHSSWSALPKLAGLNRCGKSCRLRWTNYLRPDIKRGKFSAEEEETILNLHAVLGNKWSMIASHLPGRTDNEIKNFWNTHLKKKLIQMGFDPMTHQPRTDDIFSSLSQLMSLSNLRGLVDLQQQFPMEDQALLNLQTEMAKLQLFQYLLQPSPAPMSINNINPNILNLLIKENSVTSNIDLGFLSSHLQDFNNNNLPSLKTLDDNHFSQNTSPIWLHEPPSLNQTMLPTHDPCAQSVDGFGSNQASSSHDQEVAVTDSVDWPDHHLFDDSMFPDISYQS

SEQ ID NO: 679 - protein, 327 aa, Arabidopsis thaliana
  Clone ID: AT_MTG13.C1.p4.tg
MGRQPCCDKVGLKKGPWTIEEDKKLINFILTNGHCCWRALPKLSGLLRCGKSCRLRWINYLRPDLKRGLLSEYEEQKVINLHAQLGNRWSKIASHLPGRTDNEIKNHWNTHIKKKLRKMGIDPLTHKPLSEQEASQQAQGRKKSLVPHDDKNPKQDQQTKDEQEQHQLEQALEKNNTSVSGDGFCIDEVPLLNPHEILIDISSSHHHHSNDDNVNINTSKFTSPSSSSSSTSSCISSVVPGDEFSKFFDEMEILDLKWLSSDDSLGDDISKDGKFNNSTVDTMNLWDINDLSSLDMFMNEHDDGFIGNGNGCSRMVLDQDSWTFDLL

SEQ ID NO: 680 - protein, 195 aa, Arabidopsis thaliana
  Clone ID: AT_F23N20.C1.p2.tg
MNKTRLRALSPPSGMQHRKRCRLRGRNYVRPEVKQRNFSKDEDDLILKLHALLGNRWSLIAGRLPGRTDNEVRIHWETYLKRKLVKMGIDPTNHRLHHHTNYISRRHLHSSHKEHETKIISDQSSSVSESCGVTILPIPSTNCSEDSTSTGRSHLPDLNIGLIPAVTSLPALCLQDSSESSTNGSTGQETLLLFR

SEQ ID NO: 681 - protein, 303 aa, Arabidopsis thaliana
  Clone ID: AT_K5K13.C1.p13.tg
MDFSCFQEYPFEFHCRGTTFNGFRENNAVSETVEEFCNKRRMQKKSDDLKTKKKKKQSVSRVCSRGHWRISEDTQLMELVSVYGPQNWNHIAESMQGRTGKSCRLRWFNQLDPRINKRAFSDEEEERLLAAHRAFGNKWAMIAKLFNGRTDNALKNHWHVLMARKMRQQSSSYVQRFNGSAHESNTDHKIFNLSPGNVDDDEDVNLKKCSWEMLKEGTTNLKAQYLQEEYSSSRMPMQGPHHHYSTFPADSLALTLHVSIQEPSSSSSLSLPSSSTTGEHTMVTRYFETIKPPAFIDFLGVGH

SEQ ID NO: 682 - protein, 288 aa, Arabidopsis thaliana
  Clone ID: AT_k19m22.C1.p100.tg
MEVMRPSTSHVSGGNWLMEETKSGVAASGEGATWTAAENKAFENALAVYDDNTPDRWQKVAAVIPGKTVSDVIRQYNDLEADVSSIEAGLIPVPGYITSPPFTLDWAGGGGGCNGFKPGHQVCNKRSQAGRSPELERKKGVPWTEEEHKLFLMGLKKYGKGDWRNISRNFVITRTPTQVASHAQKYFIRQLSGGKDKRRASIHDITTVNLEEEASLETNKSSIVVGDQRSRLTAFPWNQTDNNGTQADAFNITIGNAISGVHSYGQVMIGGYNNADSCYDAQNTMFQL

SEQ ID NO: 683 - protein, 352 aa, Arabidopsis thaliana
  Clone ID: AT_MFC19.C1.p9.tg
MGFTIPKNLRIWTFKSPKTLISEIFFSKFYLLFQLLLQCNRATMDFFDEDRPRFVFQSRPSSSHTAEEEEEARIPNKLFISISVSISLIILSLSFFYFESEPAKSLLLWLSLSFLVGPFAPSSLTGGKIRVGYGQILEPEQIHDESSTDNERESRRKSVNKRSKGSTKSDNPPENASAVTEVSRKVVIPQSKESGSVNETKDWTAEEIEILKKQLIKHPAGKPGRWETVASAFGGRYKTENVIKKAKEIGEKKIYESDDYAQFLKNRKASDPRLVDENEENSGAGGDAEGTKEIWSNGEDIALLNALKAFPKEAAMRWEKIAAAVPGKSKAACMKRVTELKKGFRSSKTPAN

SEQ ID NO: 684 - protein, 206 aa, Arabidopsis thaliana
  Clone ID: AT_F4P13.C1.p8.tg
METTMKKKGRVKATITSQKEEEGTVRKGPWTMEEDFILFNYILNHGEGLWNSVAKASGLKRTGKSCRLRWLNYLRPDVRRGNITEEEQLLIIQLHAKLGNRWSKIAKHLPGRTDNEIKNFWRTKIQRHMKVSSENMMNHQHHCSGNSQSSGMTTQGSSGKAIDTAESFSQAKTTTFNVVEQQSNENYWNVEDLWPVHLLNGDHHVI

SEQ ID NO: 685 - protein, 827 aa, Arabidopsis thaliana
  Clone ID: AT_F10M10.C1.p200.tg
MGKFHSNPNIQIELKDLTELEVGDSEAKQEVMEFLDYWGLINFHPFPPTDTGSTASDHDDLGDKESLLNSLYRFQVDEACPPLVHKPRFTAQATPSGLFPDPMAADELLKQEGPAVEYHCNSCSADCSRKRYHCPKQADFDLCTECFNSGKFSSDMSSSDFILMEPAEAPGVGSGKWTDQETLLLLEALEIFKENWNEIAEHVATKTKAQCMLHFLQMPIEDAFLDQIDYKDPISKDTTDLAVSKDDNSVLKDAPEEAENKKRVDEDETMKEVPEPEDGNEEKVSQESSKPGDASEETNEMEAEQKTPKLETAIEERCKDEADENIALKALTEAFEDVGHSSTPEASFSFADLGNPVMGLAAFLVRLAGSDVATASARASIKSLHSNSGMLLATRHCYILEDPPDNKKDPTKSKSADAEGNDDNSHKDDQPEEKSKKAEEVSLNSDDREMPDTDTGKETQDSVSEEKQPGSRTENSTTKLDAVQEKRSSKPVTTDNSEKPVDIICPSQDKCSGKELQEPLKDGNKLSSENKDASQSTVSQSAADASQPEASRDVEMKDTLQSEKDPEDVVKTVGEKVQLAKEEGANDVLSTPDKSVSQQPIGSASAPENGTAGSLFLSLSDTLITLPTLHDSFISYRFVIEMLFAGGNPNIEGKKEKDICEGTKDKYNIEKLKRAAISAISAAAVKAKNLAKQEEDQIRQLSGSLIEKQQLHKLEAKLSIFNEAESLTMRVREQLERSRQRLYHERAQIIAARLGVPPSMSSKASLPTNRIAANFANVAQRPPMGMAFPRPPMPRPPGFPVPGSFVAATTMTGSSDPSPGSDNVSSV

SEQ ID NO: 686 - protein, 365 aa, Arabidopsis thaliana
  Clone ID: AT_F21H2.C1.p9.tg
MGRSPCCDENGLKKGPWTPEEDQKLIDYIHKHGHGSWRALPKLADLNRCGKSCRLRWTNYLRPDIKRGKFSAEEEQTILHLHSILGNKWSAIATHLQGRTDNEIKNFWNTHLKKKLIQMGIDPVTHQPRTDLFASLPQLIALANLKDLIEQTSQFSSMQGEAAQLANLQYLQRMFNSSASLTNNNGNNFSPSSILDIDQHHAMNLLNSMVSWNKDQNPAFDPVLELEANDQNQDLFPLGFIIDQPTQPLQQQKYHLNNSPSELPSQGDPLLDHVPFSLQTPLNSEDHFIDNLVKHPTDHEHEHDDNPSSWVLPSLIDNNPKTVTSSLPHNNPADASSSSSYGGCEAASFYWPDICFDESLMNVIS

SEQ ID NO: 687 - protein, 236 aa, Arabidopsis thaliana
  Clone ID: AT_T15G18.C1.p120.tg
MGRSPCCEKAHTNKGAWTKEEDQRLVDYIRNHGEGCWRSLPKSAGLLRCGKSCRLRWINYLRPDLKRGNFTDDEDQIIIKLHSLLGNKWSLIAGRLPGRTDNEIKNYWNTHIKRKLLSHGIDPQTHRQINESKTVSSQVVVPIQNDAVEYSFSNLAVKPKTENSSDNGASTSGTTTDEDLRQNGECYYSDNSGHIKLNLDLTLGFGSWSGRIVGVGSSADSKPWCDPVMEARLSLL

SEQ ID NO: 688 - protein, 278 aa, Arabidopsis thaliana
  Clone ID: AT_F4F7.C1.p19.tg
MSNITKKKCNGNEEGAEQRKGPWTLEEDTLLTNYISHNGEGRWNLLAKSSGKSCRLRWLNYLKPDIKRGNLTPQEQLLILELHSKWGNRWSKISKYLPGRTDNDIKNYWRTRVQKQARQLNIDSNSHKFIEVVRSFWFPRLINEIKDNSYTNNIKANAPDLLGPILRDSKDLGFNNMDCSTSMSEDLKKTSQFMDFSDLETTMSLEGSRGGSSQCVSEVYSSFPCLEEEYMVAVMGSSDISALHDCHVADSKYEDDVTQDLMWNMDDIWQFNEYAHFN

SEQ ID NO: 689 - protein, 307 aa, Arabidopsis thaliana
  Clone ID: AT_F9G14.C1.p150.tg
MTSTNPVVAEVIPAETSTDATETTIATTEAGEAPEKKVRKAYTITKSRESWTEGEHDKFLEALQLFDRDWKKIEDFVGSKTVIQIRSHAQKYFLKVQKNGTLAHVPPPRPKRKAAHPYPQKASKNAQMSLHVSMSFPTQINNLPGYTPWDDDTSALLNIAVSGVIPPEDELDTLCGAEGMRSHLYSVFIFCFVDVGSNDMISETSPSASGIGSSSRTLSDSKGLRLAKQAPSMHGLPDFAEVYNFIGSVFDPDSKGRMKKLKEMDPINFETVLLLMRNLTVNLSNPDFEPTSEYVDAAEEGHEHLSS

SEQ ID NO: 690 - protein, 295 aa, Arabidopsis thaliana
  Clone ID: AT_T6H22.C1.p4.tg
GKGRAPCCDKNKVKRGPWSPQEDLTLITFIQKHGHQNWRSLPKLAGLLRCGKSCRLRWINYLRPDVKRGNFSKKEEDAIIHYHQTLGNKWSKIASFLPGRTDNEIKNVWNTHLKKRLTPSSSSSSLSSTHDQSTKADHDKNCDGAQEEIHSGLNESQNSATSSHHQGECMHTKPELHEVNGLNEIQFLLDHDDFDDITSEFLQDNDILFPLDSLLHNHQTHISTQEMTREVTKSQSFDHPQPDIPCGFEDTNEESDLRRQLVESTTPNNEYDEWFNFIDNQTYFDDFNFVGEVCL

SEQ ID NO: 691 - protein, 807 aa, Arabidopsis thaliana
  Clone ID: AT_F8K7.C1.p13.tg
MPASEDRRGKWKRKKRGGLSAARKPKQEEEDMEEEDEENNNNNNEEMDDVENADELQQNGGATPDPGLGIGEVVEDSGSRISDFPAVVKRVVIRPHASVMAVVAAERAGLIGETRGQGSLPALENISFGQLQALSTVPADSLDLERSDGSSSAYVISPPPIMDGEGVVKRFGDLVHVLPMHSDWFAPNTVDRLERQVVPQFFSGKSPNHTPESYMEFRNAIVSKYVENPEKTLTISDCQGLVDGVDIEDFARVFRFLDHWGIINYCATAQSHPGPLRDVSDVREDTNGEVNVPSAALTSIDSLIKFDKPNCRHKGGEVYSSLPSLDGDSPDLDIRIREHLCDSHCNHCSRPLPTVYFQSQKKGDILLCCDCFHHGRFVVGHSCLDFVRVDPMKFYGDQDGDNWTDQETLLLLEAVELYNENWVQIADHVGSKSKAQCILHFLRLPVEDGLLDNVEVSGVTNTENPTNGYDHKGTDSNGDLPGYSEQGSDTEIKLPFVKSPNPVMALVAFLASAVGPRVAASCAHESLSVLSEDDRMKSEGMQGKEASLLDGENQQQDGAHKTSSQNGAEAQTPLPQDKVMAAFRAGLSAAATKAKLFADHEEREIQRLSANIVNHQLKRMELKLKQFAEIETLLMKECEQVEKTRQRFSAERARMLSARFGSPGGISPQTNNLQGMSLSTGGNNINSLMHQQHQQQQASATSQPSIIPGFSNNPQVQAQMHFMARQQQQQQQQQQQQQQAFSFGPRLPLNAIQTNAGSTASPNVMFGNNQLNNPAAAGAASINQPSFSHPMVRSSTGSGSGSGLGLN

SEQ ID NO: 692 - protein, 336 aa, Arabidopsis thaliana
  Clone ID: AT_T15B16.C1.p4.tg
MGRHSCCYKQKLRKGLWSPEEDEKLLRYITKYGHGCWSSVPKQAGLQRCGKSCRLRWINYLRPDLKRGAFSQDEENLIIELHAVLGNRWSQIAAQLPGRTDNEIKNLWNSCLKKKLRLRGIDPVTHKLLTEIETGTDDKTKPVEKSQQTYLVETDGSSSTTTCSTNQNNNTDHLYTGNFGFQRLSLENGSRIAAGSDLGIWIPQTGRNHHHHVDETIPSAVVLPGSMFSSGLTGYRSSNLGLIELENSFSTGPMMTEHQQIQESNYNNSTFFGNGNLNWGLTMEENQNPFTISNHSNSSLYSDIKSETNFFGTEATNVGMWPCNQLQPQQHAYGHI

SEQ ID NO: 693 - protein, 334 aa, Arabidopsis thaliana
  Clone ID: AT_F6N7.C1.p15.tg
MTVPGLGPSFTAAVSSSSSPTTSSTAVAVADVTAMVSSSEEDLSKKIRKPYTITKSRESWTEPEHDKFLEALQLFDRDWKKIEAFIGSKTVIQIRSHAQKYFLKVQKSGTGEHLPPPRPKRKAAHPYPQKAHKNVQLQVPGSFKSTSEPNDPSFMFRPESSSMLMTSPTTAAAAPWTNNAQTISFTPLPKAGAGANNNCSSSSENTPRPRSNRDARDHGNVGHSLRVLPDFAQVYGFIGSVFDPYASNHLQKLKKMDPIDVETVLLLMRNLSINLSSPDFEDHVSILLHKLLVNFNSKPYTRTNLKTLIDFKNNRDGFFRLMISDLRQQLIMVE

SEQ ID NO: 694 - protein, 268 aa, Arabidopsis thaliana
  Clone ID: AT_F17P19.C1.p16.tg
MTKSGERPKQRQRKGLWSPEEDQKLKSFILSRGHACWTTVPILAGLQRNGKSCRLRWINYLRPGLKRGSFSEEEEETILTLHSSLGNKWSRIAKYLPGRTDNEIKNYWHSYLKKRWLKSQPQLKSQISDLTESPSSLLSCGKRNLETETLDHVISFQKFSENPTSSPSKESNNNMIMNNSNNLPKLFFSEWISSSNPHIDYSSAFTDSKHINETQDQINEEEVMMINNNNYSSLEDVMLRTDFLQPDHEYANYYSSGDFFINSDQNYV

SEQ ID NO: 695 - protein, 215 aa, Arabidopsis thaliana
  Clone ID: AT_MUK11.C1.p8.tg
MASSQWTRSEDKMFEQALVLFPEGSPNRWERIADQLHKSAGEVREHYEVLVHDVFEIDSGRVDVPDYMDDSAAAAAGWDSAGQISFGSKHGESERKRGTPWTENEHKLFLIGLKRYGKGDWRSISRNVVVTRTPTQVASHAQKYFLRQNSVKKERKRSSIHDITTVDATLAMPGSNMDWTGQHGSPVQAPQQQQIMSEFGQQLNPGHFEDFGFRM

SEQ ID NO: 696 - protein, 269 aa, Arabidopsis thaliana
  Clone ID: AT_K7M2.C1.p6.tg
MSLWGGMGGGWGMVEEGWRKGPWTAEEDRLLIDYVQLHGEGRWNSVARLAGLKRNGKSCRLRWVNYLRPDLKRGQITPHEETIILELHAKWGNRWSTIARSLPGRTDNEIKNYWRTHFKKKTKSPTNSAEKTKNRILKRQQFQQQRQMELQQEQQLLQFNQIDMKKIMSLLDDDNNNGDNTFSSSSSGESGALYVPHQITHSTTTSGCEPNSNGYYPVVPVTIPEANVNEDNAIWDGLWNLDFEGQGSFGGAACAPRKHYFQNMVIPFC

SEQ ID NO: 697 - protein, 337 aa, Arabidopsis thaliana
  Clone ID: AT_MQM1.C1.p9.tg
MNLGQEISVGSSWSKDDDIAFEKALAIYNDKTEIRWKKIATVVPGKTLEQVIEHYNILARDVMLIESGCVRLPDYDDFLEEPNHNAFGKERSILEGGNDRKYESKHKGKSKLKQKRRRGVPWKPFEHRQFLHGLKKYGKGDWRSISRHCVVTRTSTQVASHAQKYFAHINSEDKKRKRPSIHDITIAENKSISTKQRPITWQKINNNGATASNTQANQTTLQPSLDIPIYGTHNNIWNAQATQVISQPSQNHPTYDAPIIWNTQVASQPSANIPMYGTSTISQPMVGPMLSPFGTNLNHLAPSHMTSGVQHDSVPYYSGPSAPINMDSIPYNIDLYN

SEQ ID NO: 698 - protein, 432 aa, Arabidopsis thaliana
  Clone ID: AT_F4P9.C1.p38.tg
MAMKAPDPGGSGEILPSTPSLSETTSGGAAAASKSAQLPSSSSDIDNIHVPSYSSWFSWTDINDCEVRSLPEFFDSRSSSKNPKFYLYLRNSIIKQYRDDHPRKISFTDVRRTLVSDVVSIRRVFDFLDSWGLINYNSSASAKPLKWEEKEAGKSAGDAASEPATTVKETAKRNCNGCKAICSIACFACDKYDLTLCARCYVRSNYRVGINSSEFKRVEISEESKPEWSDKEILLLLEAVMHYGDDWKKVASHVIGRTEKDCVSQFVKLPFGEQFVKESDSEDGLEMFDQIKDSDIPESEGIDKDGSSPNKRIKLTPLADASNPIMAQAAFLSALAGTNVAEAAARAAVRALSDVDYEADKNASRDPNRQDANAASSGETTRNESERAWADAKSLIEKEEHEVEGAIKETVEVEVSNNLQLSIDFLLYGYTQ

SEQ ID NO: 699 - protein, 249 aa, Arabidopsis thaliana
  Clone ID: AT_F2H15.C1.p21.tg
MMCSRGHWRPAEDEKLRELVEQFGPHNWNAIAQKLSGRSGKSCRLRWFNQLDPRINRNPFTEEEEERLLASHRIHGNRWSVIARFFPGRTDNAVKNHWHVIMARRGRERSKLRPRGLGHDGTVAATGMIGNYKDCDKERRLATTTAINFPYQFSHINHFQVLKEFLTGKIGFRNSTTPIQEGAIDQTKRPMEFYNFLQVNTDSKIHELIDNSRKDEEEDVDQNNRIPNENCVPFFDFLSVGNSASQGLC

SEQ ID NO: 700 - protein, 336 aa, Arabidopsis thaliana
  Clone ID: AT_MBK20.C1.p15.tg
MSRKPCCVGEGLKKGAWTAEEDKKLISYIHEHGEGGWRDIPQKAGLKRCGKSCRLRWANYLKPDIKRGEFSYEEEQIIIMLHASRGNKWSVIARHLPKRTDNEIKNYWNTHLKKLLIDKGIDPVTHKPLAYDSNPDEQSQSGSISPKSLPPSSSKNVPEITSSDETPKYDASLSSKKRCFKRSSSTSKLLNKVAARASSMGTILGASIEGTLISSTPLSSCLNDDFSETSQFQMEEFDPFYQSSEHIIDHMKEDISINNSEYDFSQFLEQFSNNEGEEADNTGGGYNQDLLMSDVSSTSVDEDEMMQNITGWSNYLLDHSDFNYDTSQDYDDKNFI

SEQ ID NO: 701 - protein, 703 aa, Arabidopsis thaliana
  Clone ID: AT_T30D6.C1.p16.tg
MASSSMSTSSWTAREDKQFEMALAKFDKDTPDRWQKIARAVGGKSTEEVKRHYELLLRDVNDIESGRYPQPRLCSAAAIAAAFTSMSMSQNRAYADSRFRFPFFSSSPPAEESPTDHKSSSNSKSETKPDSDEPKGSGFDPESLERGAKALREINSSPHSKQVFDLMRKQEKTRLAELAAEKEHNEAIQASKDIERQRKLAEDQRNLVQQQAQAKAQNLRYEDELARKRMQTDNEAQRRHNAELVSMQEASSIRKEKARIATEEQIQAQQRETEKERAELERETIRVKAMAEAEGRAHEAKLTEEQNRRMLLDKINGEREKWLAAINTTFSHIEGGVRTLLTDRSKLIMTVGGVTALAAGVYTTREGARVTWGYINRILGQPSLIRESSMGRFPWAGSVSQFKNKLSTAAGAAASAEGEKPLENVILHRSLKTRIERLARATANTKSHKAPFRNMMFYGPPGTGKTMVAREIARKSGLDYAMMTGGDVAPLGAQAVTKIHEIFDWAKKSNKGLLLFIDEADAFLCERNSTYMSEAQRSALNALLFRTGDQSRDIVLVLATNRPGDLDSAVTDRIDEVIEFPLPGEEERFKLLKLYLNKYLMGDDKKGEKDSNLKWSNLFKKKKSQKITIEGDLTDQVIKEAAKKTEGFSGREIAKLVAGVQAAVYGRQDCVLDSQLFEEIVDYKIEEHHQRIRLATEGGQSFP

SEQ ID NO: 702 - protein, 261 aa, Arabidopsis thaliana
  Clone ID: AT_F20P5.C1.p26.tg
MSRSCSQCGNNGHNSRTCPTDITTTGDNNDKGGGEKAIMLFGVRVTEASSSCFRKSVSMNNLSQFDQTPDPNPTDDGGYASDDVVHASGRNRERKRGTPWTEEEHRLFLTGLHKVGKGDWRGISRNFVKTRTPTQVASHAQKYFLRRTNQNRRRRRSSLFDITPDSFIGSSKEENQLQTPLELIRPVPIPIPIPPSRKMADLNLNKKKTPATTEMFPLSLNLQRPSSSTSSSSNEQKARGSRASSGFEAMSSNGDSIMGVA

SEQ ID NO: 703 - protein, 581 aa, Arabidopsis thaliana
  Clone ID: AT_K13P22.C1.p2.tg
MIMYGGGGAGKDGGSTNHLSDGGVILKKGPWTAAEDEILAAYVRENGEGNWNAVQKNTGLARCGKSCRLRWANHLRPNLKKGSFTGDEERLIIQLHAQLGNKWARMAAQLPGRTDNEIKNYWNTRLKRLLRQGLPLYPPDIIPNHQLHPHPHHQQQQQHNHHHHHHQQQQQHQQMYFQPQSSQRNTPSSSPLPSPTPANAKSSSSFTFHTTTANLLHPLSPHTPNTPSQLSSTPPPPPLSSPLCSPRNNQYPTLPLFALPRSQINNNNNGNFTFPRPPPLLQPPSSLFAKRYNNANTPLNCINRVSTAPFSPVSRDSYTSFLTLPYPSPTAQTATYHNTNNPYSSSPSFSLNPSSSSYPTSTSSPSFLHSHYTPSSTSFHTNPVYSMKQEQLPSNQIPQIDGFNNVNNFTDNERQNHNLNSSGAHRRSSSCSLLEDVFEEAEALASGGRGRPPKRRQLTASLPNHNNNTNNNDNFFSVSFGHYDSSDNLCSLQDLKSKEEESLQMNTMQEDIAKLLDWGSDSGEISNGQSSVVTDDNLVLDVHQLASLFPADSTAVVAATNDQHNKNNNNNCSWDDMQGIR

SEQ ID NO: 704 - protein, 118 aa, Arabidopsis thaliana
  Clone ID: AT_T10P12.C1.p11.tg
MTESIDLNRLESESDNNTDDVTPIFAIDDSAKGYFSLNRRNDVQCQHRWLKVLDPSLQKGAWKKEEDKLLSELVKNYICNYVYIFLSILFNYNKKSNINSYFFGTSKRIKFIIFLFYK

SEQ ID NO: 705 - protein, 147 aa, Arabidopsis thaliana
  Clone ID: AT_MGF10.C1.p19.tg
MADSNQFNMPKPLLSANEDTIMNRRQNNQVMIKTEQIKKKNKRFQMRRICKPTKKASIIKGQWTPEEDKLLVQLVDLHGTKKWSQIAKMLQGRVGKQCRERWHNHLRPDIKVSYFILFSFSYFHRRNKNKISSSILSNSLHDTLRIF

SEQ ID NO: 706 - protein, 441 aa, Arabidopsis thaliana
  Clone ID: AT_F27J15.C1.p31.tg
MESVVATWSREEEKAFENAIALHCVEEEITEDQWNKMSSMVPSKALEEVKKHYQILLEDVKAIENGQVPLPRYHHRKGLIVDEAAAAATSPANRDSHSSGSSEKKPNPGTSGISSSNGGRSGGSRAEQERRKGIPWTEEEHRLFLLGLDKFGKGDWRSISRNFVISRTPTQVASHAQKYFIRLNSMNRDRRRSSIHDITTEPWLRIFDVRTGRIMAGVDGHVVDNSWPIIRWAGGKDDKYFATLIKNTTATQEGAAVNFDDVVGMSWSPTEPILSLLKGDVKNQPKKVVFLQIPGYVELMHKDILSVSDCKMYWQSKGKYLAVQVTRHTCSLFELFRFNKVQGITTEALEVDEKILAFAWEPSGHRFAVIHGDQSKPNVSFYSMETPQNPGKVSKLATFDDKEADALFWSPRGKHIVLAGLKAASMAISSFSTWISLRCSR

SEQ ID NO: 707 - protein, 343 aa, Arabidopsis thaliana
  Clone ID: AT_T8G24.C1.p3.tg
MMMRKPDITTIRDKGKPNHACGGNNNKPKLRKGLWSPDEDEKLIRYMLTNGQGCWSDIARNAGLLRCGKSCRLRWINYLRPDLKRGSFSPQEEDLIFHLHSILGNRWSQIATRLPGRTDNEIKNFWNSTLKKRLKNNSNNNTSSGSSPNNSNSNSLDPRDQHVDMGGNSTSLMDDYHHDENMMTVGNTMRMDSSSPFNVGPMVNSVGLNQLYDPLMISVPDNGYHQMGNTVNVFSVNGLGDYGNTILDPISKRVSVEGDDWFIPPSENTNVIACSTSNNLNLQALDPCFNSKNLCHSESFKVGNVLGIENGSWEIENPKIGDWDLDGLIDNNSSFPFLDFQVD

SEQ ID NO: 708 - protein, 171 aa, Arabidopsis thaliana
  Clone ID: AT_F10O5.C1.p6.tg
MKDVYAKEPWLLDHSNDPFFKEDEWYYFSARTQISEKKIGHGNYSKRKITRDDNDGIDRGKWRWTRRKKISLRIVVWKIQKYKKSKKDKKDHQHEASSSSKPQPIKKKKSKKDHHDEASTSYLEQQPINIECESLLAAYLEQEQPLLWDVPNKSSSSCSVAETESRMEKET

SEQ ID NO: 709 - protein, 174 aa, Arabidopsis thaliana
  Clone ID: AT_T13D8.C1.p13.tg
MKSRREQSIEEAIVANYLKMMIDNVNVWPRHFLRSEDVYCKNPWTLFVTRDPIILHFGRYFFVNRSVNSGLTDGCEYGCWRIIGRDRVIKSVTTGKILGLKKVYKFCETDRKPKSVFKFLEKEKRRVRDRRIWAMEEYRFASTWKQDYVICKIRRLYPQPFDYMLAQHIRGYYK

SEQ ID NO: 710 - protein, 87 aa, Arabidopsis thaliana
  Clone ID: AT_T6A9.C1.p33.tg
MVWFFFSCDEYNEEILKTNSGYWKETVSNTPIIGKWITSNGVKIGEKQVLVFQSYENINGSKSDWVMHVYQPTFLPPNQVIFRIYDV

SEQ ID NO: 711 - protein, 473 aa, Arabidopsis thaliana
  Clone ID: AT_MHK10.C1.p12.tg
MSNHPKITSAHQNVEEKLRELQERFCHLQAARKEGRHGDLALLEAQISQNIREWQAELTAPSPESSLLVRPTPLPYFSMVYGSNSLKNSESGEGISQFLEEFAPLLKLDEEDDATSTLKEHAGAKPDPEGFSQSLCPPEWTSENFSQSPFNGNFSCGFEDALNSTETHGQQLHYGYEGFDPSINSAPDFHDQKLSSNLDITSQYDYIFSEVRQELDNSPSTKLDSSEEIDNFAEFSTPSSVRVPPSAFLGPKCALWDCTRPAQGSEWYLDYCSNYHGTLALNEDSPGTAPVLRPGGISLKDNLLIDALRAKTQGKNVGIPVCEGAVNTKCPWNAAELFHLELVEGETIREWLFFDKPRRAYDSGNRKQRSLPDYSGRGWHESRKQLMKEQEGQKRSYYMDPQPPGPFEWHLFEYQINESDACALYRLELKVGNGKKSPKGKISKDPLADLQKKMGQFKVASDKPSPPTKGRKE

SEQ ID NO: 712 - protein, 76 aa, Arabidopsis thaliana
  Clone ID: AT_T27C4.C1.p5.tg
MVNPVGFRFRPTKEEIVDHYLRPTNFDGDTSHVDRNIMFMQDNRNDYRPPNSLTGVFSDCSSDDNDSDLLSPKTVS

SEQ ID NO: 713 - protein, 347 aa, Arabidopsis thaliana
  Clone ID: AT_T13D8.C1.p17.tg
MKVEDEATYELIKDELMKAEDEATYWLIKEELIKAEDDVIISRYLKRMIVNGDSWPDHFIEDVDVFNKNPNEEFHSQSPRFVIVKPRTENCGRTDGCQSGCWRIIGRDKLIKSKETGKILGFKKILKFCLKKKPREYKRSWVMEEYRLNNNLNCKQDHVICKIRFMFDAEISFLLAKHFSCLSTRSPLPANQLLPAYGVCFFDSEAEGAFYLETIIGYDGNTWPSYVTNDVYRLHPLTLVDPQDDKFKEFGTCIFANRTKTCGKTDECDGGGCWRIVEGHRVIKSKGKVLGYRRIFQFSENEEPRNVCEGEDPKKTAWFIEEYRPDENNKKDKVLCVIKFLIPLNQR

SEQ ID NO: 714 - protein, 356 aa, Arabidopsis thaliana
  Clone ID: AT_MHJ24.C1.p4.tg
MGKTNLAPGFRFHPTDVELVRYYLKRKVMGKKFQVDAIAEVDIYKFEPPDLPDKSCLGTGDLKWYFFCPREKKYPKGGKANRSTECGYWKTTGRDRDVSYNDEVTGKIRTLIYHYGKIPRGDRTDWVIHEYRLEDKVLAQKNVPQDTYVLCVLFKKNGLGPRHGSQYGAPFKEEDWSDKEEEYTQNHLVAGPSKETSLAAKASHSYAPKDGLTGVISESCVSDVPPLTATVLPPLTSDVIAYNPFSSSPLLEVPQVSLDGGELNSMLDLFSVDNDDCLLFDDFDYHNEVRHPDGFVNKEAPVFLGDGNFSGMFDLSNDQVVELQDLIQSPTPHPPSPPAQASIPDDSRSNGQTKDD

SEQ ID NO: 715 - protein, 472 aa, Arabidopsis thaliana
  Clone ID: AT_F5D14.C1.p12.tg
MTYTEFVRTLSEAFSLKSTEINPIISYWMPGEMLVMIDTKRLPVYIDSQVGTHGDDAESDRVCDSVSNVDENNETVDEQDDVEDDKTDEDEEEGDNKDGDGYDDYQGDDGSMGESTLDPTIDGNESTGEDYDYNKWNDIIVKEYGIWNVEENVILTQLTIQHPGKFSRLLAECTYTSQRVPGEDNISHSGDHTPVVTPRSMCQHDEELVGYYLHRRNEGLEIELEIIPLMDLYKFDPWELPEKSFLPNRDMEWFFFCHRDRKYQNGSRINRATKSGYWKATGKDRKIVCHSSSSSSSSSITGCRKTLVFYMGRAPFGGRTEWVMHEYRLFDNDTSQGSLNFKGDFALCRVIKRNEHTLKKCEIISPEVSDESLSNNVNNFCQASDLEKGSCDASNTRLSSPDFILESSFQGNSHSKTEEDSGFQVFTLPEFEYPLEVFADLNFDLEMEDPFMFDYHPEPHMNNEVMSHHIRG

SEQ ID NO: 716 - protein, 246 aa, Arabidopsis thaliana
  Clone ID: AT_MIG5.C1.p2.tg
MAPVGLPPGFRFHPTDEELVNYYLKRKINGQEIELDIIPEVDLYKCEPWDLAEKSFLPSRDPEWYFFGPRDRKYPNGFRTNRATRGGYWKSTGKDRRVTSQSRAIGMKKTLVYYKGRAPQGIRTDWVMHEYRLDDKDCDDPSSLQDSYALCRVFKKNGICSELESERQLQTGQCSFTTASMEEINSNNNNNYNNDYETMSPEVGVSSACVEEVVDDKDDSWMQFITDDAWDTSSNGAAMGHGQGVY

SEQ ID NO: 717 - protein, 317 aa, Arabidopsis thaliana
  Clone ID: AT_MJK13.C1.p16.tg
MGLQELDPLAQLSLPPGFRFYPTDEELMVEYLCRKAAGHDFSLQLIAEIDLYKFDPWVLPSKALFGEKEWYFFSPRDRKYPNGSRPNRVAGSGYWKATGTDKVISTEGRRVGIKKALVFYIGKAPKGTKTNWIMHEYRLIEPSRRNGSTKLDDWVLCRIYKKQTSAQKQAYNNLMTSGREYSNNGSSTSSSSHQYDDVLESLHEIDNRSLGFAAGSSNALPHSHRPVLTNHKTGFQGLAREPSFDWANLIGQNSVPELGLSHNVPSIRYGDGGTQQQTEGIPRFNNNSDVSANQGFSVDPVNGFGYSGQQSSGFGFI

SEQ ID NO: 718 - protein, 364 aa, Arabidopsis thaliana
  Clone ID: AT_MJK13.C1.p17.tg
MESTDSSGGPPPPQPNLPPGFRFHPTDEELVVHYLKRKAASAPLPVAIIAEVDLYKFDPWELPAKASFGEQEWYFFSPRDRKYPNGARPNRAATSGYWKATGTDKPVLASDGNQKVGVKKALVFYSGKPPKGVKSDWIMHEYRLIENKPNNRPPGCDFGNKKNSLRLDDWVLCRIYKKNNASRHVDNDKDHDMIDYIFRKIPPSLSMAAASTGLHQHHHNVSRSMNFFPGKFSGGGYGIFSDGGNTSIYDGGGMINNIGTDSVDHDNNADVVGLNHASSSGPMMMANLKRTLPVPYWPVADEEQDASPSKRFHGVGGGGGDCSNMSSSMMEETPPLMQQQGGVLGDGLFRTTSYQLPGLNWYSS

SEQ ID NO: 719 - protein, 320 aa, Arabidopsis thaliana
  Clone ID: AT_T13D8.C1.p22.tg
MEEDAAFDLLKAELLNAEDDAIISRYLKRMVVNGDSWPDHFIEDADVFNKNPNVEFDAESPSFVIVKPRTEACGKTDGCETGCWRIMGRDKPIKSTETVKIQGFKKILKFCLKRKPRGYKRSWVMEEYRLTNNLNWKQDHVICKIRFMFEAEISFLLAKHFYTTSESLPRNELLPAYGFLSSDKQLEDVSYPVTIMTSEGNDWPSYVTNNVYCLHPLELVDLQDRMFNDYGTCIFANKTCGKTDRCINGGYWKILHRDRLIKSKSGIVIGFKKVFKFHETEKERYFCGGEDVKVTWTLEEYRLSVKQNKFLCVIKFTYDN

SEQ ID NO: 720 - protein, 522 aa, Arabidopsis thaliana
  Clone ID: AT_F9L11.C1.p7.tg
MDLSVENGGLAPGFRFHPTDEELVVYYLKRKIRRKKLRVEAIGETDVYKFDPEELPEKALYKTRDRQWFFFSLRDRKHGSRSSRATERGYWKATGKDRVIHCDSRPVGEKKTLVFHRGRAPNGERTNWVMHEYTLHKEELKRCGGEDVKDAYVLYKIYKKSGSGPKNGEQYGAPFIEEEWAEDDDDDVDEPANQLVVSASVDNSLWGKGLNQSELDDNDIEELMSQVRDQSGPTLQQNGVSGLNSHVDTYNLENLEEDMYLEINDLMEPEPEPTSVEVMENNWNEDGSGLLNDDDFVGADSYFLDLGVTNPQLDFVSGDLKNGFAQSLQVNTSLMTYQANNNQFQQQSGKNQASNWPLRNSYTRQINNGSSWVQELNNDGLTVTRFGDSSEFLNPVPSGISTTNEDDPSKDESSKFASSVWTFLESIPAKPAYASENPFVKLNLVRMSTSGGRFRFTSKSTGNNVVVMDSDSAVKRNKSGGNNDKKKKKNKGFFCLSIIGALCALFWVIIGTMGGSGRPLLW

SEQ ID NO: 721 - protein, 264 aa, Arabidopsis thaliana
  Clone ID: AT_MIJ24.C1.p160.tg
MAKKEKIEEEFEKGNDKEWFIITERNKVDQGLSQTKRVGNGAKRQKRVDTNGGYWHATVAAQKINAGDGVVGNKRPLAYYDRKPSEDVKTDWLMQEYSLDHNNDKGLHFVQDLSYSTSNKEVGEEKKKQKKGEPVEASEGQQPCNAEYHQPLAPLDSCQPQPHDLAEQLDLHQPEQLQLQQPHDIVYQPQYCLLPEQHQLQPFPDNFSELNSFQQQPVMIPDDLEDFLAELMEPHSLDGDEESNNYGFFEGLFDTEGINDKTLH

SEQ ID NO: 722 - protein, 198 aa, Arabidopsis thaliana
  Clone ID: AT_T27C4.C1.p7.tg
MYRCTFNPPEEELINYYLNNKITENDDLVGKQIAEVNILHHEPADLPGLAKIESSHTWYFISPVEKFGKLNRTKRVSRSGHWKITGNSRTIKDVDGNPIGLKKFLVFQENKRSSSSSLSTTTTQQQKTNWIIHEFHSFLPHPNKMLTENKNEDYGGDYCNGLDELLQSLEQGESSGLLFGENGHACEQDTAENSNVTM

SEQ ID NO: 723 - protein, 447 aa, Arabidopsis thaliana
  Clone ID: AT_F13M14.C1.p24.tg
MGRESLAVVSSPPSATAPSTAVSATSLAPGFRFHPTDEELVSYYLKRKVLGKPVRFDAIGEVDIYKHEPWDLAVFSKLKTRDQEWYFFSALDKKYGNGARMNRATNKGYWKATGKDREIRRDIQLLGMKKTLVFHSGRAPDGLRTNWVMHEYRLVEYETETNGSLLQDAYVLCRVFHKNNIGPPSGNRYAPFMEEEWADGGGALIPGIDVRVRVEALPQANGNNQMDQEMHSASKDLININELPRDATPMDIEPNQQNHHESAFKPQESNNHSGYEEDEDTLKREHAEEDERPPSLCILNKEAPLPLLQYKRRRQNESNNNSSRNTQDHCSSTITTVDNTTTLISSSAAAATNTAISALLEFSLMGISDKKENQQKEETSPPSPIASPEEKVNDLQKEVHQMSVERETFKLEMMSAEAMISILQSRIDALRQENEELKKKNASGQAS

SEQ ID NO: 724 - protein, 206 aa, Arabidopsis thaliana
  Clone ID: AT_MAC12.C1.p3.tg
MEVEKRIVVNGGMKLPIGYRFHPTEQELILHYLLPKAFASPLPSSIIPVFDLFFSHPLSFPGDQKEKQRYFFCKKREVSSNEHRIKISSGDGYWKPIGKERPIIACGKTFGIRRTLAFYETNKSSSYCNKTRWSMTEYCLAGFASAKVSGEWAVYNVYERKGSKGRKQRKSREGDDEELRCIDHFTVGSNHETGPPPPSPPTSADE

SEQ ID NO: 725 - protein, 451 aa, Arabidopsis thaliana
  Clone ID: AT_F13M14.C1.p23.tg
MGRESVAVVTAPPSATAPGTASVATSLAPGFRFHPTDEELVSYYLKRKVLGQPVRFDAIGEVDIYKHEPWDLAVFSRLKTRDQEWYFYSALDKKYGNGARMNRATNRGYWKATGKDREIRRDILLLGMKKTLVFHSGRAPDGLRTNWVMHEYRLVEYETEKNGNLVQDAYVLCRVFHKNNIGPPSGNRYAPFMEEEWADDEGALIPGIDVKLRLEPPPVANGNDQMDQEIQSASKSLININEPPRETAPLDIESDQQNHHENDLKPEEHNNNNNYDENEETLKREQMEEEERPPRPVCVLNKEAPLPLLQYKRRRQSESNNNSSRNTQDHCSSTTTTVDNTTTLISSSAAATNTAISALLEFSLMGISDKKEKPQQPLRPHKEPLPPQTPLASPEEKVNDLQKEIHQMSVERETFKLEMMSAEAMISILQSRIDALRQENEELKKNNANGQ

SEQ ID NO: 726 - protein, 298 aa, Arabidopsis thaliana
  Clone ID: AT_F20D21.C1.p15.tg
MSLPPGFRFHPTDEELVAYYLDRKVNGQAIELEIIPEVDLYKCEPWDLPEKSFLPGNDMEWYFYSTRDKKYPNGSRTNRATRAGYWKATGKDRTVESKKMKMGMKKTLVYYRGRAPHGLRTNWVMHEYRLTHAPSSSLKESYALCRVFKKNIQIPKRKGEEEEAEEESTSVGKEEEEEKEKKWRKCDGNYIEDESLKRASAETSSSELTQGVLLDEANSSSIFALHFSSSLLDDHDHLFSNYSHQLPYHPPLQLQDFPQLSMNEAEIMSIQQDFQCRDSMNGTLDEIFSSSATFPASL

SEQ ID NO: 727 - protein, 395 aa, Arabidopsis thaliana
  Clone ID: AT_T28K15.C1.p2.tg
MNSFSHVPPGFRFHPTDEELVDYYLRKKVASKRIEIDFIKDIDLYKIEPWDLQELCKIGHEEQSDWYFFSHKDKKYPTGTRTNRATKAGFWKATGRDKAIYLRHSLIGMRKTLVFYKGRAPNGQKSDWIMHEYRLETDENGTPQEEGWVVCRVFKKRLAAVRRMGDYDSSPSHWYDDQLSFMASELETNGQRRILPNHHQQQQHEHQQHMPYGLNASAYALNNPNLQCKQELELHYNHLVQRNHLLDESHLSFLQLPQLESPKIQQDNSNCNSLPYGTSNIDNNSSHNANLQQSNIAHEEQLNQGNQNFSSLYMNSGNEQVMDQVTDWRVLDKFVASQLSNEEAATASASIQNNAKDTSNAEYQVDEEKDPKRASDMGEEYTASTSSSCQIDLWK

SEQ ID NO: 728 - protein, 172 aa, Arabidopsis thaliana
  Clone ID: AT_F14D16.C1.p24.tg
MSEVLTRGFRFRPADEEVTDYLMRKTQSPEFSCFIKTIDLYDKDPWVLGHVRDPCYNHYEWYYFVKKNPLGNEYLDKPRLNGFEHPRLKWDVLKQIHDALSSGQNVPPSVFTYGFRFHPTDQELLSLYLTPKAHSPDFSCFIRERESYMPWSHGFLNMLDLLFTRTVNGTTL

SEQ ID NO: 729 - protein, 371 aa, Arabidopsis thaliana
  Clone ID: AT_T13D8.C1.p21.tg
MEDNDAAYDQVKSELLNSEDEVIISRYLKPMVVNGDSWPDHFIEDANVFTKNPNEVFNSERPRFVIVKPRTEACGKTDGCESGCWRTMGRDKLIKSEETGKILGFKKILKFCIKWKPIEYKRSWVMEEYRLTNNLNWKQDHVICKIRLLFEAEISFLLAKHFYTTSESLLRHELLPSYGYLSNTQEEDEFYLKTIMTSEGNDWPSYVTNNVYCLHPLELVDLQDVMFQSYGTCIFANGTCGESDKCDGGYWKILHGDKLIKSNFGMVTGFKKVFEFYETVIHRYFCDGEEVKEETERLGHQRCQGLLLPHRRGHVQTKSCGVVTVKEKRSLVEQPEEIVAAPETPRQGKSEHNDPLKRKKAIGCVGEKAEM

SEQ ID NO: 730 - protein, 576 aa, Arabidopsis thaliana
  Clone ID: AT_F23M19.C1.p14.tg
MVDSSRDSCFKAGKFSAPGFRFHPTDEELVVYYLKRKICCKKLRVNAIGVVDVYKVDPSELPGNFQHLLIDFDSCLSMLKTGDRQWFFFTPRNRKYPNAARSSRGTATGYWKATGKDRVIEYNSRSVGLKKTLVFYRGRAPNGERTDWVMHEYTMDEEELGRCKNAKEYYALYKLYKKSGAGPKNGEQYGAPFQEEEWVDSDSEDADSVAVPDYPVVRYENGPCVDDTKFCNPVKLQLEDIEKLLNEIPDAPGVNQRQFDEFVGVPQGNSAEVIQSTLLNNSSGEYIDPRTNGMFLPNGQLYNRDSSFQSHLNSFEATSGMAPLLDNEKEEYIEMNDLLIPELGASSTEKSTEFLNHGEFGDVNEYDQLFNDISVFQGTSTDLSCLSNFTNNTSGQRQQLLYEQFQYQTPENQLNNYMHPSTTLNQFTDNMWFKDDQAALYVQPPQSSSGAFTSQSTGVMPESMNPTMSVNPQYKEGQNGGGTRSQFSSALWELLESIPSTPASACEGPLNQTFVRMSSFSRIRFNGTSVTSRKVTVAKKRISNRGFLLLSIMGALCAIFWVFKATVGVMGRPLLS

SEQ ID NO: 731 - protein, 335 aa, Arabidopsis thaliana
  Clone ID: AT_T10D17.C1.p80.tg
MAAAPPIEPAVTTTFPGFKFSPTDIELISYYLKRKMDGLERSVEIIPEVEIYNFEPWDLPDKSIVKSDSEWFFFCARGKKYPHGSQNRRATKIGYWKATGKERNVKSGSEVIGTKRTLVFHIGRAPKGGRTEWLMHEYCMIGVSLDALVICRLRRNTEFQGSTIQKPPQPSLPLDKHVNLRNEAISESIYGWETMVDFYLSSESGQELLSEIAESSQSSQNPQVPSEEDFYADILRDEIVKLDDPAVSGNTLINVPRLQTESNTTRVLPLPDMVDKQMQSLLQKLPLQNDTGEENNISMSNCFIGIYSIKSINRARWDVVVWLLVMIAVLVFYLV

SEQ ID NO: 732 - protein, 359 aa, Arabidopsis thaliana
  Clone ID: AT_T6A9.C1.p6.tg
MMNPVGFRFRPNDEEIVDHYLRPKNLDSDTSHVDEVISTVDICSFEPWDLPSKSMIKSRDGVWYFFSVKEMKYNRGDQQRRRTNSGFWKKTGKTMTVMRKRGNREKIGEKRVLVFKNRDGSKTDWVMHEYHATSLFPNQMMTYTVCKVEFKGEETEISSSSTGSEIEQIHSLIPLVNSSGGSEGSSFHSQELQNSSQSGVFANVQGESQIDDATTPIEEEWKTWLNNDGDEQRNIMFMQDHRSDYTPLKSLTGVFSDDSSDDNDSDLISPKTNSIGTSSTCASFASSNHQIDQTQHSPDSTVQLVSLTQEVSQGPGQVTVIREHKLGEESVKKKRASFVYRMIHRLVKKIHQCYSISRT

SEQ ID NO: 733 - protein, 489 aa, Arabidopsis thaliana
  Clone ID: AT_T5E8.C1.p130.tg
MGKTQLAPGFRFHPTDVELVRYYLKRKILGKKLLVDAIAEVDIYKFEPPDLPDMSFIRSGDLKWHFFCPREKKYASGVRANRATECGYWKTTGKERPVLCNSEVVGKIKTLVYHFGKSPRGERTDWVMHEYRLDDKVLTQMNVPQDTYVVCVLFKKDGPGPRNGAQYGAPFKEEDWSDEEVRTDVPSTSNPTNLLEPSKETTLALTAPDDSNKDCFGGMISESCVSDFLPATTNTTSELPHPSDAATTPMSTAPLAETVQTPNNDDLYSMLDLFDDDEEFLGFNNNEVRYDPGVSAPVCLEEEGIFNGLPELSSMPRTASYDLVENSELYLELQDLTAPLNPQTGLQDLTAPFNPQTGLQDLTAPFNHQTGLQDHTAPFNPQTGLQDHTAPFNHQTGLQDLTAPFNPQTGLQDLTAPFNPQTGLHDLTSPFNPQTGLQDLTAPLNPQTGNRNDPRSSSFLYNQGHFDFSGGNDDDPYGFSASMRHRPKM

SEQ ID NO: 734 - protein, 305 aa, Arabidopsis thaliana
  Clone ID: AT_T16O9.C1.p16.tg
MSSSNGGVPPGFRFHPTDEELLHYYLKKKISYEKFEMEVIKEVDLNKIEPWDLQDRCKIGSTPQNEWYFFSHKDRKYPTGSRTNRATHSGFWKATGRDKCIRNSYKKIGMRKTLVFYKGRAPHGQKTDWIMHEYRIEDTEDDPCEDGWVVCRVFKKKNLFKVGNDVGSNISNNRLEARSFIRRESPYQGISMFELNKPEEISVHQYPQPPMFQPHHKPLSIGYDYSLALLPRESEYQQACQPSGVEVGTCKAVSEWGIVNCNMVSHEDSSRAMRFEDDGNNTSSTVQPPSNLLSLRGENGFLGLF

SEQ ID NO: 735 - protein, 147 aa, Arabidopsis thaliana
  Clone ID: AT_F20L16.C1.p20.tg
MMPMTEEFYDEEEELGCFRFNPSEEELILDYLLPKLGFHQPNTIYLLEDRDNIYAKEPWRLNHTENDIFEPNEWFYFVKRTNRKVKGWKATGELKDVVSKKTGEVIGKKRNLRFYVEGDESKTSGWTMREYSSIGNQNQRLCHLKGP

SEQ ID NO: 736 - protein, 276 aa, Arabidopsis thaliana
  Clone ID: AT_F2J7.C1.p1.tg
MSASASSDPRQVVWKSNPSRHCPKCQHVIDNSDVVDDWPGLPRGVKFDPSDPEIIWHLLAKSGLSGLSSHPFIDEFIPTVNQDDGICYTHPKNLPGVKSDGTVSHFFHKAIKAYSTGTRKRRKIHDDDFGDVRWHKTGRTKPVVLDGVQRGCKKIMVLYGGKAVKTNWVMHQYHLGIEEDEKEGDYVVSKIFYQQPQQLVVKRGDKAEQEVSEDIFAAVTPTADPVTPKLATPEPRNAVRICSDSHIASDYVTPSDYVSAHEVSLAEVRIFVVAFY

SEQ ID NO: 737 - protein, 577 aa, Arabidopsis thaliana
  Clone ID: AT_F12G12.C1.p20.tg
MADSSPDSCFKGGKFSAPGFRFHPTDEELVMYYLKRKICRKRLRVNVIGVVDVYKMDPEELPGQSMLKTGDRQWFYFTPRSRKYPNAARSNRGTENGYWKATGKDRVIEYNSRSVGLKKTLVFYRGRAPSGERTDWVMHEYTMDEDELGRCKNPQEYYALYKLFKKSGAGPKNGEQYGAPFQEEEWVDDDNEDVNAIAVAVPEQPVVRYEDARRVDERRLFNPVILQLEDIDELLNGIPNAPGVPQRCIPQVNSEEELQSTLVNNSAREFLPNGQQYNRPSSFDSLETAEVTSAPLVFEKEDFIEMDDLLLIPEFGASSTEKAAQFSNHGEFDDFNEFDQLFHDVSMSLDMEPIDQGTSANLSSLSDSANYTSDQKQQLLYQQFQDQTPENQLNNIMDPSTTLNQITSDIWFEDDQAILFDQQQSFSGAFASPSSGVMPDSTNPTMSVNAQGHEIQNGGGTTSQFSSALWALMDSIPSTPASACEGPLNRTFVRMSSFSRMRFNGKANGTPVSTTIAKKGIRNRGFLLLSIVGALCAIFWVLVATVRVSAPVICVVLTVIVIPICGTVATEEREYDP

SEQ ID NO: 738 - protein, 394 aa, Arabidopsis thaliana
  Clone ID: AT_T7I23.C1.p18.tg
METPVGLRFCPTDEEIVVDYLWPKNSDRDTSHVDRFINTVPVCRLDPWELPCQSRIKLKDVAWCFFRPKENKYGRGDQQMRKTKSGFWKSTGRPKPIMRNRQQIGEKKILMFYTSKESKSDWVIHEYHGFSHNQMMMTYTLCKVMFNGGMREKSSSSPSSSGVSGIEQSRRDSLIPQLVNNSEGSSLHREDPSQFGDVLQEAPIEDAKLTEELVKWLMNDEDDAQIEDAIPIEEWETWLNDIDDAKEKSIMFMHDNRSDYRPPNSLTGVFSDDVSSDDNDSDLLTPKTNSIQTSSTCDSFGSSNHRIDQIKDLQESPTSTINLVSLTQEVSQALITSIDTAEKKKNPYDDAQGTEIGEHKLGQETIKKKRAGFFHRMIQKFVKKIHLCSSISRT

SEQ ID NO: 739 - protein, 192 aa, Arabidopsis thaliana
  Clone ID: AT_MUB3.C1.p5.tg
MNLPPGFRFFPTDEELVVHFLHRKASLLPCHPDVIPDLDLYHYDPWDLPGKALGEGRQWYFYSRKTQERVTSNGYWGSMGMDEPIYTSSTHKKVGIKKYLTFYLGDSQTNWIMQEYSLPDSSSSSSRSSKRSSRASSSSHKPDYSKWVICRVYEQNCSEEEDDDGTELSCLDEVFLSLDDLDEMEEDRQLGK

SEQ ID NO: 740 - protein, 350 aa, Arabidopsis thaliana
  Clone ID: AT_T6A9.C1.p7.tg
MANPVGFRFRPTDGEIVDIYLRPKNLESNTSHVDEVISTVDICSFDPWDLPSHSRMKTRDQVWYFFGRKENKYGKGDRQIRKTKSGFWKKTGVTMDIMRKTGDREKIGEKRVLVFKNHGGSKSDWAMHEYHATFSSPNQGERREFSVATGSGIKHTHSLIPPTNNSGVLSVETEGSLFHSQESQNPSQFSGFLDVDALDRDFCNILSDDFKGFFNDDDEQSKIVSMQDDRNNHTPQKPLTGVFSDHSTDGSDSDPISATTISIQTLSTCPSFGSSNPLYQITDLQESPNSIKLVSLAQEVSKTPGTGIDNDAQGTEIGEHKLGQETIKNKRAGFFHRMIQKFVKKIHLRT

SEQ ID NO: 741 - protein, 193 aa, Arabidopsis thaliana
  Clone ID: AT_K7B16.C1.p4.tg
MDISAQRFAMNGRSMRLPPGFRFDPDDEDLVFEYLAKKVLHRPMDFDLPELRSCNVDPWDLLGEKNKEVYYFVKKEERERKGRETLSGYWEECEEEEVMEAGGRDCIHLEGRRKTFAFFIGKKPRGTITPWIMYEFRLLSSRATRWSSSPLPRGEVGKWRAVKVVVKEENDEEMVEDEHESDESDGEEVIQSR

SEQ ID NO: 742 - protein, 394 aa, Arabidopsis thaliana
  Clone ID: AT_F23N19.C1.p7.tg
MNSFSQVPPGFRFHPTDEELVDYYLRKKVASKRIEIDIIKDVDLYKIEPCDLQELCKIGNEEQSEWYFFSHKDKKYPTGTRTNRATKAGFWKATGRDKAIYIRHSLIGMRKTLVFYKGRAPNGQKSDWIMHEYRLETSENGTPQEEGWVVCRVFKKKLAATVRKMGDYHSSPSQHWYDDQLSFMASEIISSSPRQFLPNHHYNRHHHQQTLPCGLNAFNNNNPNLQCKQELELHYNQMVQHQQQNHHLRESMFLQLPQLESPTSNCNSDNNNNTRNISNLQKSSNISHEEQLQQGNQSFSSLYYDQGVEQMTTDWRVLDKFVASQLSNDEEAAAVVSSSSHQNNVKIDTRNTGYHVIDEGINLPENDSERVVEMGEEYSNAHAASTSSSCQIDL

SEQ ID NO: 743 - protein, 370 aa, Arabidopsis thaliana
  Clone ID: AT_F4P13.C1.p14.tg
MARAWIVDGRGIAAKVKNASLSSALQIQDCGAHIKCPNCTYRIDNSNVLIPWPGLPKGVKFEPTDEDIIEFLEAKCGIGGSEPHVLIEEFIRPVTEDVGINYTHPQNLPGANKDGVSVFFFHKTVQAYGTGQRKRRKITPTLVNDEPVRWHKTGRTKPVMLSGVQRGCKKIMVLYKSARKGTKPEKSNWVLHQYHLGTEGKEIGDYVVSKITYQQQKLGENPDEGESSSGVRGGPTTPKTNTPTPPSLVDGVAGDEEAFDDLKMFDPFFEELDSIPEAALGKMWSKKARMDEEFVVNLSEDNLICDESMEASSLWENQVLPNPSLGTVGDFDGFSISDLENADLGTPPDFLTVRSCLKKTLFTFGKFNGT

SEQ ID NO: 744 - protein, 806 aa, Arabidopsis thaliana
  Clone ID: AT_F22C12.C1.p26.tg
MTLQSQSSHCLNVHSSMVRDIEKCEQKTKRDIEKKNTKSGGVRLNSRRLIHGRVAEKGTKSLPSLTQVTFEGEELKLKSGSHYFKSLDDAIDFFDYMVRSRPFYTAVDCNKVIGVFVRMNRPDVAISLYRKMEIRRIPLNIYSFNILIKCFCDCHKLSFSLSTFGKLTKLGFQPDVVTFNTLLHGLCLEDRISEALALFGYMVETGFLEAVALFDQMVEIGLTPVVITFNTLINGLCLEGRVLEAAALVNKMVGKGLHIDVVTYGTIVNGMCKMGDTKSALNLLSKMEETHIKPDVVIYSAIIDRLCKDGHHSDAQYLFSEMLEKGIAPNVFTYNCMIDGFCSFGRWSDAQRLLRDMIEREINPDVLTFNALISASVKEGKLFEAEKLCDEMLHRCIFPDTVTYNSMIYGFCKHNRFDDAKHMFDLMASPDVVTFNTIIDVYCRAKRVDEGMQLLREISRRGLVANTTTYNTLIHGFCEVDNLNAAQDLFQEMISHGVCPDTITCNILLYGFCENEKLEEALELFEVIQMSKIDLDTVAYNIIIHGMCKGSKVDEAWDLFCSLPIHGVEPDVQTYNVMISGFCGKSAISDANVLFHKMKDNGHEPDNSTYNTLIRGCLKAGEIDKSIELISEMRSNGFSGDAFTIKMAEEIICRVSDEEIIENYLRPKINGETSSIPRYVVELAEELYTVEPWLLPRQTAPILNPGEWFYFGKRNRKYSNLEGVHCEGSWILEDGCIAVLSKETGEEIGGTTRFRYYYRNKGDKESRLKMSNWFMREYRLYYKSRRVFNGRQVFCIITCNDEHFIE

SEQ ID NO: 745 - protein, 318 aa, Arabidopsis thaliana
  Clone ID: AT_T13D8.C1.p25.tg
MADTLLNAEDEVIISRYLKPMIVNRVSWPDLFIEDADVFNKDPYVKFHAEIPSFVIVKPRTKACGKTDGCDSGCWRIIGRDKLIKSEETGKILGFKKILKFCLKWKPREYKRSLVMEEYRLTNNFNWKQDHVICKIRLLFEAEISFLLAKHFYTTSDSLPRNVLLPAYGFCSPDKQEEDEFYPVTIMISEGKDWPSYVTNNVYCLHPSELVNVHDGKFHDNGICIFANRTCGVTDKCNEGYWKIKHREKLIMSRYGQTIGWKKVFQFYETEKERHFGNGEEVKVTWTLKEYRLTRKMNKNKVVCVIKYKVKCLPRITS

SEQ ID NO: 746 - protein, 252 aa, Arabidopsis thaliana
  Clone ID: AT_F3M18.C1.p9.tg
MRSDKVGSIKDLPSLPAGVKFDPSDKEILMHLEAKVSSDKRKLHPLIDEFIPTLEGENGICYTHPEKLPGVSKDGQVRHFFHRPSKAYTTGTRKRRKVSTDEEGHETRWHKTGKTRPVLSQSGETGFKKILVLYTNYGRQKKPEKTNWVMHQYHLGSSEDEKDGEPVLSKVFYQTQPRQCGSMEPKPKNLVNLNRFSYENIQAGFGYEHGGKSEETTQVIRELVVREGDGSCSFLSFTCDASKGKESFMKNQ

SEQ ID NO: 747 - protein, 322 aa, Arabidopsis thaliana
  Clone ID: AT_T13D8.C1.p18.tg
MEDDDAAYDLIKHELLYSEDEVIISRYLKGMVVNGDSWPDHFIEDANVFTKNPDKVFNSERPRFVIVKPRTEACGKTDGCDSGCWRIIGRDKLIKSEETGKILGFKKILKFCLKRKPIDYKRSWVMEEYRLTNNLNWKQDHVICKIRFMFEAEISFLLSKHFYTTSESVLENELLPSYGYYLSNTQEEDEFYLDAIMTSEGNEWPSYVTNNVYCLHPLELVDLQDRMFNDYGTCIFANKTCGETDKCDGGYWKILHGDKLIKSNFGKVIGFKKVFEFYETVRQIYLCDGEEVTVTWTIQEYRLSKNVKQNKVLCVIKLTYDR

SEQ ID NO: 748 - protein, 567 aa, Arabidopsis thaliana
  Clone ID: AT_T32M21.C1.p10.tg
MGRGSVTSLAPGFRFHPTDEELVRYYLKRKVCNKPFKFDAISVTDIYKSEPWDLPDKSKLKSRDLEWYFFSMLDKKYSNGSKTNRATEKGYWKTTGKDREIRNGSRVVGMKKTLVYHKGRAPRGERTNWVMHEYRLSDEDLKKAGVPQEAYVLCRIFQKSGTGPKNGEQYGAPYLEEEWEEDGMTYVPAQDAFSEGLALNDDVYVDIDDIDEKPENLVVYDAVPILPNYCHGESSNNVESGNYSDSGNYIQPGNNVVDSGGYFEQPIETFEEDRKPIIREGSIQPCSLFPEEQIGCGVQDENVVNLESSNNNVFVADTCYSDIPIDHNYLPDEPFMDPNNNLPLNDGLYLETNDLSCAQQDDFNFEDYLSFFDDEGLTFDDSLLMGPEDFLPNQEALDQKPAPKELEKEVAGGKEAVEEKESGEGSSSKQDTDFKDFDSAPKYPFLKKTSHMLGAIPTPSSFASQFQTKDAMRLHAAQSSGSVHVTAGMMRISNMTLAADSGMGWSYDKNGNLNVVLSFGVVQQDDAMTASGSKTGITATRAMLVFMCLWVLLLSVSFKIVTMVSAR

SEQ ID NO: 749 - protein, 175 aa, Arabidopsis thaliana
  Clone ID: AT_T5P19.C1.p170.tg
MEPTHRALPVGFRFRSTNCEISNYFLKKKALGQPMKARTIPEECHDIFSRHPHDLPGYPSEEHWYYFCRKRDNQVTSNSHNLWTPIGEETNVLDPKNNDALVGIKRRFTLIAQEEEESDNICLSDDEEALKYNWFMDEISLPQTVANTDWVLCHIFGKKTKPETTDLSTIDSESE

SEQ ID NO: 750 - protein, 314 aa, Arabidopsis thaliana
  Clone ID: AT_F27G19.C1.p10.tg
MGVREKDPLAQLSLPPGFRFYPTDEELLVQYLCRKVAGYHFSLQVIGDIDLYKFDPWDLPSKQTCFTFVGEYNCNYLGKALFGEKEWYFFSPRDRKYPNGSRPNRVAGSGYWKATGTDKIITADGRRVGIKKALVFYAGKAPKGTKTNWIMHEYRLIEHSRSHGSSKLDDWVLCRIYKKTSGSQRQAVTPVQACREEHSTNGSSSSSSSQLDDVLDSFPEIKDQSFNLPRMNSLRTILNGNFDWASLAGLNPIPELAPTNGLPSYGGYDAFRAAEGEAESGHVNRQQNSSGLTQSFGYSSSGFGVSGQTFEFRQ

SEQ ID NO: 751 - protein, 350 aa, Arabidopsis thaliana
  Clone ID: AT_F18O22.C1.p280.tg
MKTLHRTWIVDGPWISRNVKNASLSSALQIKDCGAYINCFNCSYRIDNSNVLTPWPGLPKGVKFEPTDEEVIEHLEAKCGIDGLKPHLLIQDFICSVTQDVGINYTHPQNLPGVSKDGTSVFFFNKTAHAYQNGQRKRRRITPTSLKDDTVRWHKTGQTKPVMLNGIQKGCKKIMVLYKSARKGFKPEKSNWVLHQYHLGTEEGEIGEYVVSKITYQQPKQQEKTIDESESSGVRGGPSTPKTSTITQVRPVISVDEDEIAFDDDSKMVLDSYAEGLENIQEASSGSTSDKIAKVGGNVSVIEDNLMSKKIEASSIPNHGNVDYGSGNFSVSDLENAELGTLPDLLSVRT

SEQ ID NO: 752 - protein, 558 aa, Arabidopsis thaliana
  Clone ID: AT_F13M14.C1.p22.tg
MGRGSVTSLAPGFRFHPTDEELVRYYLKRKICNKPFKFDAISVTDVYKSEPWDLPDKSRLKSRDLEWYFFSMLDKKYRNGSKTNRATEMGYWKTTGKDREILNGSKVVGMKKTLVYHKGRAPRGERTNWVMHEYRLVDQDLDKTGVHQDAFVLCRIFQKSGSGPKNGEQYGAPFVEEEWEEEDDMTFVPDQEDLGSEDHVYVHMDDIDQKSENFVVYDAIPIPLNFIHGESSNNVETNYSDSINYIQQTGNYMDSGGYFEQPAESYEKDQKPIIRDRDGSLQNEGIGCGVQDKHSETLQSSDNIFGTDTSCYNDFPVESNYLIGEAFLDPNSNLLENDGLYLETNDLSSTQQDGFDFEDYLTFFDETFDPSQLMGNEDVFFDQEELFQEVETKELEKEETSRSKHVVEEKEKDEASCSKQVDADATEFEPDDGSISENADYKYPLLKKASHMLGAIPAPLANASEFPTKDAAIRLHAAQSSGSVHVTAGMITISDSNMGWSYGKNENLDLILSLGLVQGNTAPEKSGNSSAWAMLIFMCFWVLLLSVSFKVSILVSSR

SEQ ID NO: 753 - protein, 281 aa, Arabidopsis thaliana
  Clone ID: AT_F21B7.C1.p37.tg
MKILPVGSRFCPTDLGLVRLYLRNKVERNQSSFITTMDIHQDYPWLLPHVNNPLFNNNEWYYFVPLTERGGKILSVHRKVAARGGSEGGTWRSNDGKKEIKDGHMQKGDGLRASDDLQKVVLCRIRYKKEANVNEFGLVNHQAHQTQDALTGFADQLEMMLEGQEDREQKEEADLTGFADSLETMLEGQEDHEQPEDADLTGFADSLETMLEGHEDREQPEEAELTVTQQQQQQQQQQQRQEDCDVTQEQEKDDVMVLINNPNDALALGNYEIIDLTRVDK

SEQ ID NO: 754 - protein, 228 aa, Arabidopsis thaliana
  Clone ID: AT_T5P19.C1.p210.tg
MFDFKIFTFSFAQSKYLENIREKTLTEVSTSDIELLRRNSQPFRRATPCSLTVDLQANSFTPKLQSYLMMMPGRNKRKERSWPEPQTQPQSEIPSSSSSLAADNMSPPSTIAYVLPPGFKFMPNDKEVINCYLKPYSDGNTNVLLNVPIHRVNIYESNPQTLSGRNVATLTEDIGTQKWLPKRFKAGDGVVGNKRPLAYYVGKPSEGVKTDWLMQEYSLDHSSHNTTR

SEQ ID NO: 755 - protein, 269 aa, Arabidopsis thaliana
  Clone ID: AT_MBK5.C1.p27.tg
MKAELNLPAGFRFHPTDEELVKFYLCRRCASEPINVPVIAEIDLYKFNPWELPEMALYGEKEWYFFSHRDRKYPNGSRPNRAAGTGYWKATGADKPIGKPKTLGIKKALVFYAGKAPKGIKTNWIMHEYRLANVDRSASTNKKNNLRLDDWVLCRIYNKKGTMEKYLPAAAEKPTEKMSTSDSRCSSHVISPDVTCSDNWEVESEPKWINLEDALEAFNDDTSMFSSIGLLQNDAFVPQFQYQSSDFVDSFQDPFEQKPFLNWNFAPQG

SEQ ID NO: 756 - protein, 305 aa, Arabidopsis thaliana
  Clone ID: AT_F20O9.C1.p190.tg
MTWCNDRSDVQTVERIIPSPGAAESPVASLPVSCHKTCPSCGHNFKFHEQAGIHDLPGLPAGVKFDPTDQEVLEHLEGKVRDDAKKLHPLIDEFIRTIDGENGICYTHPEKLPGVNKDGTVRHFFHRPSKAYTTGTRKRRKVHTDSDVGGETRWHKTGKTRPVLAGGRVRGYKKILVLYTNYGKQKKPEKTNWVMHQYHLGTSEEEKEGELVVSKVFYQTQPRQCGGSVAAAATAKDRPYLHGLGGGGGRHLHYHLHHNNGNGKSNGSGGTAGAGEYYHNIPAIISFNQTGIQNHLVHDSQPFIP

SEQ ID NO: 757 - protein, 320 aa, Arabidopsis thaliana
  Clone ID: AT_F11P17.C1.p16.tg
MGDSSIGPGHPHLPPGFRFHPTDEELVVHYLKKKADSVPLPVSIIAEIDLYKFDPWELPSKASFGEHEWYFFSPRDRKYPNGVRPNRAATSGYWKATGTDKPIFTCNSHKVGVKKALVFYGGKPPKGIKTDWIMHEYRLTDGNLSTAAKPPDLTTTRKNSLRLDDWVLCRIYKKNSSQRPTMERVLLREDLMEGMLSKSSANSSSTSVLDNNDNNNNNNEEHFFDGMVVSSDKRSLCGQYRMGHEASGSSSFGSFLSSKRFHHTGDLNNDNYNVSFVSMLSEIPQSSGFHANGVMDTTSSLADHGVLRQAFQLPNMNWHS

SEQ ID NO: 758 - protein, 340 aa, Arabidopsis thaliana
  Clone ID: AT_T27C4.C1.p6.tg
MENPVGLRFRPTDKEIVVDYLRPKNSDRDTSHVDRVISTVTIRSFDPWELPCKIKLKDESWCFFSPKENKYGRGDQQIRKTKSGYWKITGKPKPILRNRQEIGEKKVLMFYMSKELGGSKSDWVMHEYHAFSPTQMMMTYTICKVMFKGDVREISSSSASYGSEIEQSRDSLIPLLVNDSEEEAQIEDAIPIEEWETWLTDDGVDEQVNHIMNMKDDRNNHRPQKPLTGVLIDDSSDDDDDSDLLSPTTNSIENSSTCDSFGSSDQINLVSLTQEVSQALITSIDTPEKIKSPYDDAQGTGAGGQKLGQETREKKRAGFFHRMIQIFVKKIHQCSSISRT

SEQ ID NO: 759 - protein, 314 aa, Arabidopsis thaliana
  Clone ID: AT_MYF24.C1.p11.tg
MEENLPPGFRFHPTDEELITHYLCRKVSDIGFTGKAVVDVDLNKCEPWDLPAKASMGEKEWYFFSQRDRKYPTGLRTNRATEAGYWKTTGKDKEIYRSGVLVGMKKTLVFYKGRAPKGEKSNWVMHEYRLESKQPFNPTNKEEWVVCRVFEKSTAAKKAQEQQPQSSQPSFGSPCDANSSMANEFEDIDELPNLNSNSSTIDYNNHIHQYSQRNVYSEDNTTSTAGLNMNMNMASTNLQSWTTSLLGPPLSPINSLLLKAFQIRNSYSFPKEMIPSFNHSSLQQGVSNMIQNASSSSQVQPQPQEEAFNMDSIW

SEQ ID NO: 760 - protein, 334 aa, Arabidopsis thaliana
  Clone ID: AT_F14G6.C1.p2.tg
MMLAVEDVLSELAGEERNERGLPPGFRFHPTDEELITFYLASKIFHGGLSGIHISEVDLNRCEPWELPEMAKMGEREWYFYSLRDRKYPTGLRTNRATTAGYWKATGKDKEVFSGGGGQLVGMKKTLVFYKGRAPRGLKTKWVMHEYRLENDHSHRHTCKEEWVICRVFNKTGDRKNVGLIHNQISYLHNHSLSTTHHHHHEALPLLIEPSNKTLTNFPSLLYDDPHQNYNNNNFLHGSSGHNIDELKALINPVVSQLNGIIFPSGNNNNDEDDFDFNLGVKTEQSSNGNEIDVRDYLENPLFQEASYGLLGFSSSPGPLHMLLDSPCPLGFQL

SEQ ID NO: 761 - protein, 386 aa, Arabidopsis thaliana
  Clone ID: AT_MIK19.C1.p7.tg
MKNSKCNLIDSKLEEHHHLCGSKHCPGCGRMIQAATKPNWVGLPAGVKFDPTDQELIEHLEAKVKGKEENKKWSSSHPLIDEFIPTIDGEDGICYTHPQKLPGVTRDGLSKHFFHKPSRAYTTGTRKRRKIIQTDHDSELTGSSETRWHKTGKTRPVMINGQQRGCKKILVLYTNFGKNRRPEKTNWVMHQYHLGINEEEREGELVVSKIFYQTQPRQCVSNTNWSDHHGSKDVIGIGVGDEISSVAATLQSLGSGDVVSRVNMHPHTRSFDEGTAEASKGRENQHVSGTCEEVHDGIITSSMSSHHMIHDHHNQHHQIGDRREFHMSSSYPMTPTITSQHESIFHVTSTMPFQGSVVWFGIRRPNYGLYHSYVYRRRKFLTNLCI

SEQ ID NO: 762 - protein, 212 aa, Arabidopsis thaliana
  Clone ID: AT_MEE6.C1.p16.tg
MGPTYRALPVGMRFRPSDLELAVYFLIKKALGLPMKALTVPDECNDIFSTHPRDLPGYGSEEHWYFYCKKPKNQVTRTKSYNLWIPTGEKTDVLDPKKNGGELVGIKHSFTFIENEEEEESDNKNGDEEEPPQCNWFLDEISLPLTVVDTDWTLCHIFYEKVKPEFGNLHIVESESESEEEEEDESVDKPAESLDSVKEKDGTVLPPPPATP

SEQ ID NO: 763 - protein, 498 aa, Arabidopsis thaliana
  Clone ID: AT_F17A13.C1.p50.tg
MNKSNPAGSVTGSDIIDAKIEEHQLCGSKKCPSCGHKLEGKPQDWVGLPAGVKFDPTDQELIEHLEAKVLAKDFKSHPLIDEFIPTIEGEDGICYTHPEKLPGVTRDGLSRHFFHRPSKAYTTGTRKRRKIQTECDNNLQGSSSSGETRWHKTGKTRPVMVNGKQKGCKKILVLYTNFGKNRKPEKTNWVMHQYHLGTHEEEKEGELVVSKIFYQTQPRQCNWSSSTSSLNAIGGGGGEASSGGGGGEYHMRRDSGTTSGGSCSSSREIINVNPPNRSDEIGGVGGGVMAVAAAAAAVAAGLPSYAMDQLSFVPFMKSFDEVARRETPQTGHATCEDVMAEQHRHRHQPSSSTSHHMAHDHHHHHHQQQQQRHHAFNISQPTHPISTIISPSTSLHHASINILDDNPYHVHRILLPNENYQTQQQLRQEGEEEHNDGKMGGRSASGLEELIMGCTSSTTHHDVKDGSSSMGNQQEAEWLKYSTFWPAPDSSDNQDHHG

SEQ ID NO: 764 - protein, 631 aa, Arabidopsis thaliana
  Clone ID: AT_F12P19.C1.p8.tg
MAPVSMPPGFRFHPTDEELVIYYLKRKINGRTIELEIIPEIDLYKCEPWDLPGKSLLPSKDLEWFFFSPRDRKYPNGSRTNRATKAGYWKATGKDRKVTSHSRMVGTKKTLVYYRGRAPHGSRTDWVMHEYRLEEQECDSKSGIQDAYALCRVFKKSALANKIEEQHHGTKKNKGTTNSEQSTSSTCLYSDGMYENLENSGYPVSPETGGLTQLGNNSSSDMETIENKWSQFMSHDTSFNFPPQSQYGTISYPPSKVDIALECARLQNRMLPPVPPLYVEGLTHNEYFGNNVANDTDEMLSKIIALAQASHEPRNSLDSWDGGSASGNFHGDFNYSGEKVSCLEANVEAVDMQEHHVNFKEERLVENLRWVGVSSKELEKSFVEEHSTVIPIEDIWRYHNDNQEQEHHDQDGMDVNNNNGDVDDAFTLEFSENEHNENLLDKNDHETTSSSCFEVVKKVEVSHGLFVTTRQVTNTFFQQIVPSQTVIVYINPTDGNECCHSMTSKEEVHVRKKINPRINGVSSTVLGQWRKFAHVIGFIPMLLLMRCVHRGNSNKNRGSEGYSRQPTRGDCNNRGTILMMENAVVRRKIWKKKKEKNMVDEQGFRFQDSFVLKKLGLSLAIILAVSTISLI

SEQ ID NO: 765 - protein, 371 aa, Arabidopsis thaliana
  Clone ID: AT_F20B17.C1.p1.tg
MEIGSSSTVAGGGQLSVPPGFRFHPTEEELLYYYLKKKVSYEPIDLDVIREVDLNKLEPWELKEKCRIGSGPQNEWYFFSHKDKKYPTGTRTNRATAAGFWKATGRDKSIHLNSSKKIGLRKTLVFYTGRAPHGQKTEWIMHEYRLDDSENEIQEDGWVVCRVFKKKNHFRGFHQEQEQDHHHHHQYISTNNDHDHHHHIDSNSNNHSPLILHPLDHHHHHHHIGRQIHMPLHEFANTLSHGSMHLPQLFSPDSAAAAAAAAASAQPFVSPINTTDIECSQNLLRLTSNNNYGGDWSFLDKLLTTGNMNQQQQQQVQNHQAKCFGDLSNNDNNDQADHLGNNNGGSSSSPVNQRFPFHYLGNDANLLKFPK

SEQ ID NO: 766 - protein, 379 aa, Arabidopsis thaliana
  Clone ID: AT_F3P11.C1.p8.tg
MSNDKDSMNMSDLSTALNEEDRAGLVNALKNKLQNLAGQHSDVLENLTPPVRKRVEFLREIQNQYDEMEAKFFEERAALEAKYQKLYQPLYTKRYEIVNGVVEVEGAAEEVKSEQGEDKSAEEKGVPDFWLIALKNNEITAEEITERDEGALKYLKDIKWSRVEEPKGFKLEFFFDQNPYFKNTVLTKTYHMIDEDEPILEKALGTEIEWYPGKCLTQKILKKKPKKGSKNTKPITKTEDCESFFNFFSPPQVPDDDEDLDDDMADELQGQMEHDYDIGSTIKEKIISHAVSWFTGEAVEADDLDIEDDDDEIDEDDDEEDEEDDEDDEEEDDEDDDEEEEADQGKKSKKKSSAGHKKAGRSQLAEGQAGERPPECKQQ

SEQ ID NO: 767 - protein, 255 aa, Arabidopsis thaliana
  Clone ID: AT_F6A14.C1.p10.tg
MVTDKSKKAKTEEENVEQIDAELVLSIEKLQEIQDDLEKINEKASDEVLEVEQKYNVIRKPVYDKRNEIIKTIPDFWLTAFLSHPALGELLTEEDQKIFKYLSSLDVEDAKDVKSGYSITFSFNPNPFFEDGKLTKTFTFLEEGTTKITATPIKWKEGKGLANGVNHEKNGNKRALPEESFFTWFSDAQHKEDVEDEMQDEVADIIKEDLWPNPLTYFNNDADEEDFDGDDDGDEEEKEGDSDEDDDEEDEVGEE

SEQ ID NO: 768 - protein, 963 aa, Arabidopsis thaliana
  Clone ID: AT_F13E7.C1.p16.tg
MGRRGRLEIQSGTCNVCSAPCSSCMHHNAEFSGSKSDESSDENSHGVLASQCSFNGDNLLRSSGVNAPGSSHNTSSEASHLVNSNHDTSSENAESKEIIRSSDISHGPLLDRPHKDQDSMKVDSCNDHQARSTLGQGKVKEKSGAKNNEEKKNTLTGSSKHSGPRVGKSGENVLLNKADESNTSAMSDSESENDPEMLELDVKVCDTCGDAGREDLLAICSRCSDGAEHTYCMRVMLKKVPKGYWLCEECKFAEKAEKHKLETKRKRESEVNVNTQISSKRHIDKFEAVPDSKRLAVGAQIGSPKRSVLPRMSTLSRETSFKGLEKPTRKLAHYSSFNSHSSDDTESTRSTDSQLQSPKGSFLKSNSFNSLSSRSKVRPVDDDMLPRQKTGNENSSLEVKEGFSKNVGKSMSSRCIDVGSSNCNDSKVKGSKQLKDWSTEANPSASISRGNSSIPYAKSPRDLKDLQSDGKQVGDSSKNEKCSSSEQISSEAKCKDELAQVDGVPRSREFREAGEKTKDAVGNHQKRNIGEDNNKGNRLRAAVDAALRKKPSFSKNRGLEQSDLPPVSNVDSGCNKALKCLSSKVPVIRDWPVGFQGLPGGHPNLRTDKQTNTVNEKQFTLAGTDATTASQSVEPEVNDPSVQSVMRDLPVAAPNVLSTTSAIPKPEYIWQGDLEVQKSRNLSAMHSGIQAYLSTLASPKVVEVVKQFPEKVTLNEVPRLSSWPAQFQDTGAKEQHVALFFFAKDIESYEKNYKPLVDNMIQKDLALKGNLEGVELLIFASNQLPQDCQRWNMLFFLWGVFRGKKESCSNPPKNTPLPASCVSPNRDTFRHENPSNKKSLTDRTLSRMQSCMKEEDAKEGKACSGTEKENAFSVSYGEGEVDVETEEGEIGVSPQLKYEKTAGPGTVKSADMNQRVNVDDLNKEGLCEGPANKKLKTVTGVETGCSIVRRDTSVHKFASRKFV

SEQ ID NO: 769 - protein, 270 aa, Arabidopsis thaliana
  Clone ID: AT_F20D21.C1.p47.tg
MAIARTGVYVDDYLEYASTFPAELQRLLNTVRELDERSQWLASQSSKKGNGNHYNNGGLDEEETIEKMRKEIESSQENALSLCTEKVLLARQAYDLIDSHVKRLDEDLNNFAEDLKQEGKIPPDEPSVLPPLPIVPKAEKRKSFYGTPQPKKIDYRDRDWDRDRDFELMPPPGSNRKDLMPIEEQPIDPNEPTYCVCHQVSFGDMIACDNENCQGGEWFHYTCVGLTPETRFKGKWCHWHLLWHLPFMTNATKLIFLVTQHLASASRSKL

SEQ ID NO: 770 - protein, 1065 aa, Arabidopsis thaliana
  Clone ID: AT_K2A11.C1.p4.tg
MESEGETAGKPMKNIVPQTCQICSDNVGKTVDGDRFVACDICSFPVCRPCYEYERKDGNQSCPQCKTRYKRLKGSPAIPGDKDEDGLADEGTVEFNYPQKEKISERMLGWHLTRGKGEEMGEPQYDKEVSHNHLPRLTSRQDTSGEFSAASPERLSVSSTIAGGKRLPYSSDVNQSPNRRIVDPVGLGNVAWKERVDGWKMKQEKNTGPVSTQAASERGGVDIDASTDILADEALLNDEARQPLSRKVSIPSSRINPYRMVIMLRLVILCLFLHYRITNPVPNAFALWLVSVICEIWFALSWILDQFPKWFPVNRETYLDRLALRYDREGEPSQLAAVDIFVSTVDPLKEPPLVTANTVLSILAVDYPVDKVSCYVSDDGAAMLSFESLAETSEFARKWVPFCKKYSIEPRAPEWYFAAKIDYLKDKVQTSFVKDRRAMKREYEEFKIRINALVSKALKCPEEGWVMQDGTPWPGNNTRDHPGMIQVFLGQNGGLDAEGNELPRLVYVSREKRPGFQHHKKAGAMNALVRVSAVLTNGPFILNLDCDHYINNSKALREAMCFLMDPNLGKQVCYVQFPQRFDGIDKNDRYANRNTVFFDINLRGLDGIQGPVYVGTGCVFNRTALYGYEPPIKVKHKKPSLLSKLCGGSRKKNSKAKKESDKKKSGRHTDSTVPVFNLDDIEEGVEGAGFDDEKALLMSQMSLEKRFGQSAVFVASTLMENGGVPPSATPENLLKEAIHVISCGYEDKSDWGMEIGWIYGSVTEDILTGFKMHARGWRSIYCMPKLPAFKGSAPINLSDRLNQVLRWALGSVEILFSRHCPIWYGYNGRLKFLERFAYVNTTIYPITSIPLLMYCTLPAVCLFTNQFIIPQISNIASIWFLSLFLSIFATGILEMRWSGVGIDEWWRNEQFWVIGGVSAHLFAVFQGILKVLAGIDTNFTVTSKASDEDGDFAELYLFKWTTLLIPPTTLLIVNLVGVVAGVSYAINSGYQSWGPLFGKLFFAFWVIVHLYPFLKGLMGRQNRTPTIVVVWSVLLASIFSLLWVRIDPFTSRVTGPDILECGINC

SEQ ID NO: 771 - protein, 399 aa, Arabidopsis thaliana
  Clone ID: AT_muf9.C1.p60.tg
MDLEANCKEKLSYFRIKELKDVLTQLGLSKQGKKQELVDRILTLLSDEQAARLLSKKNTVAKEAVAKLVDDTYRKMQVSGASDLASKGQVSSDTSNLKVKGEPEDPFQPEIKVRCVCGNSLETDSMIQVIWDELTAFIPCEDPRCHVWQHVGCVILPDKPMDGNPPLPESFYCEICRLTRADPFWVTVAHPLSPVRLTATTIPNDGASTMQSVERTFQITRADKDLLAKPEYDVQAWCMLLNDKVLFRMQWPQYADLQVNGVPVRAINRPGGQLLGVNGRDDGPIVCFLSSLLSSNPFELHIGVNLSYIENLAISDVSFNHFILLFWQITSCIRDGVNRISLSGGDVRIFCFGVRLVKRRTLQQVLITYMHKKHSKIWSYMWSMKSPNINVQKGTKLIF

SEQ ID NO: 772 - protein, 598 aa, Arabidopsis thaliana
  Clone ID: AT_F15E12.C1.p5.tg
MAIQTQLPCDGDGVCMRCQVNPPSEETLTCGTCVTPWHVSCLLPESLASSTGDWECPDCSGVVVPSAAPGTGISGPESSGSVLVTAIRAIQADVTLTEAEKAKKRQRLMSGGGDDGVDDEEKKKLEIFCSICIQLPERPVTTPCGHNFCLKCFEKWAVGQGKLTCMICRSKIPRHVAKNPRINLALVSAIRLANVTKCSGEATAAKVHHIIRNQDRPDKAFTTERAVKTGKANAASGVLVGESWEDRQECRQWGVHFPHVAGIAGQAAVGAQSVALSGGYDDDEDHGEWFLYTGSGGRDLSGNKRVNKIQSSDQAFKNMNEALRLSCKMGYPVRVVRSWKEKRSAYAPAEGVRYDGVYRIEKCWSNVGVQGLHKMCRYLFVRCDNEPAPWTSDEHGDRPRPLPDVPELENATDLFVRKESPSWGFDEAEGRWKWMKSPPVSRMALDTEERKKNKRAKKGNNAMKARLLKEFSCQICRKVLSLPVTTPCAHNFCKACLEAKFAGITQLRDRSNGVRKLRAKKNIMTCPCCTTDLSEFLQNPQVNREMMEIIENFKKSEEEAEVAESSNISEEEGEEESEPPTKKIKMDKNSVGGTSLSA

SEQ ID NO: 773 - protein, 622 aa, Arabidopsis thaliana
  Clone ID: AT_F15E12.C1.p8.tg
MAIQTQLPCDGDGVCMRCQVTPPSEETLTCGTCVTPWHVSCLLPESLASSTGDWECPDCSGVVVPSAAPGTGISGPESSGSVLVAAIRAIQADVTLTEAEKAKKRQRLMSGGGDDGVDDEEKKKLEIFCSICIQLPERPVTTPCGHNFCLKCFEKWAVGQGKLTCMICRSKIPRHVAKNPRINLALVSAIRLANVTKCSGEATAAKVHHIIRNQDRPDKAFTTERAVKTGKANAASGKFFVTIPRDHFGPIPAANDVTRNQGVLVGESWEDRQECRQWGVHFPHVAGIAGQAAVGAQSVALSGGYDDDEDHGEWFLYTGSGGRDLSGNKRVNKIQSSDQAFKNMNEALRLSCKMGYPVRVVRSWKEKRSAYAPAEGVRYDGVYRIEKCWSNVGVQGLHKMCRYLFVRCDNEPAPWTSDEHGDRPRPLPDVPELENATDLFVRKESPSWGFDEAEGRWKWMKSPPVSRMALDTEERKKNKRAKKGNNAMKARLLKEFSCQICRKVLSLPVTTPCAHNFCKACLEAKFAGITQLRDRSNGVRKLRAKKNIMTCPCCTTDLSEFLQNPQVNREMMEIIENFKKSEEEAEVAESSNISEEEEEESEPPTKKIKMDNNSVGDTSLSA

SEQ ID NO: 774 - protein, 650 aa, Arabidopsis thaliana
  Clone ID: AT_F12K22.C1.p15.tg
MTPATQYPCDPEGVCMRCKSMPPPEESLTCGTCVTPWHVSCLLSPPETLSATLQWLCPDCSGETNPLPVSGVAAGYGSVGSDLVAAIHSIEADETLSAEEKAKKKQQLLSGKGVVDEDDEEEKKKTSKGKKPIDVLSHFECSFCMQSLQKPVSVRVLFALALMLVWFLESTPCGHNACLKCFLKWMGQGHRSCGTCRSVIPESMVTNPRINLSIVSAIRLARVSEKADARTSKVVHYVDNEDRPDKAFTTERAKKTGNANASSGKIFVTIPRDHFGPIPAENDPVRNQGLLVGESWKGRLACRQWGAHFPHVSGIAGQASYGAQSVVLAGGYDDDEDHGEWFLYTGRTNTVQAFDQVFLNFNEALRLSCKLGYPVRVVRSTKDKRSPYAPQGGLLRYDGVYRIEKCWRIVGIQMCRFLFVRCDNEPAPWTSDEHGDRPRPLPNVPELNMATDLFERKESPSWDFDEGEDRWRWMKPPPASKKAVKNVLDPEERKLLREAIKSANPNTMRARLLKEFKCQICQKVMTNPVTTPCAHNFCKACLESKFAGTALVRERGSGGRKLRSQKSVMKCPCCPTDIAEFVQNPQVNREVAEVIEKLKKQEEEENAKSLDEGQCSGTSHEEEDDEQPKKRIKLDTDAEVSATVVESDMK

SEQ ID NO: 775 - protein, 380 aa, Arabidopsis thaliana
  Clone ID: AT_F21B23.C1.p40.tg
MSNPSFKLDDNAPTVSWAESRSGGEGDSSASQVKALYIKNLPRDITQERLKALFEHHGKILKVVIPPAKPGKEDSRYGFVHYAERTSVMRALKNTERYEIDASAYSQPLMHAGGHAAGGMSMMPIMLPDGRIRYVLQQPGLAAMPQPPPRPSPPYRGGSGSSSSKQSSDNVAFHLFRFQDQRNLFNFKPSEFKKALEEAVLAENGVDGNCVDAEISSPDSSATESDQDYGPASRFQAPSASGDILSVLRHEGIYTYCIGMDDIRTRDACGSVMPLKSLKRTKDSQPEELLCKYCSKLRKSNQYCGICKRIWHPPDDRDWVCCDGCNVWDGFMLNATTLRMSALRCSYTSPCILCFDFVSMKDYCRMTVLIWLSAQQLLLP

SEQ ID NO: 776 - protein, 1040 aa, Arabidopsis thaliana
  Clone ID: AT_MYN8.C1.p4.tg
MIIKRKLKTLKRCNSTNEEDDIVRKKRKVNLNGGGSGGDYYYPLNLLGEIGAGIVPGKNGFSVSLCKQVSCSPKVEVVEEEEEEEEIKSTRLVSRPPLVKTSRGRVQVLPSRFNDSVIENWRKDNKSSGEEREEEIEEEACRKEKVKVSSNHSLKIKQQETKFTPRNYKYSSSSALCGEIDDEDKCEEIVRYGNSFEMKKQRYVDDEPRPKKEGVYGPEDFYSGDLVWGKSGRNEPFWPAIVIDPMTQAPELVLRSCIPDAACVMFFGHSGTENERDYAWVRRGMIFPFVDYVERLQEQSELRGCNPRDFQMALEEALLADQGFTEKLMQDIHMAAGNQTFDDSVYRWVEEAAGSSQYLDHVAPSQDMKKYRNPRACVGCGMVLSFKMAQKMKALIPGDQLLCQPCSKLTKPKHVCGICKRIWNHLDSQSWVRCDGCKVWIHSACDQISHKHFKVHVHVALCQIYHSQLLSCIEINFICYLKDLGETDYYCPTCRTKFDFELSDSEKPDSKSKVVCKCGSCGPERKALSEWERHTGSKAKNWRTSVKVKSSKLPLEEWMMKLAEFHANATAAKPPKRPSIKQRKQRLLSFLREKYEPVNVKWTTERCAVCRWVEDWDYNKIIICNRCQIAVHQECYGTRNVRDFTSWVCKACETPEIKRECCLCPVKGGALKPTDVETLWVHVTCAWFQPEVCFASEEKMEPALGILSIPSSNFVKICVICKQIHGSCTQCCKCSTYYHAMCASRAGYRMELHCLEKNGRQITKMVSYCSYHRAPNPDTVLIIQTPSGVFSAKSLVQNKKKSGTRLILANREEIEESAAEDTIPIDPFSSARCRLYKRTVNSKKRTKEEGIPHYTGGLRHHPSAAIQTLNAFRHVAEEPKSFSSFRERLHHLQRTEMERVCFGRSGIHGWGLFARRNIQEGEMVLEYRGEQVRGIIADLREARYRREGKDCYLFKISEEVVVDATEKGNIARLINHSCMPNCYARIMSVGDDESRIVLIAKTTVASCEELTYDYLFDPDEPDEFKVPCLCKSPNCRKFMN

SEQ ID NO: 777 - protein, 1008 aa, Arabidopsis thaliana
  Clone ID: AT_T1E2.C1.p10.tg
MAKGTATGEFVAVSQVRTGCKRELQFVLKSQSEICGGESLGRTRGSRNLNGESRSVEVKKSIRASGLKSGIKKMRFSKDEEVGEVVMSDTVGVGLEEEEVKSDVIDVDSALVESMSEDKGLEEKNDVEIENGDDNVVMNEDHLLEQTEKVSEKVIEAEKVCSIGGDSVIDREIVVACPAGLSVMEKMASRSCKVKLERGLVYAKPCKRLTRSMLKVEGIKSEVNADDDHVNPEKDAIGSEDNCVDVSGSVAYVVEEELLEQNNVEICLGLPSRSSQMNGHSLCLGLPSRSFQMSGHSQGVDKKAVNDTVDKPLRRFTRSLVKQESDSDNPNLGNTTEPADLVDVDMHANDVEMDGFQSPSVTTPNKRGRPKKFLRNFPAKLKDIFDCGILEGLIVYYVRGAKVVSPAMFELHASSNNKRPPEYILLESGFTLRDVMNACKENPLATLEEKLRVVVGPILKKSSLCLSCQGPMIEPCDTKSLVVCKSCLESKEPEFHNSPSKANDALNGSSRPSVDPKSILRRSKSSPRQSNRREQPTRKSTEPGVVPGTILSESKNSSIKSNSHGKLTRKDLRLHKLVFEDDILPDGTEVGYFVAGEVSPSTFEAHAGCASRRKPFQHIYTTNGVSLHELSVALSMDQRFSIHENDDLCSICRDGVCASLPSLPSERWSCKYCVNMVEREKFVDSNLNAIAAGRVQGVDAIAEITNRCIRIVSSFVTELPSVCVLCRGHSFCRLGFNARTVIICDQCEKEFHVGCLKERDIADLKELPEEKWFCSLGCEEINTTLGNLIVRGEEKLSNNILNFLRKKEQPNEENCPDYKTTPDIRWRVLSGKLTSSDDTKILLAKALSILHERFDPISESGTKGDLIPAMVYGRQTKAQDFSGMYCTMLAVDEVIVSVGIFRVFGSELAELPLVATSKDCQGQGYFQCLFACIERLLGFLNVKHIVLPAADEAKSIWTDKFGFTKMTDEEVKEYRKDYSVMIFHGTSMLRKSVPAPSAVSKTEASKEE

SEQ ID NO: 778 - protein, 641 aa, Arabidopsis thaliana
  Clone ID: AT_F12K22.C1.p14.tg
MARDIQLPCDGDGVCMRCKSNPPPEESLTCGTCVTPWHVSCLSSPPKTLASTLQWHCPDCSGEIDPLPVSGGATGFESAGSDLVAAIRAIEADESLSTEEKAKMRQRLLSGKGVEEDDEEEKRKKKGKGKNPNLDVLSALGDNLMCSFCMQLPERPVTKPCGHNACLKCFEKWMGQGKRTCGKCRSIIPEKMAKNPRINSSLVAAIRLAKVSKSAAATTSKVFHFISNQDRPDKAFTTERAKKTGKANAASGKIYVTIPPDHFGPIPAENDPVRNQGLLVGESWEDRLECRQWGAHFPHVAGIAGQSTYGAQSVALSGGYKDDEDHGEWFLYTGSGGRDLSGNKRTNKEQSFDQKFEKSNAALKLSCKLGYPVRVVRSHKEKRSAYAPEEGVRYDGVYRIEKCWRKVGVQVCRYLFVRCDNEPAPWTSDENGDRPRPIPNIPELNMATDLFERKETPSWDFDEGEGCWKWMKPPPASKKSVNVLAPEERKNLRKAIKAAHSNTMRARLLKEFKCQICQQVLTLPVTTPCAHNFCKACLEAKFAGKTLVRERSTGGRTLRSRKNVLNCPCCPTDISDFLQNPQVNREVAEVIEKLKTQEEDTAELEDEDEGECSGTTPEEDSEQPKKRIKLDTDATVSATIR

SEQ ID NO: 779 - protein, 697 aa, Arabidopsis thaliana
  Clone ID: AT_T8O11.C1.p2.tg
MAITAYDALTERQKAPKVLLINDFAISSSSSSPPFFNLAATFRDNIRSFLREYAEIEDYTIDGATVSTIFLGSQANGVVFPLYIIEQQISDSSPNPLCDFCRCFGWGHHYVTKRKYHMIIPNRDEWNEPLKRESLTLSSHLMHGLIHCNGFGHLLCINTDLDDPNHLSGDQIMDFWDRLCSTLHTRKISLDDTSKKGAMDLRLLHGVAYGRPWFGKWDYMFSHGSFGVKKDLYWRAILTLSSIEVDKILEELSGTSKGRVMKKIIDFYRGSTESPLATLSDLLRFMLGFISKAPIERKTAMALVAMSLDHVSYPTLRADENSEVCTSPDQESDDNGYESGRDTVLDDHNTTTSGIKPPQYYSFDDLSRREHSRWPGRRLNDAAQAVLKVFKERNSTISRQDLREAVRSSIGDTGLIDFLLKHIDKVLIGDQIVQRSTNPKSRMLQFSLRTINSRVQEQKRKKKRKVKPQETSECTSTTPGLSPYDDILYLYQNLLLTYPDSDLYSEASQVILKCKSFVKEWSYQEQNHLTVSCQVLPNHEELLRDFTRLLPPGDLVAVPENATIRELKSAAEKVLRDTYCITETFEVLEIRNRYLEKLDDNVSLKSQGNTEFMVKGFGLDIGTELRYEGGFDDWTVDCKCGARDDDGERMVACDACKVWHHTLCNSIEDDEAVPSVFLCNMCYGDSLRSKKRNLSIR

SEQ ID NO: 780 - protein, 1133 aa, Arabidopsis thaliana
  Clone ID: AT_T20M3.C1.p8.tg
MSCVPKEEEGEDTQIKTELHDHAADNPVRYASLESVYSVSSSSSSLCCKTAAGSHKKVNALKLPMSDSFELQPHRRPEIVHVYCRRKRRRRRRRESFLELAILQNEGVERDDRIVKIESAELDDEKEEENKKKKQKKRRIGNGELMKLGVDSTTLSVSATPPLRGCRIKAVCSGNKQDGSSRSKRNTVKNQEKVVTASATAKKWVRLSYDGVDPKHFIGLQCKVFWPLDAVWYPGSIVGYNVETKHHIVKYGDGDGEELALRREKIKFLISRDDMELLNMKFGTNDVVVDGQDYDELVILAASFEECQDFEPRDIIWAKLTGHAMWPAIIVDESVIVKRKGLNNKISGGRSVLVQFFGTHDFARYLKEYKLPGRMDQLQKVADTDCSERINSGEEDSSNSGDDYTKDGEVWLRPTELGDCLHRIGDLQIINLGRIVTDSEFFKDSKHTWPEGYTATRKFISLKADPNASAMYKMEVLRDAESKTRPVFRVTTNSGEQFKGDTPSACWNKIYNRIKKIQIASDNPDVLGEGLHESGTDMFGFSNPEVDKLIQGLLQSRPPSKVSQRKYSSGKYQDHPTGYRPVRVEWKDLDKCNVCHMDEEYENNLFLQCDKCRMMVHTRCYGQLEPHNGILWLCNLCRPVALDIPPRCCLCPVVGGAMKPTTDGRWAHLACAIWIPETCLLDVKKMEPIDGVKKVSKNNDADFQCSNNTCRVAYHPLCARAAGLCVEVLSYPTGDHKLADEDRLFLLSMDDDEADQCIRLLSFCKRHRQTSNYHLETEYMIKPAHNIAEYLPPPNPSGCARTGRKEPEALAGASSKRLFVENQPYIVGGYSRHEFSTYERIYGSKMSQITTPSNILSMAEKYTFMKETYRKRLAFGKSGIHGFGIFAKLPHRAGDMVIEYTGELVRPPIADKREHLIYNSMVGAGTYMFRIDNERVIDATRTGSIAHLINHSCEPNCYSRVISVNGDEHIIIFAKRDVAKWEELTYDYRFFSIDERLACYCGFPRCRGVVNDTEAEERQANIHASRCSGAICEGKSSEPAVRQTQVKWREGKKFRVEVMNKCPMCPIINLRLKCQGFPQSLVDPTFLRVLSSSAGNCVVNDGLPLSPMQTLSFNYSNTHQFALRPLSWSFQCE

SEQ ID NO: 781 - protein, 1065 aa, Arabidopsis thaliana
  Clone ID: AT_F13B15.C1.p20.tg
MVAGSYRRYEFVRNRDDSDDGLKPLKDLNGQICQICGDDVGLTKTGNVFVACNECGFPLCQSCYEYERKDGSQCCPQCKARFRRHNGSPRVEVDEKEDDVNDIENEFDYTQGNNKARLPHRAEEFSSSSRHEESLPVSLLTHGHPVSGEIPTPDRNATLSPCIDPQLPGIYQLLLLPVRILDPSKDLNSYGLVNVDWKKRIQGWKLKQDKNMIHMTGKYHEGKGGEFEGTGSNGDELQMVDDARLPMSRVVHFPSARMTPYRIVIVLRLIILGVFLHYRTTHPVKDAYALWLTSVICEIWFAFSWLLDQFPKWYPINRETFLDRLALRYDRDGEPSQLAPVDVFVSTVDPMKEPPLVTANTVLSILAVDYPVDKVACYVSDDGSAMLTFEALSETAEFSKKWVPFCKKFNIEPRAPEFYFSQKIDYLKDKIQPSFVKERRAMKREYEEFKVRINILVAKAQKIPEDGWTMEDGTSWPGNNPRDHPGMIQVFLGHSGGLDTDGNELPRLIYVSREKRPGFQHHKKAGAMNALIRVSAVLTNGAYLLNVDCDHYFNNSKAIKEAMCFMMDPAIGKKCCYVQFPQRFDGIDLHDRYANRNTVFFDINLKGLDGIQGPVYVGTGCCFNRQALYGYDPVLTEEDLEPNIIVKSCFGSRKKGKSRKIPNYEDNRSIKRSDSNVPLFNMEDIDEDVEGYEDEMSLLVSQKRLEKRFGQSPVFIAATFMEQGGLPSTTNPLTLLKEAIHVISCGYEAKTDWGKEIGWIYGSVTEDILTGFKMHARGWISIYCVPSRPAFKGSAPINLSDRLNQVLRWALGSIEILLSRHCPIWYGYNGRLKLLERIAYINTIVYPITSIPLLAYCMLPAFCLITNTFIIPEISNLASLCFMLLFASIYASAILELKWSDVALEDWWRNEQFWVIGGTSAHLFAVFQGLLKVFAGIDTNFTVTSKASDEDGDFAELYVFKWTSLLIPPTTILLVNLVGIVAGVSYAINSGYQSWGPLMGKLLFAFWVVAHLYPFLKGLLGRQNRTPTIVIVWSALLASIFSLLWVRINPFVSTTGVMSNSFMGE

SEQ ID NO: 782 - protein, 1357 aa, Arabidopsis thaliana
  Clone ID: AT_F1N21.C1.p4.tg
MAPPRKRTRDLMPKFLNTESFDEFNQRLNNLPAESNVTSDEDAQFLESRKCQSKRWRKEEPLKLNLRSPWNVLCSPESISSAKFIVEKTCLIPVPSFEEAATNARRCLNTSSIPGSSGSASETNSGSDITKQDFKNDSPSDSKKVQGSSTSKSAKPKVIKVYSFVDLVTTTKKGNIQTEESSLNHEKKLGTVVDIVEPMKCDERSKEVQGSSTSKSAKPKVIKVYSFADVVTTTKKGNIQTEESSLNHEKKLGTVVDIIEPMKCDERSKEVQGSSTSKSAKLKVIKVYSFADVVTTTKKGNIQTEESSLNHEKKLGTVVDIVEPMKCDERSKEVQGSSTSKSEKPKVIKVYSFADVVTTTKKGNIQTEESSLNHEKKLGTVVDIVEPMKCDEGTKCEVTTTNKGKIHTEERSLNHEKKLGTVVDIVEPMKCDEGSKCEVTTTNKGNTQTEERSLNHEKKLGIGVDIVEPMKCDEGTKCEVTTTNKGKIQTEERSLNYEKKLGIGVDIVEPMKCDEENKCEVNADTFDVVIVEPMKCNKVTKCEVNVDTTGVNIVEPMKCNEVTKCEVNVDTIGVDIVEPMKCNEESKCEVNADTMSLQKRSKRAVSLVERFTEEEIKLHIMSLKKPSTQSAVEGMCDLKEEEESCQLCDDGTLLFPPQPLYCLLCSRRIDDRSFYYTPGEEELSNAQHQICSPCHSRCKTKFPLCGVFIDKHKMLKRSNFDNADTEEWVQCESCEKWQHQICGLYNKLKDEDKTAEYICPTCLLEECQSINNMALVDYTDSGAKDLPETVLSYFLEQRLFKRLKEERYQTAKATGKSINDVPEPEGLTLRVVFSADRTLTVNKQFASLLHKENFPSEFPYRSKVILLFQKVHGVDICIFALFVQEFGSECSQPNQRSTYIFYLDSVKYFKPERVTFAGEALRTFVYHEVLIGYLEYCKLRGFTTSYIWACPPKIGQDYIMYSHPKTQQTPDTKKLRKWYVSMLQKAAEQRVVMNVTNLYDRFFDSTEEYMTAARLPYFEGSFWSNRAEIMIQDIEREGNNELQKKVKLLSRRKVKTMSYKTTGDVDVDDVKNILLMEKLEKEVFPNKKDLMVVELNYSCTRCSKAVLSGLRWFCEKCKNLHLCESCYDAGQELPGEHIYKRMDKEKHQLSKVQVNGVLFSTTEDNDIIQENDMFESRQAFLAFSQKHNYNFHTLRHAKHSSMMILHHLHTSNKHHCSQNSSSLTCTACKKDVSTTIYFPCLLCPDYRACTGCYTKNRTLRHLHIFPTLPSANRAPSRTVMVLEILNAISHALLCQHKTTKSCSYPKCHEVKALFTHNVQCKIRKKGTRCNTCYKLWQTIRIHVYHCQDLNCPVPQCR

SEQ ID NO: 783 - protein, 443 aa, Arabidopsis thaliana
  Clone ID: AT_T32A16.C1.p30.tg
MASGVFEDEAEGTITINEYIERLDAEELAADLVLGGDEGDECTFPKGYMKRQAIFSCITCTPEGNAGICTACCLSCHDGHELLELWTKRNFRCDCGNSKFGTLACKLLPSKDIENSENSYNHNFKGLYCTCDRPYPDPNVEEQVEMIQCCLCEDWFHEEHLGLTPSDSVGSQIPRDEESEPIYEDFICQNCSPACSFLTLYPENLWVVAKVDSTGSANACSETIELDKNHMDSEPGQPENGTDAEKSVVGKCSETISDSEPGQPENGTEAEKSVVQKCSEKIDESEAGQPENSTEAEKFVVRKCSEKIDGSENVPAAGCVIRTDLNSCPEFEKKPLFLTKNWRNILCRCEKCLEMYKQRKVSYLLDAEDTIVEYEKKAKEKRTEKLEKQEGEALDLLNNLDHVSKVELLHGIKDFQDGLQGLMVYIVTIYERNLITILRNHFI

SEQ ID NO: 784 - protein, 1069 aa, Arabidopsis thaliana
  Clone ID: AT_MYH9.C1.p8.tg
MNTGGRLIAGSHNRNEFVLINADESARIRSVEELSGQTCQICGDEIELSVDGESFVACNECAFPVCRPCYEYERREGNQSCPQCKTRYKRIKGSPRVEGDEEDDGIDDLDFEFDYSRSGLESETFSRRNSEFDLASAPPGSQIPLLTYGEEDVEISSDSHALIVSPSPGHIHRVHQPHFPDPAAHPRPMVPQKDLAVYGYGSVAWKDRMEEWKRKQNEKYQVVKHDGDSSLGDGDDADIPMMDEGRQPLSRKVPIKSSKINPYRMLIVLRLVILGLFFHYRILHPVNDAYALWLISVICEIWFAVSWVLDQFPKWYPIERETYLDRLSLRYEKEGKPSELAGVDVFVSTVDPMKEPPLITANTVLSILAVDYPVDRVACYVSDDGAAMLTFEALSETAEFARKWVPFCKKYTIEPRAPEWYFCHKMDYLKNKVHPAFVRERRAMKRDYEEFKVKINALVATAQKVPEEGWTMQDGTPWPGNNVRDHPGMIQVFLGNNGVRDVENNELPRLVYVSREKRPGFDHHKKAGAMNSLIRVSGVLSNAPYLLNVDCDHYINNSKALREAMCFMMDPQSGKKICYVQFPQRFDGIDKSDRYSNRNVVFFDINMKGLDGLQGPIYVGTGCVFRRQALYGFDAPKKKKTKRMTCNCWPKWCLFCCGLRKNRKSKTTDKKKKNREASKQIHALENIEEGTKGTNDAAKSPEAAQLKLEKKFGQSPVFVASAGMENGGLARNASPASLLREAIQVISCGYEDKTEWGKEIGWIYGSVTEDILTGFKMHSHGWRSVYCTPKIPAFKGSAPINLSDRLHQVLRWALGSVEIFLSRHCPIWYGYGGGLKWLERLSYINSVVYPWTSIPLLVYCSLPAICLLTGKFIVPEISNYASILFMALFGSIAVTGILEMQWGKVGIDDWWRNEQFWVIGGVSAHLFALFQGLLKVLAGVETNFTVTSKAADDGEFSELYIFKWTSLLIPPTTLLIINVIGVIVGISDAISNGYDSWGPLFGRLFFAFWVILHLYPFLKGLLGKQDRMPTIILVWSILLASILTLLWVRVNPFVAKGGPILEICGLDCL

SEQ ID NO: 785 - protein, 928 aa, Arabidopsis thaliana
  Clone ID: AT_T4F9.C1.p30.tg
MTIPNSDFMLENGVCDLPFTPEEEKRIVSELTSESEDNLKQGNLYFVISKRWYTSWQEYVENSANECSTGESSEAPRPGPIDNHDIIESDSDINDPQLRRLLVEGEDYVLVPKQVWKRLVECGGPPIERKLICQGFYTRSYSVEVYPLCLMLTDGRDESRTASIRELYEKVCAMTGVPQEKAHIWDYFDKRKNGLLDPLSYKSLEESSLHMDQDILVEVDGLSSSSQSAMSSTGNELALVPLEPSRSIVTIAGGPTLSNGHSTTSNFSLFPRITSEDDGRDSLSILGKGEKGGLAGLSNLGNTCFMNSALQCLAHTPPIVEYFLQDYMLDTYMFYFLVMVLTCILNIILTLNFQGELAIAFGDLLKKLWSSGRNAVAPRAFKTKLARFAPQFSGYNQHDSQELLAFLLDGLHEDLNKVKRKPYIELKDSDSRPDDEVAEELWNYHKARNDSVIVDVCQGQYKSTLVCPVCGKISITFDPFMYLSVPLPSTLTRSMTITVFYCDGSRLPMPYTVIVPKQGSIRDLITALGTACCLAEDESLLLAEVYDHKIFRYFEIPLDSLSAIKDDEHIVAYRLNQIPKGSRKAKLEILHGGQERAVLDSVRGSDVKLFGTPFVTYVNTEPLSGTDIDAVISGFLSPLHKVHAPSKIHNGSDNGHLADATVDQASGILSSPDTEIDNASDRELSFRIFLTDERGLNIKPLQSESSISPGTVTRVLVEWNEGEHERYDSSYLSDLPEVHKTSFSAKKTRQESISLFSCLEAFLAEEPLGPDDMWFCPSCKEHRQANKKLDLWKLPDILVFHLKRFTYSRYLKNKIDTFVNFPVHDLDLSKYVKNKNGQSYLYELYAVSNHYGGLGGGHYTAYAKLIDDNKWYHFDDSHVSSVNESEIRNSAAYVLFYRRVRSETETQTAEMSTDMDYSCLNSHNDKAS

SEQ ID NO: 786 - protein, 937 aa, Arabidopsis thaliana
  Clone ID: AT_T4F9.C1.p50.tg
MTIPNSDFMIENGVCDFPTTPEEEKRIVSELITESEDNLKEGNLYFVISKRWYTSWEKYVEQSTKEYISGESSEASRPGPIDNHDIIESESDVNDPQLRRLLMERVDYVLVPQEVWKRLVEWYSGGPPIERKLICQGFYTRSYSVEVYPLCLMLTDGRDESRTVIRLGKQASIRELYEKVCALTGVPQEKFLLMKDALFRYEDFAALPHIDIFFYKQAHIWDYFDKRKNGLLDSLSYKSLEESSLHMDQDILLEVDGSSSSQSAMSSTGNELALVPLEPSRSSVTIAGGPTLSNGHSTTSNFSLFPRITSEDDGSNSLSILGKGEKGGLAGLSNLGNTCFMNSALQCLAHTPPIVEYFLQDYSDDINRDNPLGMCGELAIAFGDLLKKLWSSGRNSVAPRAFKTKLARFAPQFSGYNQHDSQELLAFLLDGLHEDLNKVKRKPYIELKDSDSRPDDEVAEELWNYHKARNDSVIVDVCQGQYKSTLVCPACGKISITFDPFMYLSVPLPSTLTRSMTVTVFYCDGSHLPMPYTVIVPKNGSIRDLITALGTACLLAEDESLLLAEVYDHKIFKYFENPLDSLSSIKDDEHIVAYRLNQMPKGSGKAKLEILHGGQKRPILESVRGRDVKLFGTPFVTYVNTEPLSGADIDAVLSRFLSPLHKVHAPSKIHNGSENGHLPDATVDEASEILSSPDTEIDDASDRELSFRIFLTDERGLNFKPLQSESSISLGIATRVLVEWNEGEHERYDSSYLSDLPEVHKTSFSAKKTRQESISLFSCLEAFLAEEPLGPDDMWFCPSCKEHRQANKKLDLWKLPDILVFHLKRFTYSRYLKNKIDTFVNFPVHDLDLSKYVKNKNDQSYLYELYAVSNHYGGLGGGHYTAYAKLIDDNEWYHFDDSHVSSVNESEIKNSAAYVLFYRRVRSETETQTVEMSTDMD

SEQ ID NO: 787 - protein, 600 aa, Arabidopsis thaliana
  Clone ID: AT_MSF19.C1.p4.tg
MDSSSFEDNECIETCKPNVLNVSERRELIHALSNQPEEASELLNSWSRNEIMKIICAEMGKERKYTGLNKPKLIENLLNLVSRPLGETSCSDRRNSRKKEKKMIGYIICCENLACRAALGCDDTFCRRCSCCICQKFDDNKDPSLWLTCDACGSSCHLECGLKQDRYGIGSDDLDGRFYCAYCGKDNDLLGCWRKQVKVAKETRRVDVLCYRLSLGQKLLRGTTKYRNLLELMDEAVKKLEGDVGPLSGWAMKMARGIVNRLSSGVHVQKLCSQAMEALDKVVSPSESVSGQGDKMTVRVEEIQARSVTVRVDSEEPSSSTQNKITGFRLFCRKSKDEECSSQGNCVVYLPETTSAIQGLEPDTEFCLRVVSFNEEGDLDESELRFTTLKDDGDEAGDQQSPLTNSSSGLCSNPSLPEDESNNVNKSCSKGNGDKDNTEHCSAGEVESELEEERLVKRKANKIDGRDLLVTPCKRDIYKGKQGGNKRFKSRTVSLNEKPEINNAANGVGDKDLGHIVKTIRCLEEEGHIDKSFRERFLTWYSLRATHREVRVVKIFVETFMEDLSSLGQQLVDTFSESILSKRSSTNGVVPAGICLKLWH

SEQ ID NO: 788 - protein, 237 aa, Arabidopsis thaliana
  Clone ID: AT_T4F9.C1.p60.tg
MKPHEDWVYESWTVDCVCGVNFDDGKEMVDCDECGVWVHTWCSRYVKGDDLFVCHKCKIKNNEDELSKLSVTKSLRMENLCTQSSESVVLKACSEIPIEERVHVQGVPGGDLGLFECVSSVFSRQLWKCSGYVPKKFRFQCREFPCWDEKENVCDVVGDEDDSNLAGVLLSMSKENGVDGKGDNARNCGSREIESDVEKEKSLLCDPLSIYKRRNESVGGFEDGVKKKVKVADKEEE

SEQ ID NO: 789 - protein, 1332 aa, Arabidopsis thaliana
  Clone ID: AT_MTE17.C1.p10.tg
MTFVDDDEEEDFSVPQSASNYYFEDDDKEPVSFARLPIQWSVEEKVDGSGLGFYLRGRSDNGLLPLHKLVKAWRYDLSNFQPEISVLTKDNIWIKLEEPRKSYGELIRTVLVTLHSIQFLRRNPQASEKALWEKLTRSLRSYDVKPSQNDLVDHIGLIAEAAKRDRNLANSKFILAFLTKKPTKRRLPDEDNAKDDFIVGDEDTYVASDEDELDDEDDDFFESVCAICDNGGEILCCEGSCLRSFHATKKDGEDSLCDSLGFNKMQVEAIQKYFCPNCEHKIHQCFICKNLGSSDNSSGAAEVFQCVSATCGYFYHPHCVTRRLRLGNKEESEALERQIIAGEYTCPLHKCSVCENGEVKTDSNLQFAVCRRCPKSYHRKCLPREISFEDIEDEDILTRAWDGLLHNRVLIYCQEHEIDEELLTPVRDHVKFPFTEEQKVFVKEQRRILESHVGRDKARLKVKDPALQDTCGKASKNSFRSSFPSSKDGFSTKKHGLVSSVPDHSRKRKDIDPSIKHKMVPQKSQKMMEDSREAGKNKLGVKEARDAGKSKISLGERLFSYTQEPNPVKPGRVIPVDSKHNKTDSIASKEPGSEIPTLDNDSQRRLLAVMKKATEEITMGTILKKFKIQSTMSTHSTRNVVDKTITMGKVEGSVQAIRTALKKLEEGGNIEDAKAVCEPEVLSQILKWKDKLKVYLAPFLHGARYTSFGRHFTNPEKLQQIVDRLHWYADDGDMIVDFCCGSNDFSCLMNAKLEETGKKCLYKNYDLFPAKNNFNFERKDWMTVSKDELEPGSKLIMGLNPPFGVNASLANKFITKALEFRPKILILIVPPETERFQFPSISSAPLYHSITLIYRLLSLSLVKSITFLNRLDKKKSSYVLIWEDKTFLSGNSFYLPGSVNEEDKQLEDWNLVPPPLSLWSRSDFAAKHKKIAEKHCHLSRDVGSSKLKIVEEEANASLHPLGASDGMCDDIPMEKDELEVAECVNKILVSEKIDTVETVARVHQSDHLSRRSQLKKEGKTKDYSGRKLGKSMDSNNVDWKSNDMEEDQGELSRAPESIKVKIPEMTSDWQSPVRSSPDDIYAVCTSISTTTPQRSHEAVEASLPAITRTKSNLGKNIREHGCKVQGTGKPEVSRDRPSSVRTSREDIYTVRPSPENTGQKPFEAFEPSYGASLSHFDDGLAAKYGGFGGGYRMPDPPFLPDQFPLRNGPNEMFDFRGYSDLDRGIGQREYPQQYGGHLDPMLAPPPPPNLMDNAFPLQQRYAPHFDQMNYQRMSSFPPQPPLQPSGHNLLNPHDFPLPPPPPSDFEMSPRGFAPGPNPNYPYMSRSGGWIND

SEQ ID NO: 790 - protein, 1084 aa, Arabidopsis thaliana
  Clone ID: AT_MVP7.C1.p7.tg
MNTGGRLIAGSHNRNEFVLINADENARIRSVQELSGQTCQICRDEIELTVDGEPFVACNECAFPVCRPCYEYERREGNQACPQCKTRFKRLKGSPRVEGDEEEDDIDDLDNEFEYGNNGIGFDQVSEGMSISRRNSGFPQSDLDSAPPGSQIPLLTYGDEDVEISSDRHALIVPPSLGGHGNRVHPVSLSDPTVAAHPRPMVPQKDLAVYGYGSVAWKDRMEEWKRKQNEKLQVVRHEGDPDFEDGDDADFPMMDEGRQPLSRKIPIKSSKINPYRMLIVLRLVILGLFFHYRILHPVKDAYALWLISVICEIWFAVSWVLDQFPKWYPIERETYLDRLSLRYEKEGKPSGLSPVDVFVSTVDPLKEPPLITANTVLSILAVDYPVDKVACYVSDDGAAMLTFEALSETAEFARKWVPFCKKYCIEPRAPEWYFCHKMDYLKNKVHPAFVRERRAMKRDYEEFKVKINALVATAQKVPEDGWTMQDGTPWPGNSVRDHPGMIQVFLGSDGVRDVENNELPRLVYVSREKRPGFDHHKKAGAMNSLIRVSGVLSNAPYLLNVDCDHYINNSKALREAMCFMMDPQSGKKICYVQFPQRFDGIDRHDRYSNRNVVFFDINMKGLDGLQGPIYVGTGCVFRRQALYGFDAPKKKKGPRKTCNCWPKWCLLCFGSRKNRKAKTVAADKKKKNREASKQIHALENIEEGRVTKGSNVEQSTEAMQMKLEKKFGQSPVFVASARMENGGMARNASPACLLKEAIQVISCGYEDKTEWGKEIGWIYGSVTEDILTGFKMHSHGWRSVYCTPKLAAFKGSAPINLSDRLHQVLRWALGSVEIFLSRHCPIWYGYGGGLKWLERLSYINSVVYPWTSLPLIVYCSLPAICLLTGKFIVPEISNYASILFMALFSSIAITGILEMQWGKVGIDDWWRNEQFWVIGGVSAHLFALFQGLLKVLAGVDTNFTVTSKAADDGEFSDLYLFKWTSLLIPPMTLLIINVIGVIVGVSDAISNGYDSWGPLFGRLFFALWVIIHLYPFLKGLLGKQDRMPTIIVVWSILLASILTLLWVRVNPFVAKGGPILEICGLDCL

SEQ ID NO: 791 - protein, 1691 aa, Arabidopsis thaliana
  Clone ID: AT_YUP8H12R.C1.p22.tg
MSGQVSNQGTMSQQNGNSQMQNLVGGGSAPATGAGLGPSRVSPVDNDILKLRQAMRIRIFNILQQKQPSPADEASKAKYMDVARRLEEGLFKIANTKEDYVNPSTLEPRLASLIKGRQLNNYNQRHANSSSVGTMIPTPGLQHSGGNPNLMITSSGDATMAGSNNITTSAMNTGNLLNSGGMLGGNLSNGYQHSSSNFGLGSGGNMSSMSSQRNTGQMMPTPGFVNSSTNNNSNNGQSYLSVEASNNSGGFSTAPMMVPQTQQQQLRQDIGGQNSRMLQNHGSQMGVGLRPGMQQKLSNVSNSSINGGVGMNAKSVDSGTSYTNPIRNSQQAYDNLQRSGMQGDGYGTNNSDPFGSGNLYGAVTSVGMMTNTQNANTASFQAVSRTSSSLSHQQQQFQQQPNRFQQQPNQFHQQQQQFLHQQQLKQQSQQQQRFISHDAFGQNNVASDMVTHVKHEPGMENPSESIHSQTPEQFQLSQFQNQYQNNAEDRHAGSQILPVTSQSDMCTSVPQNSQQIQQMLHPHSMASDSVNGFSNLSVGVKTESGMRGHWQSQSQEHTQMSNSMSNERHIQEDFRQRMSGTDEAQPNNMSGGSIIGQNRVSTTSESLNPQNPTATTCRNGNGNRDPRFKNQQKWLLFLRHARHCKAPEGKCPDRNCVTVQKLWKHMDSCAAPQCSYPRCLPTKTLINHHRSCKEPNCPVCIPVKAYLQQQANARSLARLKNETDAARSVNGGGISSDAVQTSAGAKSCTSPGADISGHLQPSLKRLKVEQSSQPVDVETESCKSSVVSVTEAQSSQYAERKDHKHSDVRAPSKYFEVKAEVSDFSVQTRPGFKDTKIGIAENIPKQRPVSQPDKQDLSDVSPMQETTKVEKEPESLKKENLAESTEHTSKSGKPEIKGVSLTELFTPEQVREHIRGLRQWVGQSKAKAEKNQAMEHSMSENSCQLCAVEKLTFEPPPIYCTPCGARIKRNAMYYTVGAGDTRHYFCIPCYNESRGDTILAEGTPMPKARLEKKKNDEETEEWWVQCDKCEAWQHQICALFNGRRNDGGQAEYTCPYCFIAEVEQSKRKPLPQSAVLGAKDLPRTILSDHIEQRLFKRLKQERTERARAQGKSYDEIPTAESLVIRVVSSVDKKLEVKPRFLEIFREDSYPTEFAYKSKVVLLFQKIEGVEVCLFGMYVQEFGSECAFPNQRRVYLSYLDSVKYFRPEVRSYNGEALRTFVYHEILIGYLEYCKLRGFTSCYIWACPPLKGEDYILYCHPEIQKTPKSDKLREWYLAMLRKASKEGIVAETINLYDHFFMQTGECRAKVTAARLPYFDGDYWPGAAEDLIYQMSQEEDGRKGNKKGMLKKTITKRALKASGQTDLSGNASKDLLLMHRLGETIHPMKEDFIMVHLQPSCTHCCILMVSGNRWVCSQCKHFQICDKCYEAEQRREDRERHPVNFKDKHALYPVEIMDIPADTRDKDEILESEFFDTRQAFLSLCQGNHYQYDTLRRAKHSSMMVLYHLHNPTAPAFVTTCNACHLDIETGQGWRCEVCPDYDVCNACFSRDGGVNHPHKLTNHPSLADQNAQNKEARQLRVLQLRKMLDLLVHASQCRSAHCQYPNCRKVKGLFRHGINCKVRASGGCVLCKKMWYLLQLHARACKESECHVPRCRDLKEHLRRLQQQSDSRRRAAVMEMMRQRAAEVAGGSG

SEQ ID NO: 792 - protein, 1081 aa, Arabidopsis thaliana
  Clone ID: AT_F8B4.C1.p110.tg
MEASAGLVAGSYRRNELVRIRHESDGGTKPLKNMNGQICQICGDDVGLAETGDVFVACNECAFPVCRPCYEYERKDGTQCCPQCKTRFRRHRGSPRVEGDEDEDDVDDIENEFNYAQGANKARHQRHGEEFSSSSRHESQPIPLLTHGHTVSGEIRTPDTQSVRTTSGPLGPSDRNAISSPYIDPRQPVPVRIVDPSKDLNSYGLGNVDWKERVEGWKLKQEKNMLQMTGKYHEGKGGEIEGTGSNGEELQMADDTRLPMSRVVPIPSSRLTPYRVVIILRLIILCFFLQYRTTHPVKNAYPLWLTSVICEIWFAFSWLLDQFPKWYPINRETYLDRLAIRYDRDGEPSQLVPVDVFVSTVDPLKEPPLVTANTVLSILSVDYPVDKVACYVSDDGSAMLTFESLSETAEFAKKWVPFCKKFNIEPRAPEFYFAQKIDYLKDKIQPSFVKERRAMKREYEEFKVRINALVAKAQKIPEEGWTMQDGTPWPGNNTRDHPGMIQVFLGHSGGLDTDGNELPRLIYVSREKRPGFQHHKKAGAMNALIRVSAVLTNGAYLLNVDCDHYFNNSKAIKEAMCFMMDPAIGKKCCYVQFPQRFDGIDLHDRYANRNIVFFDINMKGLDGIQGPVYVGTGCCFNRQALYGYDPVLTEEDLEPNIIVKSCCGSRKKGKSSKKYNYEKRRGINRSDSNAPLFNMEDIDEGFEGYDDERSILMSQRSVEKRFGQSPVFIAATFMEQGGIPPTTNPATLLKEAIHVISCGYEDKTEWGKEIGWIYGSVTEDILTGFKMHARGWISIYCNPPRPAFKGSAPINLSDRLNQVLRWALGSIEILLSRHCPIWYGYHGRLRLLERIAYINTIVYPITSIPLIAYCILPAFCLITDRFIIPEISNYASIWFILLFISIAVTGILELRWSGVSIEDWWRNEQFWVIGGTSAHLFAVFQGLLKVLAGIDTNFTVTSKATDEDGDFAELYIFKWTALLIPPTTVLLVNLIGIVAGVSYAVNSGYQSWGPLFGKLFFALWVIAHLYPFLKGLLGRQNRTPTIVIVWSVLLASIFSLLWVRINPFVDANPNANNFNGKGGVF

SEQ ID NO: 793 - protein, 625 aa, Arabidopsis thaliana
  Clone ID: AT_msk20.C1.p20.tg
MDLDSMPKPESELMSVTSQIISVFNSMDLNSQPEALSKVISLITDRVNDTDSDSDIYLDSDFEDYIAVILNLEPEPELLSLIYQVFTLVSSMNSKWEKLISVRPQVVHRLGRDKIYMNDEQVSCRRYNKWACLPKNWFMLWFMGEDDETHFLCRACEGQNHKEHNNAPVEIKHHLHPKHSLLLVNIEIYPRERKCYCCDEDLGTFFYHCSACDFTLNIACVEKPPVLSIDHPKWHEHTLVLFSRTTSLTCDVCALAYSTSPFYICPPCGFVVHGRCIDLPRVIRISRHPHRISFTPSFHQGNWFCGVCRRKIENDFGGYSCVKYGCSYAAHSRCATQSNVWDGVELEGEPEEDIEEIPPFVRISDGIIQHFIHQYHHLRLDENTCREYDEDRLCQACITPIYFGNLYSCMQCGFVLHEKCAELSRKIHHPIHPHMLSFVARGNGVRRCCSACPWLITTGFFYRCEREECDFQLHVQCATVSEPLVHESHMHPLFLTSKPGEWKDCSVCKESNYSLTNEKFNCIEECDFALCFGCATLPQKVRYKYDKHMLTLSYGKETSTMTYWCEACEGEIDPKKRFYMCDEYCCVTLHINCMLGADKYMDPGSWWLYKGNLDGTCSGCMKYYY

SEQ ID NO: 794 - protein, 1026 aa, Arabidopsis thaliana
  Clone ID: AT_T10B6.C1.p80.tg
MEASAGLVAGSHNRNELVVIHNHEEPKPLKNLDGQFCEICGDQIGLTVEGDLFVACNECGFPACRPCYEYERREGTQNCPQCKTRYKRLRGSPRVEGDEDEEDIDDIEYEFNIEHEQDKHKHSAEAMLYGKMSYGRGPEDDENGRFPPVIAGGHSGEFPVGGGYGNGEHGLHKRVHPYPSSEAGSEGGWRERMDDWKLQHGNLGPEPDDDPEMGLIDEARQPLSRKVPIASSKINPYRMVIVARLVILAVFLRYRLLNPVHDALGLWLTSVICEIWFAVSWILDQFPKWFPIERETYLDRLSLRYEREGEPNMLAPVDVFVSTVDPLKEPPLVTSNTVLSILAMDYPVEKISCYVSDDGASMLTFESLSETAEFARKWVPFCKKFSIEPRAPEMYFTLKVDYLQDKVHPTFVKERRAMKREYEEFKVRINAQVAKASKVPLEGWIMQDGTPWPGNNTKDHPGMIQVFLGHSGGFDVEGHELPRLVYVSREKRPGFQHHKKAGAMNALVRVAGVLTNAPFMLNLDCDHYVNNSKAVREAMCFLMDPQIGKKVCYVQFPQRFDGIDTNDRYANRNTVFFDINMKGLDGIQGPVYVGTGCVFKRQALYGYEPPKGPKRPKMISCGCCPCFGRRRKNKKFSKNDMNGDVAALGGAEGDKEHLMSEMNFEKTFGQSSIFVTSTLMEEGGVPPSSSPAVLLKEAIHVISCGYEDKTEWGTELGWIYGSITEDILTGFKMHCRGWRSIYCMPKRPAFKGSAPINLSDRLNQVLRWALGSVEIFFSRHSPLWYGYKGGKLKWLERFAYANTTIYPFTSIPLLAYCILPAICLLTDKFIMPPISTFASLFFISLFMSIIVTGILELRWSGVSIEEWWRNEQFWVIGGISAHLFAVVQGLLKILAGIDTNFTVTSKATDDDDFGELYAFKWTTLLIPPTTVLIINIVGVVAGISDAINNGYQSWGPLFGKLFFSFWVIVHLYPFLKGLMGRQNRTPTIVVIWSVLLASIFSLLWVRIDPFVLKTKGPDTSKCGINC

SEQ ID NO: 795 - protein, 654 aa, Arabidopsis thaliana
  Clone ID: AT_F9C16.C1.p23.tg
MDSESESKLISFISQLVSRNNTDSENISCMIQTISLVSSMDLKSQPKPESKLMSLVTQTISLFNSMDLSSQPEPLRKLISLIIEKLSHLNSVDSDYEPKPDSEFMSTFYETYKLQPRPEIISIIHQIYSLFISTDTKSKPEPEVDSELMFVHSSMDSDSDSDSDLDSEEEEEEELISLLSEMYSLYAFTTNEELELRGGPEELPKFKSFISLTSKVITLVRSLDLDYSEPEPESEFISVVAVVKQIMSFANSISNSEPEWQFISSMTEMIRLISSIDLEPEWEPPMQLVALFTHTFSLLYYLDRDSELYTLIAQIIFIIDYTDSEPESEWGLDQLMSLSPQWKVQLVQGKFHVTGKIERKNKEKGKCQPENRHRLYLAKGEEASHFICKDCNGEDHIECEKTPVEVKHLLHPKHSLQLVSQKSSIIQTRKCFCCDEDLKKIFYYCTGCDYDMNIACAEKPPVLFIDRPKWHADTLALFQRQAFLTCNVCAVADSSSPIYMCPPCDFVVHQRCTGLPRVIRISRHRHRISFTTSFDEGDWSCGVCRRKIDNDYGGFSCIKDGCSYAAHSRCATQKNVWDGIDLEGVPEEIEEEEVEPFVTISKGVIHHFSHQNHHLRLDENRDRIYDENKLCQACIMPIYFGNFFSCMQCDYILQ

SEQ ID NO: 796 - protein, 636 aa, Arabidopsis thaliana
  Clone ID: AT_MDN11.C1.p17.tg
MEQDSIVENMTDEENSSSSDDDSEANLQFDPVCSICDNGGYVLCCEGSCLRSFHPTIADGIETECESLGFTDKTQIQALGTYLCNNCLYKQHQCYACGELGSSDENFSQQVFPCSASNCGHFYHPECVARLLCADDQNKAEELQAKIAARDCFACPLHTCKLCNMSEDKNQYACILLYADVAQQLITENVYLGILLLNSTLTMRHCKELGKVCFLTTAFLYIVSFHKLLNRAHEIDGLILTPARDHLVFPDVSGQRRTRSHGLAQFKEDVLGMETDHCHHEGLFTGLGITDPYEKPKKDISCDEVEQRVMGIIDEVESSFNFDEFVKSRRPTHIKSYHSGNYFSKNITTGLVRTHVNAARAALKMFEEGRDRDARALFDPDSLLQLMKHKKKLEISPFLHGMRYTSFGRHFTNPEKLKEIVERLHWYVENGDTVVDFCCGSNDFSCLMKEKLMETGKICFYKNLDLIPPKNNFNFEMRDWLSVKEEELPDGSQLIMGLNPPFGYKASLANTFIKKALEFKPKILILIVPSETKRVDAIDDYELIWEDRNLLAGMSFYLPGSVDVNDKTIEQWNNITPPLYLWSRRDLSRSHKTTAVQQGHITQMHHFTYNGDSHHTEIPQGDDDTDMVQDMEISPT

SEQ ID NO: 797 - protein, 1688 aa, Arabidopsis thaliana
  Clone ID: AT_F17F16.C1.p21.tg
MNVQAHMSGQRSGQVPNQGTVPQNNGNSQMQNLVGSNGAATAVTGAGAATGSGTGVRPSRNIVGAMDHDIMKLRQYMQTLVFNMLQQRQPSPADAASKAKYMDVARRLEEGLFKMAVTKEDYMNRSTLESRITSLIKGRQINNYNQRHANSSSVGTMIPTPGLSQTAGNPNLMVTSSVDATIVGNTNITSTALNTGNPLIAGGMHGGNMSNGYQHSSRNFSLGSGGSMTSMGAQRSTAQMIPTPGFVNSVTNNNSGGFSAEPTIVPQSQQQQQRQHTGGQNSHMLSNHMAAGVRPDMQSKPSGAANSSVNGDVGANEKIVDSGSSYTNASKKLQQGNFSLLSFCPDDLISGQHIESTFHISGEGYSTTNPDPFDGAITSAGTGTKAHNINTASFQPVSRVNSSLSHQQQFQQPPNRFQQQPNQIQQQQQQFLNQRKLKQQTPQQHRLISNDGLGKTQVDSDMVTKVKCEPGMENKSQAPQSQASERFQLSQLQNQYQNSGEDCQADAQLLPVESQSDICTSLPQNSQQIQQMMHPQNIGSDSSNSFSNLAVGVKSESSPQGQWPSKSQENTLMSNAISSGKHIQEDFRQRITGMDEAQPNNLTEGSVIGQNHTSTISESHNLQNSIGTTCRYGNVSHDPKFKNQQRWLLFLRHARSCKPPGGRCQDQNCVTVQKLWSHMDNCADPQCLYPRCRHTKALIGHYKNCKDPRCPVCVPVKTYQQQANVRALARLKNESSAVGSVNRSVVSNDSLSANAGAVSGTPRCADTLDNLQPSLKRLKVEQSFQPVVPKTESCKSSIVSTTEADLSQDAERKDHRPLKSETMEVKVEIPDNSVQAGFGIEPGKHGLSGDSPKQENIKMKKEPGWPKKEPGCPKKEELVESPELTSKSRKPKIKGVSLTELFTPEQVREHIRGLRQWVGQSKAKAEKNQAMENSMSENSCQLCAVEKLTFEPPPIYCTPCGARIKRNAMYYTVGGGETRHYFCIPCYNESRGDTILAEGTSMPKAKLEKKKNDEEIEESWVQCDKCQAWQHQICALFNGRRNDGGQAEYTCPYCYVIDVEQNERKPLLQSAVLGAKDLPRTILSDHIEQRLFKRLKQERTERARVQGTSYDEIPTVESLVVRVVSSVDKKLEVKSRFLEIFREDNFPTEFPYKSKVVLLFQKIEGVEVCLFGMYVQEFGSECSNPNQRRVYLSYLDSVKYFRPDIKSANGEALRTFVYHEILIGYLEYCKLRGFTSCYIWACPPLKGEDYILYCHPEIQKTPKSDKLREWYLAMLRKAAKEGIVAETTNLYDHFFLQTGECRAKVTAARLPYFDGDYWPGAAEDIISQMSQEDDGRKGNKKGILKKPITKRALKASGQSDFSGNASKDLLLMHKLGETIHPMKEDFIMVHLQHSCTHCCTLMVTGNRWVCSQCKDFQLCDGCYEAEQKREDRERHPVNQKDKHNIFPVEIADIPTDTKDRDEILESEFFDTRQAFLSLCQGNHYQYDTLRRAKHSSMMVLYHLHNPTAPAFVTTCNVCHLDIESGLGWRCEVCPDYDVCNACYKKEGCINHPHKLTTHPSLADQNAQNKEARQLRVLQLRKMLDLLVHASQCRSPVCLYPNCRKVKGLFRHGLRCKVRASGGCVLCKKMWYLLQLHARACKESECDVPRCGDLKEHLRRLQQQSDSRRRAAVMEMMRQRAAEVAGTSG

SEQ ID NO: 798 - protein, 597 aa, Arabidopsis thaliana
  Clone ID: AT_F9C16.C1.p25.tg
MIQIISMVSSLDLNTQPKPQSKLMSLITETISLFNSMNLDSQPEPLRKLVSLSIQKVSHLNSVGSDYEPKPDPEFMYMFYETFNLEPMPKLISTIDQIYSLFILPDPEPKPKPEMDPEQESKFISLLSQIYSIFAIKTNAELELRGGPEELPKFKSFISLTKQLMSLISSLDLETEPEPESEFISVVSCIKQIISFAHSISNSEPDFISSTTEMFRLISSIDLEEEPPMKLAALFQHTLSLLYSMDRDSELIILIGKIISVIDRTDSEPEAEWGLEQLISLSPQTKVKLVQGKFHVTGKIERTSKEKGRCQPKNKHRLYLESGEDASHFLCKDCNGEDHVECEKTPVEVKHLLHPKHSLQLVLQKSSITQTRKCFCCDEDLKLIFYYCTVCDYAMNIACAEKPPVLFIDHPKWHADTLALFPRQAFLTCNVCAVADSSSPIYMCPPCDFVVHLKCISLPRVIRISRHQHRISFTTSFDEGDWSCGVCRKTIDNDYGGYSCIKDGCSYAAHSRCATQKNVWDGIYLEGVPEEIEEEEVEPFVTISKGVIHHFSHQNHHLRLDENEGRVYDENKICQACIMPIYFGNFFSCMQCDYILQ

SEQ ID NO: 799 - protein, 689 aa, Arabidopsis thaliana
  Clone ID: AT_T7F6.C1.p14.tg
MDLLARPKTKVKTVANLNTSSISSSSSSLSLSLSSPPLTLPLIHHSPLRNISLVNSTLQVSHSPFLRTCSICLNKMKEGGGHALFTAECSHSFHFHCIASNVKHGNQVCPVCRAKWKEIPMQHPSFDLPYLFARSYNNDAAISLVHRLPRSRGVMNQGRGLAPEPSMFDDDERLEQQLVFSGKSYSDALENNHPVRMMDLKIYPEVSAVPRADSREKFDVLVHLRAAAMVTGNANSLNNQISRYPRAPVDLVTVLDISGSMAGTKLALLKRAMGFVIQNLGSNDRLSVIAFSSTARRLFPLTKMSDAGRQRALQAVNSVVANGGTNIAEGLRKGVKVMEDRRDKNPVASIILLSDGRDTYTMNQADPNYKLLLPLSMHGCESKRFQIPVHSFGFGSDHDASLMHSVSETSGGTFSFIESESVIQDALAQCIGGLLSVAVQELRLEIEGMCSDVHLSSIKAGSYQSLVSGDGRSGCVDIGDLYADEERDFLISVNIPPQKDGNETPLLKMRCVYKDLLTKEIVTLQSHMLKIQRPETVGQEVVVSIEVDRQRNRFLAAEAMVKARALAEREDLAAGVTAIQNFRVALAETVSAKSGDGFCVALDRELKEMQERMASRHVYEVSGRAYILSGLSSHSWQRATSRGESGDGSSFVQAYYQTPSMVEMLHRSQATSHHHRLIQPLFASQPKPR

SEQ ID NO: 800 - protein, 763 aa, Arabidopsis thaliana
  Clone ID: AT_F4F15.C1.p210.tg
MAFHVACPITCRKICFCVLGFSRNLHGNEVKDVYLKEIHSLQEFVRNPWDAEVSKDGTVQIHVPKLAVFDTGPRIAARNVGVGSDSAMEVVAASSNLVPAKRTLVLQKKAVEVYAANDCSGDLEVSVKDLNEEDHDHHSASITCHMCYLVEVGKSERAKMLSCKCCGKKYHRNCVKSWAQHRDLFNWSSWACPSCRICEGCGTLGDPKKFMFCKRCDDAYHCDCQHPRHKNVSSGPYLCPKHTKCYSCESTVPGNGQSLRYLTFCLVILEIYSCGFWGILVVMLVEGCLLRGIIVLYVYRDSEATPMVCCDFCQRWVHCQCDGISDEKYMQFQVDGNLQYKCSTCRGESYQVKDLEDAVQEIWKRKDMADKDLIASLKASARVVGQTGGAPLMNQPGSVERKVSEKAMVNGEEEKPLRVLRIKSSRPQDSDSEKFGKHATELSTVKAKKLVISIGPRKTGVTNSTSCDVSKTASKSNGKQEKLQAEETFSREERRSLLGKNSDEKRGSRGEVTTLKAEGGFIGRHSDGKGDLNSGSHDSSQKDSRRLLKLKIKKHNPEGQESEAPSIVYERSKSGKGHRSKRKRASPPAEKSAFNEDEDVSLSREDSLLDEMLDASWILKKLGKDAKGKKVQIHEASDDSWEKGVVSEVGGAGGTSKLMVTLENGKVKTVELGKQGVRFVPQKQKRTRTEEKKMLQLFFTIAFSAAPLTLYIPPIRCLTVFVETMEEMGMEGRVYSWRLFPRARIAWSRLLDCFFSSSRPLSS

SEQ ID NO: 801 - protein, 594 aa, Arabidopsis thaliana
  Clone ID: AT_F24A6.C1.p70.tg
MGIKYLPVSVASTALSFVGLQVWTELSLDRLRADGLIAKNISLGDSEHALELLLGSYFTIALLTNFVLNVYILLVLSLKTLFFGDLYDVETKKLVERLANYIIYKGTFLPLVIPPTIFQGVLWTVWLTVLCTLKMFQALARDRLERLNASPSSTPWTYFRVYSVLFLVLSVDMFWIKLSLMTYNTIGSAVYLLLLFEPCSIAFETLQALLIHGFQLLDMWINHLAVKNSDCQRSKFIDSMTAGRFFSGVMLCFSIRARKCILVDIFGSLLEWKGLLNRNLGFFLDMATLVMALGHYLHIWWLHGIAFHLVDAVLFLNIRALLSAILKRIKGYIKLRIALGALHAALPDATSEELRAYDDECAICREPMAKAKRLHCNHLFHLGCLRSWLDQGLNEVYSCPTCRKPLFVGRTENEVNPRTVEVSSDEQLARQLERQNNPVHALATGLFPAEVPDSVENDTSRNLGLDPSWLQTWSSQGSDVAGPSTTSRTVGLGRVQMMMRHLASVGESYAQTALDDAAWSLWPMNPSQASTSSTTVPPGNGGRTGGLHLRTVSNTTNESLTNILAMAETVREVMPHVPDEIIFQVNFKCILDYL

SEQ ID NO: 802 - protein, 582 aa, Arabidopsis thaliana
  Clone ID: AT_MFG13.C1.p16.tg
MGITYLHISVATTALSFVGLQVWTELSLDRLRADGIITKNISLGNSENTLELLLSSHTTIALLASFVLNIYILLVLSLKTLFFGDLYAIETRKLVERLANYIIYKGTFLPFVVPRTVFQGVLWTIWLTVLCTLKMFQALARDRLDRLNASPSSTPWTYFRVYSALFMVLSTDLCWIKLSLMIYNTVGSSVYLLLLFEPCGIAFETLQALLIHGFQLLDMWINHLAVKNSDCQRSKFYDSMTAGSLLEWKGLLNRNLGFFLDMATLVMALGHYLHIWWLHGMAFHLVDAVLFLNIRALLSSILKRIKGYIKLRVALGALHAALLDATSEELRDYDDECAICREPMAKAKRLHCNHLFHLGCLRSWLDQGLNEVYSCPTCRKPLFVGRTESEANPSRGEVSSDEHLARQFERQNNSVHALTTGMFPTETPNFTESDPWRNSEVDPSWLQTWSDQGVDVVGSSAGSRSVGLGQVQLMMRHLASVGEGSAQTTLDDASWGLWPMNPSQASTSSTYVPPGAGGRTGGLHLRTVSRAANNMASILAMAETVREVLPHVPDEIIFQVNIRCIYWYVSALTSKLLAGLNC

SEQ ID NO: 803 - protein, 574 aa, Arabidopsis thaliana
  Clone ID: AT_MIF21.C1.p5.tg
MGTSSGSNHPHQMLPPRQQQRSGGGLETALSLVSSDQEPRRESPAESASSQETWPLGDTVAGKKSMSQKTEPDSMEQTVNVMHHVSNADKVSVRDIARERVELVAERMHRLPDEFLDELKNGLKSILEGNVAQSVDEFMFLQKVVQSRTDLSSVTLVRAHRVQLEILVAINTGIQAFLHPNISLSQPSLIEIFVYKRCRNIACQNQLPADDCYCDICTNRKGFCNLCMCTICNKFDFSVNTCRWIGCDLCSHWTHTDCAIRDGQITTGSSAKNNTSGPGEIVFKCRACNRTSELLGWVKDVFQHCAPNWDRESLMKELDFVSRIFRGSEDQRGRKLFWKCEELIDKIKGGLAEATAAKLILMFFQEIESDSAKSFENGEGGRLMAPQDACNRIAEVVQETLRKMEIVAEEKMRMFKKARMALETCDRELEDKAKEVSELKAERQKKKLQIDELERIVRLKQAEADMFQLKANEAKREADRLQRIVLAKMDKSEEEYASNYLKQRLSEAEAEKQYLFEKIKLQENSRVASQSSGGGGDPSQVMMYSKIRDLLQGYNLSPKVDPQLNERNPFRSNP

SEQ ID NO: 804 - protein, 704 aa, Arabidopsis thaliana
  Clone ID: AT_mup24.C1.p120.tg
MGSKWRKAKVALGLNLCLYVPKTLEDSSPPRRSDDAVSLSPVIVQRPSTPTPSSSGLRLPRSMSKSSSKKTCAICLTAMKAGQGHAIFTAECSHSFHFQCITTNVKHGNQICPVCRAKWNEIPIQSPNAKPKSGVKPIGRPRDDAWMSIPPRRSSPIQYTSRPDCLRVSSIFNTEPAVFNDDEALEHQDRSAESGLDKPGVTGTLEVKTYPEISEVVRSVSFKDFAVLINLKAPTSSKSSSNPSSSSRAPVDLVTVLDVSGSMAGTKLALLKRAMGFVIQNLGPFDRLSVISFSSTARRNFPLRLMTETGKQEALQAVNSLVSNGGTNIAEGLKKGARVLIDRRFKNPVSSIVLLSDGQDTYTMTSPNGSRGTDYKALLPKEINGNRIPVHAFGFGADHDASLMHSIAENSGGTFSFIESETVIQDAFAQCIGGLLSVVVQELCVTIECMHHLLRIGSVKAGSYRFDNGPNSRTGSIAVGDLYAEEERNFLVNLDIPIVDGVSDVMSLLKVQCVYKDPVTKETVNLNNSGEVKILRPIVMTERRPVVSVEVDRQRIRLRAAEAISEARVLAERGDLTEAVSVLETCRGLLTESVSGRAGDQLCVTLCAELKEMQERMASRQVYEASGRAYVLAGLSSHSWQRATARGDMSDSTTTSYQTQSMVDMVNLSQTMTFGMPIASSNSSPSGQRKLRQALSFPAKPRPR

SEQ ID NO: 805 - protein, 164 aa, Arabidopsis thaliana
  Clone ID: AT_MYC6.C1.p15.tg
MMESPPSDNLDFFSTVLFLFIYMVFPIAITVIFIYKLCIDLSQQPPTEIARETHQNSHPPPDQLQQDIETGHVTLPQPQQNIAVGYMTWIHETTILEFKDIKEGSNKIFCPICLEEFEDGHEIIRINMCRHVFHRFCIDPWLNQNLTCPNCRCSLTARKRKEGE

SEQ ID NO: 806 - protein, 227 aa, Arabidopsis thaliana
  Clone ID: AT_maf19.C1.p100.tg
MVYESGNKPGPENPTFSSDLSLSDSLVKLKKKPCEVCGSDANELLMMTCFMCRDTREHTYCARVMFQRVPRLWICEECRDFSSVANKTANAQSSRTIQVEQVVVKQVRIDQTVPSPRTNQVVDNHQDPPIDQTDPSSTTIQVVDNENLIEAAPSSRSNQVVDNKDWIEAAPSLRSNQVVPVAPRIHEFTTDESSSPVSPLFKSMWERFPVKRPSHYIDLSSDSESEE

SEQ ID NO: 807 - protein, 641 aa, Arabidopsis thaliana
  Clone ID: AT_T6D22.C1.p29.tg
MENPNNLRESKSHLNLNECLTLPKTLDPSSPSPSDASRSSVDPNRPDSSSSRPGSTPSSSGLRFSKGRCAICLYEIRKEDGKAIFTAECSHSFHFDCITSNVKHGNRICPLCRTQWKQVPLCDVDSVPTFVAQRGFEDDEPLPQGDTQIHSDGHRSDHQALEIKLFPEVSALAKPVSRADFAVLVHLKAEGVSDDARRARAPLDLITVLDVSGSMDGVKMELMKNAMSFVIQNLGETDRLSVISFSSMARRLFPLRLMSETGKQAAMQAVNSLVADGGTNIAEGLKIGARVIEGRRWKNPVSGMMLLSDGQDNFTFSHAGVRLRTDYESLLPSSCRIPIHTFGFGSDHDAELMHTISEVSSGTFSFIETETVIQDAFAQCIGGLLSVVILEQVVEIECIHEQGLKISSIKAGSYRSRIAPDARTATIDVGDMYAEEERDFLVLLEIPCCDNGSGESESLSLLKVRCVYKDPVTKEIVHVESGELSIQRPMKLTGKEVVSIEVDRQLNRFLVSQAMSEARVLADGGDLSGAVGILRNRERELSETPSAQSSDRLCQSLSSELSALQERMTSRRMYRTSGRAYAFSSMSSHSAQRATARGDSTQGFSPVQAYQTSPMARMVTRSQLLVLESPTKPSPGRGEQS

SEQ ID NO: 808 - protein, 336 aa, Arabidopsis thaliana
  Clone ID: AT_F13K9.C1.p14.tg
MAVNQSFPSPVRRWRADLRLWFFVAVSLVVLAVLANSEGFNLHCNNLDKTVLELPMSGTFLVDEINYQKQQISISDPENCMVKRLLTFNTSGSPFSYGFSFYYTFLTCPNEVVIPVWSLMSIPCLSNSTSSFFATSNLTFSKLLPPSCQIVKGLYVPVDVIYKDVITEEKGFSTVPWLGNVLLEWSSPNCRGCEKESLRCGFKNKASLEVKYLADPPGITATCIAAIRIYNSERFVNQRRQNAAITARNTTQQPRGVVVTTGLDQSTIESYKKVELGESRRLPGTNGIICPICLSEYASKETVRCMPECDHCFHVQCIDEWLKIHSSCPVCRNSRS

SEQ ID NO: 809 - protein, 481 aa, Arabidopsis thaliana
  Clone ID: AT_K1G2.C1.p18.tg
KLITNGAPDYTEDRSCHICGKETGNLLYHCDICKFNLDMECAVENPIPVALSDLKVHEHTLTLMPRLISFICDACGTKGDRAPYVCVQCDFRMFHQKCARLPRVIHVNHHDHRVSYKYPLGPGEWRCGVCWEEIDWSYGAYSCSLCPNYAIHSLCATRKDVWDGKELDGVPEEVEDIEPFKRNDDNTITHFAHEHNLSLHNDDEESSLCGACVHPIGSYTFYKCSKSYCGFFLHERCANLATKKRHFLSPQPLDLSLQWIPYVLGRCRACRQMFSEGFIYNSYRDKFDLLCSSITVPFIHGSHDHHLLYYKLRYGQVKTCQNCGIDETEVLGCSKCNYYLDFCCATLPKTVMLPRYDDHPLTLCYGDENASGKYWCDICERETNPKTWFYTCKDCGVTFHILCVVGDIRYAKPGGKINGDYELLANNSSSRPLCSTCHCRCPGPFILNKERNNIFFCSYYCLGLSREHAYSSVDVCPPWAI

SEQ ID NO: 810 - protein, 692 aa, Arabidopsis thaliana
  Clone ID: AT_F9K21.C1.p110.tg
MSFKIKGHPHRVSLVKNHDGLECDACDQSYGDAYSCGECKFTVHKKCTFLFEVVPEIFEHPSHVGHCLKLLTTGAPDHTVPKCHLCGKNTKRLLYHCRDCKLNVDIDCIIDPMCAQADLNMPWHHHPLFMGNFATNMTCDVCYDNHVDGYICLCCRLFVGWVCAALVIDSPEITHPCHTKHPLKLLTEGAPTYTDPKCHLCGEDTGKFIYHCDICKFNLDLVCAKTKTPPVALSNLKVHEHTLNLMPRLISFVCDACGTKGDRAPYVCHQCDFMVHKKCAHLPRVINVNHHDHRVSFKYPLGLGEWRCGVCFEEIDWSCGAYSCSLCPQYAIHSLCATRKDVWNGKELDGVPEEVEDIEPFKRNDDNTITHFAHEHNLMSLSKDGEESSLCGACVLPIGSYTFYKCSKSNCSFILHEKCANISKKKRHFLSSEPLILCFESIIDDDFLCRACYQMFCEGFFYSSKGVNFDLICSSITMPFIHGSHDHHLLYVKQEEGNKKTCHNCDNERAKVLLGCIKCNYFLDFRCATMPLTIMLPRYDDHPLTLCYGEEKASGKYWCDICERETNPETWFYTCNDCGVTLHTFCVLGDIRNAKAGGSFRHHGELELLPNNRSTRPLCNSCHSRCPGSFIMKSYDGGEVYCSCYCVSSQLGYTYKGADTCPPWAIYELELIVVIHVNYLSTYILHYLTAIK

SEQ ID NO: 811 - protein, 1043 aa, Arabidopsis thaliana
  Clone ID: AT_MRH10.C1.p14.tg
MYISWMQHRHSSFSAKICKVCGDEVKDDDNGQTFVACHVCVYPVCKPCYEYERSNGNKCCPQCNTLYKRHKGSPKIAGDEENNGPDDSDDELNIKYRQDGSSIHQNFAYGSVLFDFDKQQWRPNGRAFSSTGSVLGKDFEAERDGYTDAEWKERVDKWKARQEKRGLVTKGEQTNEDKEDDEEEYLDAEARQPLWRKVPISSSKISPYRIVIVLRLVILVFFFRFRILTPAKDAYPLWLISVICEIWFALSWILDQFPKWFPINRETYLDRLSMRFERDGEKNKLAPVDVFVSTVDPLKEPPIITANTILSILAVDYPVNKVSCYVSDDGASMLLFDTLSETSEFARRWVPFCKKYNVEPRAPEFYFSEKIDYLKDKVQTTFVKDRRAMKREYEEFKVRINALVAKAQKKPEEGWVMQDGTPWPGNNTRDHPGMIQVYLGKEGAFDIDGNELPRLVYVSREKRPGYAHHKKAGAMNAMVRVSAVLTNAPFMLNLDCDHYINNSKAIRESMCFLMDPQLGKKLCYVQFPQRFDGIDLNDRYANRNIVFFDINMRGLDGIQGPVYVGTGCVFNRPALYGYEPPVSEKRKKMTCDCWPSWICCCCGGGNRNHKSDSSKKKSGIKSLFSKLKKKTKKKSDDKTMSSYSRKRSSTEAIFDLEDIEEGLEGYDELEKSSLMSQKNFEKRFGMSPVFIASTLMENGGLPEATNTSSLIKEAIHVISCGYEEKTEWGKEIGWIYGSVTEDILTGFRMHCRGWKSVYCMPKRPAFKGSAPINLSDRLHQVLRWALGSVEIFFSRHCPLWYAWGGKLKILERLAYINTIVYPFTSIPLLAYCTIPAVCLLTGKFIIPTINNFASIWFLALFLSIIATAILELRWSGVSINDLWRNEQFWVIGGVSAHLFAVFQGLLKVLFGVDTNFTVTSKGASDEADEFGDLYLFKWTTLLIPPTTLIILNMVGVVAGVSDAINNGYGSWGPLFGKLFFAFWVIVHLYPFLKGLMGRQNRTPTIVVLWSILLASIFSLVWVRIDPFLPKQTGPLLKQCGVDC

SEQ ID NO: 812 - protein, 580 aa, Arabidopsis thaliana
  Clone ID: AT_MJB20.C1.p16.tg
MAANEEEPICRLSHPTHSHTLSRRAGRIPPSGCFACDKEEPSPCSTFHYSCTTCDVEFHDICHVYPRKLTHPYHLQHPLTLTTQNTEIEIISKNPEYGYIFKNCNWCGDDLRDGSQFYHCSICNFCLDLSCSQNFPTLTITNPKSHHHSLFLFPWPLLIPCEACELVSLLEPSYTCFQCNYLVHESCINLPRVIKITRHPHRLSHTPFLPPTTPSCRVCYKTVDIKYGQYSCDHEGCSYVAHSKCATHMHVWDGRELEWEPEELDETEDIVPFKKVGDNMIKYFCHEHHLKLEKYDSVRDAKKQCQACILRIDSYDFYNCVQCDFFLHEVCAGLPRKLAHALHKHPLVLDPSPILDYSSTSCSTCARESTGFRYKCSKTDCDDEITIQIDFRCILVPDCFTHKSHEHPLFISTSYSRKGNISCDGCKDSVRDEYYLQCTICSFAMCYRCATIPYELYYKYDAHLLSLCYGEDAEKAYWCEVCEKELNPREWFYSCNKCCITIHLECIFGSSVYIKSGYTFYFGSASMKILGNNSHTRPICYKCDHRCPDSVYYKLFEKVFCSWLCVWTSDIESFDNVEKE

SEQ ID NO: 813 - protein, 1088 aa, Arabidopsis thaliana
  Clone ID: AT_F7D8.C1.p9.tg
MNTGGRLIAGSHNRNEFVLINADDTARIRSAEELSGQTCKICRDEIELTDNGEPFIACNECAFPTCRPCYEYERREGNQACPQCGTRYKRIKGSPRVEGDEEDDDIDDLEHEFYGMDPEHVTEAALYYMRLNTGRGTDEVSHLYSASPGSEVPLLTYCDEDSDMYSDRHALIVPPSTGLGNRVHHVPFTDSFASIHTRPMVPQKDLTVYGYGSVAWKDRMEVWKKQQIEKLQVVKNERVNDGDGDGFIVDELDDPGLPMMDEGRQPLSRKLPIRSSRINPYRMLIFCRLAILGLFFHYRILHPVNDAFGLWLTSVICEIWFAVSWILDQFPKWYPIERETYLDRLSLRYEKEGKPSELAPVDVFVSTVDPLKEPPLITANTVLSILAVDYPVEKVACYVSDDGAAMLTFEALSYTAEFARKWVPFCKKFSIEPRAPEWYFSQKMDYLKHKVDPAFVMERRAMKRDYEEFKVKINALVSVSQKVPEDGWTMQDGTPWPGNNVRDHPGMIQVFLGHSGVCDMDGNELPRLVYVSREKRPGFDHHKKAGAMNSLIRVSAVLSNAPYLLNVDCDHYINNSKAIREAMCFMMDPQSGKKICYVQFPQRFDGIDRHDRYSNRNVVFFDINMKGLDGIQGPIYVGTGCVFRRQALYGFDAPKKKQPPGRTCNCWPKWCCLCCGMRKKKTGKVKDNQRKKPKETSKQIHALEHIEEGLQVTNAENNSETAQLKLEKKFGQSPVLVASTLLLNGGVPSNVNPASLLRESIQVISCGYEEKTEWGKEIGWIYGSVTEDILTGFKMHCHGWRSVYCMPKRAAFKGSAPINLSDRLHQVLRWALGSVEIFLSRHCPIWYGYGGGLKWLERFSYINSVVYPWTSLPLLVYCSLPAICLLTGKFIVPEISNYAGILFLLMFMSIAVTGILEMQWGKIGIDDWWRNEQFWVIGGVSSHLFALFQGLLKVLAGVSTNFTVTSKAADDGEFSELYIFKWTSLLIPPTTLLIINIVGVIVGVSDAINNGYDSWGPLFGRLFFALWVIVHLYPFLKGLLGKQDRVPTIILVWSILLASILTLLWVRVNPFVSKDGPVLEICGLDCLK

SEQ ID NO: 814 - protein, 578 aa, Arabidopsis thaliana
  Clone ID: AT_MDF20.C1.p24.tg
MDSGGHKLPLQPLFSCPSSRINFHKRNHIDGHETQEFYPFNCSPHFPSKRTSTDQEGESFLDWDNPYICKLPVVLLFWCNTEQPDPEDFRCGACGRPTLSATYYACLICEKMFHKECVESPFEIIHPSHPFHSLRLTSSPQSQNCICCHHYFNDIFYHCSTCKLIMHPICAMRSIPFAVDHPKSHSHPLTFYPAQASLVCHFCASIKKFDPTYICIQCVFAIHKDCRGFPHVIRISRHHHRISFTSSLLSGTFSCGVCREQVDNNYGAYACNKCDGYFVHSKCAIDPKVWDGKELEGVPEENDKIDDGEPFKRIADGIILHPFHSHHLQLEIFRAYDENTYCRGCALPIYEGQFYSCMECDFILHESCANAPCMKRHPLHPYPLTLLNTASPGEESVSQCTACRRLVVGFYYFHYLDKHHERIALDLRCASIIEPFEFHGHKHPLYLPWEDSNKVTHCQICKEDFDMDSLEVNCMECDYTICFHCASLPEKVRYKHDSHFLMICDGKEASDKPYWCEICEGKIEVVKEKANSGDKKKKRLPTNRDKKERKIYKCNDCCTTLHAECLLGQTFTSNLLKQ

SEQ ID NO: 815 - protein, 227 aa, Arabidopsis thaliana
  Clone ID: AT_T30B22.C1.p14.tg
MGIGEESTKPIWGSVSHTSSGYALNGKIMLSSVIVLFVAVIMILCFHSYARWLFRRHNRRIRRRIRSHLRTLSASPRDQALDQAVLDKIPIFVYSSKNPPPPEEKEECSVCLSEFEEEDEGRLLPKCGHSFHVDCIDTWFRSRSTCPLCRAPVQPPFQVIETGSSSSSSPLTFPTEGCEREPIDLAGIIVDISREVEFEGSNPGLPIENGSKFPGSRVLSLKRLWSI

SEQ ID NO: 816 - protein, 566 aa, Arabidopsis thaliana
  Clone ID: AT_MLP3.C1.p23.tg
MGTSSGSNLPHQMLPPRQQLQTSLSLVSSDPHLSRSNSGIVRESPAESASSQETWPTSKSIMGRKTDSGKTGPDSHDQHVIRHVSIADKVSLRDIARERLDIVAERMHRLPEEYLEELKNGLKAILEGNGAQPIDEFMFLQKFVQTRSDLTSKTLVRAHRVQLEVLVVINTGIQAFLHPNINLSQSSLIEIFVYKRCRNIACQNELPADGCPCEICANRKGFCNLCMCVICNKFDFAVNTCRWIGCDVCSHWTHTDCAIRDGEISMGVSPKSVSGMGEMLFKCRACNHTSELLGWVKDVFQHCAPNWDRESLMKELDFVSRIFRGSEDTRGRKLFWKCEELMEKIKGGLAEATAAKLILMFFQEIELDSPKSLESGEGGGTIAPQDACNRIAEVVKETLRKMEIVGEEKTRMYKKARMGLEECEREVEEKAKQVAELQMERQKKKQQIEEVERIVRLKQAEAEMFQLKANEAKVEAERLERIVKAKKEKTEEEYASNYLKLRLSEAEAEKEYLFEKIKEQESGGNGGEASQAVMYSKIREMLHGYNASSPRVDPRSNQRNPFRSNP

SEQ ID NO: 817 - protein, 187 aa, Arabidopsis thaliana
  Clone ID: AT_T6K21.C1.p30.tg
MTSYVQHDGDGDSVKNAEVAEAILNDNNELSHIEREITVCDTCGDQGYEYLLVICCNCGVGAEHTYCMMEKIDKVPDSWSCYDCTKEVDEMREEKGNEETSSRKRKADAVTNFFETAEKTSSQRQFDLLNTESYPKIRNFDLNVDPNIKLGEISGIDMDKVHDIDLNRDPNIELGEVPGIDINKVMT

SEQ ID NO: 818 - protein, 656 aa, Arabidopsis thaliana
  Clone ID: AT_T1E22.C1.p90.tg
MNSNSVGVFREKEIDGKPFHTYTLSSQTDTTTPSSSGETAIDGDDHLSLQQPLFLCPSLRLKADEINYSYSEILPFNISPYFPSIRGADQQVQHLLDSDSQQVHDLLHSDNSHDDDGDEICKLPVVPIYWCNSKEIEFDQFNCGACERSKIGTDYYICLTCDLMFHKECVESPLEIKHPSYPFLSLKLYTRHEQLMSCMCCKHPSNLIFYYCPTYKLSLHPDCAMKPISIFIDHPKRHPHLLTFFPKQASLLCDVCSLIKEAFPTYVCLRCIFVAHRDCIYFPYVIKICRHQHRISFTSSLPSGKWSCGVCRKKVDNNCGAYTCNKCSHYFVHTRCALREDLWDGKDLEGVPEEPEIILEPFETIADGIILHFSHGHHLKLKTSGVYNENIICQACILPIYEGNYYSCMDQCNFILHEACANASRKKDHALHSHPLTLKVVSDIQNEYFKGYFRCSACDRESCGFIYEEDQYSIDIRCASVSEPFDYQGHEHPLFQALDRKEEREAICQICRKKYGRKLNCIECNYIICFSCATLPYKAKYKLDKHFLTFREGEEGSDQLDWCEVCEKKLEYSREGGFYACDDCCTTLHVDCLLGKEMYMLNPGHTVMAYRSNIYILPNNTMTRPFCQLHKEDRCPHKVIFNWHDMTFCSYSCSMD

SEQ ID NO: 819 - protein, 315 aa, Arabidopsis thaliana
  Clone ID: AT_F6F3.C1.p4.tg
MVSDLPLDEDDIALLKSPYCDDGGDEDVNSAPNIFTYDNVPLKKRHYLGTSDTFRSFEPLNEHACIVCDIADDGVVPCSGNECPLAVHRKCVELDCEDPATFYCPYCWFKEQATRSTALRTRGVAAAKTLVQYGCSELRSGDIVMTRENSQLENGSDNSLPMQLHENLHQLQELVKHLKARNSQLDESTDQFIDMEKSCGEAYAVVNDQPKRVLWTVNEEKMLRGVEKFSDTINKNMPWKKILEMGKGIFHTTRNSSDLKDKWRNMVEIDIIIVVAEIGDQNGEGKKRRSDEEDESNRNHPKIRICGMVFVKPIT

SEQ ID NO: 820 - protein, 686 aa, Arabidopsis thaliana
  Clone ID: AT_T6H20.C1.p160.tg
MEKVVLRVHDHPLLPFERFYFGRCSGCSREGYFYGGYRCNELACFAVFHKECAESKPEISHHAHPKHLLKLGNRRQRCHLCERPVGIGYFCSICDFGMHLVCAKSPPLSLQPQLSSIENYKVHEHPLKPFKTAWLAETGNCKGCNYIIGNGDSAPFYECRRCKLYIHVTCLELFFTTDARHNSHLKHPLKYLKNGPPSYADHKCLLCGREFEDQQGQKYELYHCDVCNFSICISCQGNPPPLVVVTPKTHEHQLHLIPRLLDFTCNACGTQGDRSPYFCLQCNFMIHRGCIDLPRIININRHDHRISYICHLGQGNLKCGVCRKTVDGFYGAYSCSKCSSYVVHSLCATRKDVWDMVELEGTPEEEEIAPFEVVDENTIKHMSHDHDLIFNNDGINLHESKLCEACVSQINTDPFYSCELCGFILHQTCANMPRKKRHVLCNIPFSLQTDDSKDSSRLRRKCSLCLQHFTGFAYNLHIAYNSRTEVMDIRCGSIFEPFVHERHPHPLYYKFFTFSAVAKCDICHITRRHLLCCEECDFRLDFRCATLPKKVMKQRYDDHPLFLSYGENNVDGEYWCDVCEKRVDAKTWFYTCDACGVTLHVSCVVGDFSYHMPGPLSTVVSEYKMVPPAVVSLYKVVPNTSICRPLCSRCHTRCKLPCILETSEDGVNVYFCSNDCHKNPWESSYY

SEQ ID NO: 821 - protein, 453 aa, Arabidopsis thaliana
  Clone ID: AT_F5A8.C1.p9.tg
MENVVATVSGYHGSDRFKLIKLISHSGASYVGAMSRSITHLVCWKFEGKKYDLAKKFGTVVVNHRWVEECVKEGRRVSETPYMFDSGEEVGPLMIELPAVSEEAKVTKKVNKASETFDKYFSNGGENRSGSTSELATWMEKNVEANRHSVRLRTKRPSSILENKENSGVAESSRKGKKRVVKQRSYRNLIDLESDEESDNNHHDNSDENQNETQDHREPADENVRGFVFEQGETSALRHPGDLATPNWDVDEIEESENWSHSAVFKRPRSFSPEIKPQDDDESTREETEATEKAPAQVSCIICWTEFSSSRGILPCGHRFCYSCIQKWADRLVSERKKTTCPLCKSNFITITKIEDADSSDQKIYSQTVPDLSSTNNILVVLPEEEEQRQTLNPLTRASGCSRCYLTEPEELLIRCHLCNFRRIHSYCLDPYLLPWTCNHCNDLQMMYHRRNY

SEQ ID NO: 822 - protein, 795 aa, Arabidopsis thaliana
  Clone ID: AT_T1E22.C1.p70.tg
MMSFFLQKSKLLSFVDRGPPSWDQCPQSEKKISVDGAPDLLRMNASSDSLRISSPLMLQLSDDTISESANMIESIKARLIGNGQTEKRSSDGRGKDESNMESLEIAMYQTVRNKIENMINQSLTRVDHQPHEAENCSEKNSVGGPSTLQGRFPDIRSRQTSRRPDAGSDGFHPIDCDGVYLSSCGHAVHQSCLERYLKSLKERSGRRTVFEGAHIVDLKKKEFLCPVCRRLANSVLPECPGDLCSVSKLQDSPRTKLRRKDALQPSLWLSEALCLLRSAAEVIEDGDRGKTVTPQGDGPRRKDLKSVSKMLWDFYFPKPEDKTLKRLWLPPQSIVMWDTLKYSLISMEIGTRFAKNSMLPVYCIDSLYEELKTSKGTILSVLLRVVQSSRTKNTIHVRQRFVGMKHLAESICYGVSSSSSSSIFGSEGTTGSLKNIDLLWNRASDPVLAHDPFSSLMWALFCLPFPFLTCEESLLSLVHIFHSVSLVQTVIAYCACRPSELSELNFGENLLNDISNALRESGGWEYFRSNNMDLSCDIKDTIRKYSLPFLRRCALLWKLLKSTPRKLHEESDMFDLPSDPTTDNMDFIYSPQSELNHVQELEKMFNIPPIDIILNDELLRSSTQIWLQHFQREYRVNRVKRSLCITPVVPFQLMKLPNLYQDLLQRCIKKRCVNCTKVIEEPVLCLLCGSLCSPIWSPCCRESGCPNHAITCGAGTGVFLLIRRTTILLQRFARQSPWPSPYLDTFGEEDIDMIRGKRLYLNEERYAALTYLVGSHGLDRSSKVLGQTTIGAVLH

SEQ ID NO: 823 - protein, 631 aa, Arabidopsis thaliana
  Clone ID: AT_T1E22.C1.p100.tg
MNPVGEFREEEIDGKTFFLYNSSTSSGEDIPLQPLFLCPLLRVKTHSQKDPEANYDDQGFVLFDISPHFPSADPQVHYMLDSHNRGLICKLPVLPLFWCNNKEPNGADFCCSACKITNLGTAYYFCTTCRKKFHKECVESPLEIKHPSYPFQSLQLYSSPFALVNCICCDISFQDMIYHSSTYKLSMHPVCAMKPVPSFIDHTKRHPHPLTFSPSKAFLPCNVCGLIKESILTYVCVPCDFVVHQDCIYFPHIIKISRHHHRIIFTSSLPSAKWSCGVCRGEVDNHYGAYSCNKCGDYFVHTRCALRKDVWNGEDLEGIPEEPEMDVEPYETITDAIILHFSHDHHLKLEINRVYDENKFCQACILPIYEGTYYSCMDTCDFILHEACANAPRKKHHPLHPHPLTLKVVSIGYDHYRRRGNYFECRACRRQSCGFVYDSLGFSLDLRCASVFEPFEYQGHENPLFLALEPDEEKAVICQICQEDGDGNNYIRKLNCMECKYIICFRCATLPYKAKYKHDKHFLTFREGKEGSDQLDWCEVCEKKLVYSRKGGFYACDDCCATLHVNRLLGRDEYMLKPGHTVMNYRSNIHILPNNTMTRPFCHGHKEDRCPHKVVFKWHDMTFCSYSCSMH

SEQ ID NO: 824 - protein, 246 aa, Arabidopsis thaliana
  Clone ID: AT_F9F8.C1.p2.tg
MAAAAVSSNPRTVEEIFKDYSARRAALLRALTKDVDDFYSQCDPEKENLCLYGHPNESWEVNLPAEEVPPELPEPALGINFARDGMQRKDWLSLVAVHSDCWLLSVSFYFGARLNRNERKRLFSLINDLPTLFDVVTGRKAMKDNKPSSDSGSKSRNGTKRSIDGQTKSSTPKLMEESYEEEEEEDEHGDTLCGSCGGHYTNEEFWICCDVCERWYHGKCVKITPAKAESIKQYKCPPCCAKKGRQ

SEQ ID NO: 825 - protein, 629 aa, Arabidopsis thaliana
  Clone ID: AT_F17J6.C1.p14.tg
MDVAISDDVPVNLESVEEKRDEETVEESPVKKKKPRFDEEVNRVAEIVLVLSALRKIRGGKPPTELEIDLMVEAKSKLVDMCQEFTPKDIIGVDAIGAVIEDLGFNGKLKDQRLGFRAPKLTISEKLSLGKRKMEELKKNPVVSTTSTSPAVNNVSMAHQWPNSEMKASASSVNASGSHYVREASGITQARMERPQFKSDLHTGTSQGPAVPAGNYFGNTTTWSAQPHSSTSTISFGTASDSKVPVPSSSRISDPSFRPFMSQTPPGAFPGMKGATYGQTSSPFGNNNHAEIAKLIHKVLQPRAKQNLLWNPPSREYMSKAMTCQICQGTINEIETVLICDACEKGYHLKCLHAHNIKGVPKSEWHCSRCVQLYNGKSFPPKYGRVMRSATTAKMSSSTAEVQLPAEKGVGKMDQKVSQEGMPHLETAKPTKDSAMEQTVEAEDVAMNPIVEKAMSEMVEAEGAAINPIVEAEDGAMNPIVEKAMSQIVEAEDAAINQAVDANFQTQAPTGNDDAESDDPSEPVSHSETLNPPELEKKEVMRKDATERSVSADCQDKNSKIIAESSLQEEISASQTENSPTQPPSQSDTDHSQQQKTTPNVEEEKSASQAENSPTQPPSQSNTDHFPTA

SEQ ID NO: 826 - protein, 1280 aa, Arabidopsis thaliana
  Clone ID: AT_F5E19.C1.p20.tg
MGQRGFSKVESGTCNVCSAPCSSCMHRNVGFTGSKLDESSDENCHGVVGSQCSVNEDDLLPSSMVNAHKSLNNTASEASNLVNSSHDALSENAESKETIRCSGISDDSGAAAMTSKPSLSGSRMKHKVSASANMLDQSSNCIEDQEDGILSADRAKQLKSGCSNNEIGNKDLADGSALNSDPIPGGSRKDEVKLESLQNPSSNHDDRVSSEKGNFKEKSRPGGNKERQEPSVEGSTRSGENRKDGKSSKSSSSNSSAVSESESDDSEMVEHDVKVCDICGDAGREDLLAICSGCSDGAEHTYCMREMLDEVPEGDWLCEECAEEAEKQKQEAKRKRETEVTFNTYSSGKRHADKIEAAPDAKRQVVEASTGSPKKSILPRVGALSRETSFKGLDRLRGKLNHQTSFSDDTESARSAGSQLQPPKGAFLKSSSFNCSSSKPKVQLMDDAIHPRQKTGKEDTALDLKVGGFRNVGKSMPSRTTDAGNSGGSDSQAKMLGSKVYHSQEGKSLKQVKDRNREANASASSIDQKLKSRGNSSVSHANNNRDLKGLQSDGKRGGDISTNEKCSASEQSSSQADCKDELPSTSCTGEGMPNHGTVALQDGLPRSRVPREVGKKSKEAFSKRQRSSLLAGAKGLPSSQKGGQTAESSDTSGVSDSDLSTTKNVKEDLNKGNRLRAAVDAALRKKPSFGKNRVLEQSDASLVANVDSSSEKTLRNQLPSKMHKNHVSHEGLQGGHPILWPTSDPYKQTIVTNEKQLIFPGADTIPSRLVEPEVSFPAVKPVMRDLPLVPSPVMLRSSAIPDHEFIWQGDLEVRKIINQSAMHSGIQAHLSTLASPRVAEVVNKFPETFSLNEVPRKSTWPTQFEKLGTKEAHIALFFFAKDTESYERNYKPLVDNMIKNDLALKGNLDNVDLLIFASNQLPSNCQRWNMLYFLWGVFQGRKETNPQKNTSLPTSNVLPRDRDPKELCQTSSPSKHLEKGSSLRESSSNGIETRNGTDARSHENPNNRESSIERSPSKKEDIALKVEEAGVNHIPPQVTGSNSGDSLVRKVQKVEEQELGGRKDLPLTVMGSGIQSHGQDNPLEKDLNSSQASHRKRPLWELSNPANENSSAINQKVELNNDGLCEGSPNKKLKTENGSSSLCRDTSGHDSGIMKKSPKVVFPLDLNDDSEMVDNLSPLGNDENNNNRRLISGTVPNLELALGAEETTEATMGLLPFLSRSSNSGEQSNNSMNKEKQKADEEEEDDAEVAASLSLSLSFPGTEERKNVNTPLFLFRDLPR

SEQ ID NO: 827 - protein, 379 aa, Arabidopsis thaliana
  Clone ID: AT_F17I14.C1.p20.tg
MATWNASSPAASPCSSRRRTKAPARRPSSESPPPRKMKSMAEIMAKSVPVVEQEEEEDEDSYSNVTCEKCGSGEGDDELLLCDKCDRGFHMKCLRPIVVRVPIGTWLCVDCSDQRPVRRLSQKKILHFFRIEKHTHQTDKLELSQEETRKRRRSCSLTVKKRRRKLLPLVPSEDPDQRLAQMGTLASALTALGIKYSDGLNYVPGMAPRSANQSKLEKGGMQVLCKEDLETLEQCQSMYRRGECPPLVVVFDPLEGYTVEADGPIKDLTFIAEYTGDVDYLKNREKDDCDSIMTLLLSEDPSKTLVICPDKFGNISRFINGINNHNPVAKKKQNCKCVRYSINGECRVLLVATRDISKGERLYYDYNGYEHEYPTHHFL

SEQ ID NO: 828 - protein, 1506 aa, Arabidopsis thaliana
  Clone ID: AT_T32E8.C1.p13.tg
MNVDQCQWRKKMMGRGVDGGCGAEEKPYRPFRRVALDKENGYEDMGSLEIDFLAQASKNLSERSPFDVPEDGSTSVLSVPTLPIALANLLKNHSDNKKRHKKSHSGADKKKKKSSRQGDKLRSGSIWLEHEDYFRRLDFPDLETLSDLASLRSLSSRNCFSIPSVEYDSIDIQQRETDASAKNEDVVCGDGVVLEQIKNLLTKDISEGTVRKEEDVVKPMGVDNVGNGISSGSDYSGSLEWVLGNRNRILLTSERPSKKRKLLGSDAGLGKLMVAAPCEGNALLCDFCCTGHHQLIVCTSCKATVHKKCYGLLEDSGKPWLCSWCELENGRADSERPCLLCPKKGGILKPVLSKTENGGPAEFAHLFCSLWMPEVYIEDLKKMEPILNFPGIKETRRKLLCNLCKVKSGACIRCCNGTCRTSFHPICAREAGNRLEVWGKHGCDTVELRAFCSKHSDIQESGKSVEGGESNAAESRSPICHLPSESVGEGHLSNDEMGVDVGTPGTGSDISRNSDLQELESPHSKFNLSATDNVESGMTGRSNEDERTLSKSLSFGLILKKLIDLGKVDVKDVAAEIGINPDALRAKLTVTHKTSHLPASNLYALIDGDLLPDLLGKVVKWLSQHAHMGSSDKGKNLKRKTTTKSERRAAICTEGIVMLDSDILDPAVAKAFSIERTHEINICNNTTNNTRCTLTENCTGNGIVVVEAKANGSVLKKEGSVSLAPDHSPEEKNSIVLDQKVHHGKSSVIPSDDHGEQSNSSSSGVMMENAFSLRPNSSQNRGNLNCPNPIILDLFNQEAYPGFNPHRYIHKELSELGKEQTLKSSTDSDVARMTTNFDGHLVTLTHLAGSEEGNKHLQGAETFLQLSKARKLGILDLSPEDELEGELLYYQLQLLGTAVSRKQLSDNLVYEVAKKLPLEIDEQHGRRWDDVLVNKYFHDVREARKQGRKEQRNKQAQAVLAAATAAAATSSRNTSLRKDMSEEPAQQEMSTSRRKVVGSSHLVPQTKESLLKMAVSGPPSEKRSDHHTPDFLVENPRTCDICRRSETIWNLIVVCSSCKVAVHIDCYKCAKESTGPWYCELCAESSSEPSFNFGEKPNSSTECTLCGGTTGAFRKTTNGQWVHAFCAEVKFPLRQQLLAGSGVLYSVLNIANNLVYNFWQWSLESTFRRGQINPVQGMCSYGNCQTTFHPSCARSAGFHMTGGGKHPHKAYCEKHSMEQKAKAESQKHGAEELKSLKHYRVELERLRLLCERIVKREKLKRELAISSHEILAAKRDHAARPLHVRNPFSPPEVSSDSATTSIKGHPDSNISGSEAIQRSDDITIDSTVTDKRRGKGPLLMDTDQKTDDSATSKSRFSRKLTERQILSGKTVPRKHCIVSPSVSEDGDNGSKPKKQHVETFAKELVMTSDEASFKNRRLPKGYFYVPVDCLQEDKPGNQKLASSDKPANQKTSSGDQSGFTNWLKAKEQMVLRYKRAVAATENQLKKAIVKLLGTRYKLCLLVMFEI

SEQ ID NO: 829 - protein, 557 aa, Arabidopsis thaliana
  Clone ID: AT_MGI19.C1.p10.tg
MNSCDIVPMEAELSPGAIEEWLSTVKHGKMTENGKRRSDLSIKVKRHLSALGWVISYYNKRNKKEQRYKSPKGKWFYSLAKACMSCVDQDSQQQLQIVPKYDLSCLPSNIASESSSDVSNQKQKKSKKRGRVEDLDVKSTAPEKDNHPSADLIKIVPNFDVAKQQQQKKIIMNREGSDTAVFNGDQEKIRIGLNVDVIHEQQKKRRKMASEEIRRPKMVKSLKKVLQVMEKKQQKNKHEKESLRFCRKDCSPDMNCDVCCVCHWGGDLLLCDGCPSAFHHACLGLSSLPEEDLWFCPCCCCDICGSMESPANSKLMACEQCQRRFHLTCLKEDSCIVSSRGWFCSSQCNRVFSALENLLGSKIAVGNDGDLVWTLMRAPNEGEHYDDEQISKLESAVEILHQGFEPTNDVFSGRDLVEELIYRKDRTGVGRGFYTVLIERKNEPITVAAVRVDKDVVEIPLVATLSSYRRSGMCRVLMDELEKQMSQMGVCRLVLPAAKEVVTTWTERFGFSVMNSSERLELVKHGMLDFVGTIMCHKFLQKERAENDSAEESSLTE

SEQ ID NO: 830 - protein, 241 aa, Arabidopsis thaliana
  Clone ID: AT_MOP10.C1.p15.tg
MAAESSNPRTVEEIFKDFSGRRSGFLRALSVDVDKFYSLCDPEMENLCLYGHPNGTWEVNLPAEEVPPELPEPALGINFARDGMQRKDWLSLVAVHSDCWLLSVSSYFGARLNRNERKRLFSLINDLPTLFEVVTGRKPIKDGKPSMDLGSKSRNGVKRSIEGQTKSTPKLMEESYEDEDDEHGDTLCGSCGGNYTNDEFWICCDVCERWYHGKCVKITPAKAESIKQYKCPSCCTKKGRQ

SEQ ID NO: 831 - protein, 902 aa, Arabidopsis thaliana
  Clone ID: AT_F15G16.C1.p130.tg
MILKRTLTTFENQNLKRCKIDSEIEYGRKKGEIIVYKKRQRATVDQPCSKEPELLTSSSSSLTSKEESQQVCSDQSKSSRGRVRAVPSRFKDSIVGTWKSSRRKGESTESSHDDDDVSLGKKVKGFSGSSKLHRSKDSKVFPRKDNGDSSEVDCDYWDVQISYDDANFGMPKKSDASRKGVYKPEEFTVGDLVWAKCGKRFPAWPAVVIDPISQAPDGVLKHCVPGAICVMFFGYSKDGTQRDYAWVRQGMVYPFTEFMDKFQDQTNLFNYKASEFNKALEEAVLAENGNFGDAEIISPDSSATESDQDYGPASRFQALMPLKSLKRTKDSQPEELLCKHCSKLRKSNQYCGICKRIWHPSDDGDWVCCDGCDVWVHAECDNITNERFKELEHNNYYCPDCKVQHELTPTILEEQNSVFKKQSPSEWERHTGCRAKKWKYSVRVKDTMLPLEKWIAEFSTYTLETQMLDKQKMLSLLEEKYEPVRAKWTTERCAVCRWVEDWEENKMIICNRCQVAVHQECYGVSKSQDLTSWVCRACETPDIERDCCLCPVKGGALKPSDVEGLWVHVTCAWFRPEVGFLNHENMEPAVGLFKIPANSFLKTHGSCVHCCKCATHFHAMCASRAGYNMEEVSLLFISQPDPDSVVVVHTPSGVFGSRNLLQNQYGRAKGSRLVLTKKMKLPGFQTQTQAEQSRVFDSLSAARCRIYSRSNTKKIDLEAISHRLKGPSHHSLSAIENLNSFKASFSFRAPFMSVFCFLGATFSEYLRKILISIYLVTHQEADFTSFRERLKHLQKIFESALVNLAYMDGIIEYRGVKVRRSVADLREANYRSQGKDCYCMPNCYARIVSMGDGEDNRIVLIAKTNVAAGEELTYDYLFEVDESEEIKVPCLCKAPNCRKFMN

SEQ ID NO: 832 - protein, 1606 aa, Arabidopsis thaliana
  Clone ID: AT_T25C13.C1.p90.tg
MEAKVPRPRGRPRKRQRLEDDNRKLNNRGKKQVLEVEPAVPISLLGCYMLKDFDDNEVFLGKIVSYDTGLYRVIYEDGDCEELESGDLRRLIISDSYLDDELRVRRKKLDKLILKKEEKKKRNSPENKAVELPNQVNGVQARAVTNSEDGDSYSDSESSESGDKRGSDLEIEAPLVPPVDLPPSSGTIGIPEEAVAHLLSVYGFLRSFSFQLYICPFELNDFVGALYFSGPNSLLDAVHVALLRALKGHLERLSSSKSVLASKCLRCIDWSLLDVLTWPVYLVQYFTAMGHASGPQWNIFNKFVVEIEYYSLPIGMKLKILQILCDDIFDVADLRDEIDAREESEIGFDPDRVATGLLENVPRRVHPRFAKTSAYKEKEVTDSSTNESKDLDSRCTNGGSNEVSSDLDGNSDECRICGMDGTLLCCDGCPLAYHSRCIGVVKMYIPDGPWFCPECTINKKGPKIAHGTSLRGAVQFGMDPHGRLFLGFSQHYSGTFEFACCDTDEHSPSFLLNHRLNISVNGDAVVKYYNVNDISKVVLVLISASSHTLEYVEICKAITQYWDLPEGISLREGEIGLTQAKDREDGKVSEITKSDSANISNRSHTQTVFDLPTSTLGNTNSAVTGGSCGIQGKKLAARVTYLGLSFKPNTYNNHYTNGELAVSAAASLAVLSSEETHEPDLRKYNSAKKAASSNILEQMKAFSLVAPRFFWPSPDKKEITRERCGWCHSCRLTSASRRGCMLNAAVAGATKGAMKIFSGLFPLKNGEGVLSSIAAYILYLEESLRGLIAGPFLSESPRKQWRKQLEENICSIALSCDWFKQMDDWLIEHSIFQSAPVTLGVPQRRGPGRTKQNTQAEVTAEGSDADSFTWWRGGKLSKVILLKAVLSQPATKKAAWQGGSKKIPGLNYGDASYIPRRSRRSFWKAAVESSKNISQLALQAYQNLQNVKGPETDVAIFRNARICDKKLSDNKPQGGTRWRNVLVHHVIMMFYYGNPLVSLSFEDFVTRIALRCLNTQMEMLKFWSPANVIPVIKVKPPSQQLSSQKPRENTSGVKQVTPDSSVSKSKQKTLSCGVIWRKKNVEDTGVDFRNQNILLAGRSDKPSLEPVCGICLLPYNPGLTYIHCTKCEKWFHTEAVKLKDSQIPEVVGFKCCKCRRIRSPDCPYMDPKLKEQKQIKRIVFTNQKQRQGNSGLDSDSERMSEQKDSKPSTPLPATPLYPPDDVFIPEDDPLLVSVSKVKQITPSSFDLEWSTTAFAPGPQKLPVRRQVKREDSDAAYPELHPIVKPEAEEQALPVLTEWDLSGELLFDYEDMEFEPQTYFSLTELLTADDSGGGQYQENGDMVVSGNPQFEPTEKEECEDDMGPCQRCLQMDPAPDLLCTVCGLLIHSHCSPWSALPGSSWSCGQCRIRALGSITLGSFGAITQFKSILPDRSTKVDISLAGPFAGAALSVSMFAVGLFLSTEPDAANDLVQVPSMLFQGSLLLGLISRATLGYAALHAATVSIHPLVIAGWCGLTTTAFNMLPVGCLDGGRAVQGAFGKNALVTFGLSTYVMLGLRVLGGPLALPWGLYVLICRALVGIALILVVLTLLPVWDELAEVGIGLVTTF

SEQ ID NO: 833 - protein, 839 aa, Arabidopsis thaliana
  Clone ID: AT_F4P12.C1.p380.tg
MGEATVCFAKENSETKKDLKRDRLCFEQDNLDEEELYSSNKRQTKEPSNDDMKSEISNPVPSPVVDNASSFRDITSNPAKSSSGDRVGSCSGSYETITDEKHSEYCSSLANSDAVPSSFEREIPKHLSTTGITKITFKLSKRNEDFCDLPMIQEHTWEGYPSNVASSTLGVKMLKKIDSTNFLSNVKKLLGTGILDGARVKYLSTSAARELQGIIHSGGYLCGCTACDFSKVLGAYEFERHAGGKTKHPNNHIYLENGRPVYNVIQELRIAPPDVLEEVIRKVAGSALSEEGFQAWKGSFQQDKNMTEDDSNHIMDHSFQSLVSYPGSGWSLDESQSSTPCFPEDNYFREKICTKDTRHAHKPKAKKLTSHMFGMGCHKKVSGGGKWKRDNDLHRLLFLPNGLPDGTELAYYVKSQKLLQGYKQGSGIVCSCCDTKISPSQFEAHAGMAGRRQPYRRIHISSGLSLHDIAVSLADGGHVITTGDSDDMCSICGNGGDLLLCAGCPQAFHTACLKFQSMPEGTWYCSSCNDGPTSCKIATASWLYTYFNLNANILVLHSAYSLSPISDRSHDFSIGKFDDRTVILCDQCEKEYHVGCLRENELCDLKGIPQDKWFCCSDCSRIHRVLQSSASCGPQTIPTLLLDTISRKYREKGIYIDNGNTVEWRMLSGKSRYPEHLPLLSRAATIFRECFDPIVAKSGRDLIPVMVYGRNISGQEFGGMYCLVLMVNSLVVSAALLRIFGQKVAELPIVATSREYQGRGYFQGLFACVENLLSSLNVENLLLPAAEEAESIWTNKFGFTKMTEHRLQRYQREVQLTIFKGTSMLEKKVPSFSESTSII

SEQ ID NO: 834 - protein, 672 aa, Arabidopsis thaliana
  Clone ID: AT_MWD9.C1.p4.tg
MANLIRTDHQQHIPKKRKRGESRVFRLKTFGESGHPAEMNELSFRDNLAKLLEFGHFESSGLMGSWSFQLEIQRNPNPLYVLLFVVEEPIEASLNLRCNHCQYVGWGNQMICNKKYHFVIPSKETMAAFLKLEGGGYAFPEKESFSHLVELQGHVLHGFFHSNGFGHLLSLNGIETGSDLTGHQVMDLWDRLCTGLKARKIGLNDASHKKGMELRLLHGVAKGEPWFGRWGYRFGSGTYGVTQKIYEKALESVRNIPLCLLNHHLTSLNRETPILLSKYQSLSTEPLITLSDLFRFMLHLHSRLPRDNYMSNSRNQIISIDSTNCRWSQKRIQMAIKVVIESLKRVEYRWISRQEVRDAARNYIGDTGLLDFVLKSLGNQVVGNYLVRRSLNPVKKVLEYSLEDISNLLPSSNNELITLQNQNSMGKMATNGHNKITRGQVMKDMFYFYKHILMDYKGVLGPIGGILNQIGMASRAILDAKYFIKEYHYIRDTSAKTLHLDRGEELGIFCTIAWKCHHHNNEIKVPPQECIVVKKDATLSEVYGEAERVFRDIYWELRDVVVESVVGGQIEITRVDEMALNGNKGLVLEGNVGMMMNIEVTKCYEDDDKKKDKRIECECGATEEDGERMVCCDICEVWQHTRCVGVQHNEEVPRIFLCQSCDQHLIPLSFLP

SEQ ID NO: 835 - protein, 697 aa, Arabidopsis thaliana
  Clone ID: AT_F10C21.C1.p9.tg
MAVMNGGRATKRARRSNRISADLYDFSTFPTAEINGESTTLPPFRDGVRTFLATHARVTFPPSTLFSSLMTWQIMLRPGDSTDGSDLSSKLVSLDVVEEDVTRSSRSVYCEHCCVVGWSSHPVCRKRYRFIIRSGGDTKACTRCGNTQNLSEGSNCKWCSMALDIENWVYSQLEDNTHLLHGVIHSNGYAHLLCLNGREGGSGFLTGRAIMDFWDRLCSSLAVRKASVMDVSRKYGMDYRLLHGITRGCSWYSEWGYEFKSGSYALTKEAYQSAVDTLSAIPLSEFLFQGRKPRTQLHSIISFYQSLSCSELVTVKDLFSFLLQMIRENSSKPASKSSVLCAWSKSDVERVQQTMVKILKASGRPQANWVTRWALKRSICKSASPQLIDYCLKHFGGVLVDDGSRVVSSRCNPGSNDFEYRLESVNNVHRLSNQDVNNASVEHVKQDLRYLYETLLHPQTMAEFRSRATREKMIDAATKILDCKHFIKDYLSSTVNPVAINLWCCVELSDELKESPAPPPERLVLPLNATVSDLKIEAAKAFQEVYAMFKRFEVEELLGYGSIDDSITLKFLVGTNGVIRIKGRCSKHGLLRYRMERGVDNWKVDCKCGTKDDDGERMLACDGCGVWHHTRCIGINNADALPSKFLCFRCIELYSKKPKQSKKERGSSQVPKAGFVCRGESAAMGSGSNLSVTLRVG

SEQ ID NO: 836 - protein, 825 aa, Arabidopsis thaliana
  Clone ID: AT_F13M22.C1.p2.tg
MPKEENGQLKRDRLDDDTDEGNKGDHFPSKKQAKEASNDDITSEISNPVASPVESTSLFRDVSSQPVKSGLVECSGSDFGSEETVSDDASVVGSSQTEQSSDVLPSRFVLEIPKHLSSTGITKITFKLSKPKKEFDDLPLIKDHTWDAGVVKMPKKKIVSLSYPSNVKKLLETGILEGARVKYISTPPVRQLLGIIHSGGYLCGCTTCNFSKVLSAYEFEQHAGAKTRHPNNHIFLENRRAVYNIVQELKTAPRVVLEEVIRNVAGSALNEEGLRAWKGDGQQVSNRVIACLTGIILRIIPLSVNALLSYHFVLLSETDSCESCSYLGPGLDESQSLTPCSVENHYFSEKTYAKDTLDEPKRIAKKLTSHVSGTGCHKKVSEGSNRKRDNDLHRLLFMPNGLPDGTELAYYVKTQISPSQFEAHAGMAARRQPYRHIFISSGLSLHDIAMSLANGHVITTGDSDDMCSICGDGGDLLLCAGCPQAFHTACLKFQSMPEGTWYCSSCNDGPISSKKATTTDPSGNARPIVIRLSRVVKAPESDIGGCVFCRSHDFSIGKFDDRTVILCDQCEKEYHVGCLRENGFCDLKEIPQEKWFCCSNCSRIHTAVQNSVSCGPQTLPTPLLDMICRKDREKGIFTDIGDTVEWRILSGKSRYPEHLPLLSRAAVIFRECFDPIVAKSGRDLIPVMVYGRNISGQEFGGMYCLVLIVNSLVVSAALLRIFGQEVAELPIVATSREYQGRGYFQGLYACVENLLSSLNVENLVLPAAEEAESIWTKKFGFTKMSDQQLQEYQKEVQLTIFKGTSMLEKKVPKATTGLSESTTLI

SEQ ID NO: 837 - protein, 343 aa, Arabidopsis thaliana
  Clone ID: AT_MIE1.C1.p24.tg
MDAQYQDLPPLKRLRLLQRDLEAAQQHQLPNQPEMKSLQLPAKKRKQTRVDYDDDDAENSNPTYHCLPAKKRIWAIDPDLLSGGGNPFSPFDLNVEYKPYVEEKSIEKKSTLNVESSLEVEEDDDKENIDPLGKGKALDLSDREVEDEDGIMCAVCQSTDGDPLNPIVFCDGCDLMVHASCYGNPLVKAIPEGDWFCRQCLSSKNREKIFSCCLCTTKGGAMKPTNDGRWAHITCALFVPEVYFEDPEGREGICCSEVLSKRWKDRCYLCKVRRGCVIECSEMRCKLAFHVTCGLKEDLCIEYREGKKSGGIVVGFCNEHTKLWERQQESGKYKIVAREEDKK

SEQ ID NO: 838 - protein, 398 aa, Arabidopsis thaliana
  Clone ID: AT_F9L11.C1.p24.tg
MKGRSYRFSSTDPHEDWVDGLWTVDCVCGVNDDDGTEMVKCDDCGVWVHTRCSRFVEGQELFTCHKCKSKNNVNDSEETEVAQLLVELPTKTLGMENSCTRSVPFKRPFRLWTEIPAEEKVHVQGIPGGDPSLFDGLSSVFSRELWKCSGYVPKKFNLKYREFPCWDEQEKDEDGAGVLFSMSKENVIAAPVSTLVGMRRSLDGKGGTNDVKLGCDSGETDRKHSQGAIKKDKRLLRPMMTNKRRKELFGASKERMKKKVEVVDKEEDDKKGFVGKTGNRPASDAKPSESRKDIEAEGFTSDVGITKSVKAKKAALETGGDESGNTEIGVECSREQNLSDVHANGTGKQEEKAGHHFRIVLKSSATTDPSVLGGRDVPHNEANKEEEVRLRLAKTIPI

SEQ ID NO: 839 - protein, 571 aa, Arabidopsis thaliana
  Clone ID: AT_MBK5.C1.p18.tg
MARDMNVVEILDDEEEDEKECEDWCFICKDGGNLMLCDFKDCPKVYHESCVEKDSSASKNGDSYICMWHSCYLCKKTPKLCCLCCSHAVCEGCVTHAEFIQLKGDKGLCNQCQEYVFALEEIQEYDAAGDKLDLTDRNTFECLFLEYWEIAKKQEGLTFDDVRKVCASKPQKKGVKSKYKDDPKFSLGDVHTSKSQKKGDKLKNKDDPKFALGDAHTSKSGKKGVKLKNKDDPKFLVSDHAVEDAVDYKKVGKNKRMEFIRWGSKPLIDFLTSIGEDTREAMSQHSVESVIRRYIREKNLLDREKKKKVHCDEKLYSIFRKKSINQKRIYTLLNTHLKENLDQVEYFTPLELGFIEKNEKRFSEKNDKVMMPCKKQKTESSDDEICEKEVQPEMRATGFATINADNLKLVYLRKSLVLELLKQNDSFVDKVVGSFVKVKNGPRDFMAYQILQVTGIKNADDQSEGVLLHVSGMASGVSISKLDDSDIREEEIKDLKQKVMNGLLRQTTVVEMEQKAKALHYDITKHRELLEKPSEQERLLKEIPRIIEDFIEIKQEPCVGGLSHEAVINID

SEQ ID NO: 840 - protein, 764 aa, Arabidopsis thaliana
  Clone ID: AT_F17A17.C1.p36.tg
MAFHVACPITCRRICHCSLGFSRDLRGANAKHKFLKEVIRVEEFLKDPAVSSNVFIGGTVQVRVPKVVPAPQTVSILGVGDGAIGSGVDELAEEASAQKKRVALQRQAAVTVEAAEDYARRFESGVNDLTSNDHAGEELGHSGMNIMCRMCFLGEGEGSDRARRMLSCKDCGKKYHKNCLKSWAQHRDLFHWSSWSCPSCRVCEVCRRTGDPNKFMFCKRCDAAYHCYCQHPPHKNVSSGPYLCPKHTRCHSCDSTVPGNGLSVRWFLSYTCCDACGRLFVKGNYCPVCLKVYRDSESTPMVCCDICQRWVHCHCDGISDDKYMQFQVDGKLQYKCATCRGECYQVKDLQDAVQELWKKKDVVDKELIASLRAAADDEENGPVSGRSLKFSIKGLVEKSPKKSKEYGKHSSSKKHASKKGSHTKLEPEVHQEIGSERRRLGGVRIDNVGFQINEQSDVNSSVAGICSTHEPKIVKHKRVDDVMVTDEEKPSRIVRIKCSKPHDSDSEDTLRNAGEEKSVKAKKLVINLGARKINVSGSSKSNVVSHLSRDKDQSTLGGDKVDQTGEVRTLKISGRFGKTQSEGSKATFGSVTQFPAASTSEGNHVDDKTSISPALQKEARPLLKFKLRKPNSGDQTSSVTTQSEDEKLSSAKGQRSKRKRPSSLVDMASLKEDGEATTHSHQDNSRNDEMMDANWILKKLGKDSIGKRVEVHGSQNSWRKGTVTDVSGDTSTLSVSLDDGSIKTFELGKHSVRFIPQKQKRSRS

SEQ ID NO: 841 - protein, 314 aa, Arabidopsis thaliana
  Clone ID: AT_T23K23.C1.p12.tg
MEPPNSNSVCDRFVTGNLDLDNWIWIIEYFAKFKTELWMLNDVFELAPKLPDYLGEYTNEMVAFRCLASLFDSHVVSVTTTTTTTSMIEFDSSESCEYVLQCILDEIPLSELKPGAPGLTKWNLQPFIKHKLLSLPKCALELMIEPSSCENDTQVSPCSEEETLRSDGKENDRVTPPMDEPDLTGRTEEGESFSRGADELLDRRNAGFRYESENDGSHLSSPVEKIYRCVNCKESGKLLFCSSDGCEVMVHQKCLDSPPSYHDAGDFYCSLCALTCPSAEYVQFQDEVAKAKRKLVSFLRLMSEVNKKKSIEGT

SEQ ID NO: 842 - protein, 1516 aa, Arabidopsis thaliana
  Clone ID: AT_MDJ22.C1.p18.tg
MEGKVAKPRGRPRKRPRPEDLNGVSNRGKRPVFEVKVAVPRSLLGRYVLKDVDDSGVFLGKIVSYNTGLYRVEYEDGDFEDLETCYLRQLIIGDSYFDDELRARRSKLDDFILKKDEKKKTDCLKNKGVEVPTCNSPSSVAEVESGYSSCGLPECEDDIDPDFESMSPLVPPVELPSSSGTIGIPEEAVVYLLSVYGFLRSFSVQLYICPFGLDDFVGALNFLGPNSLLDAVHVALMRALKGHLERLSSEGSEVASKCLRCIDWSLLDALTWPVYLVQYFAAMGHASGPLWRFFNEFVVEKEYCSSPVVMKLKILQILCDDVFDVADLRAEIDNREESEVGFDTDGVTAELPENGPRRVHPRFAKTSASKEKELSEFVAVNHGISSLSDSKNWSSRYTDGGPNGDSPDLDANSDECRLCGMDGTLLCCDGCPLAYHSRCIGVVKMYIPDGPWYCPECTIKKMGPTVVYKTSLRGAVYFGVDPHGRLFLGTCNLLLVLKINVHADADIKYYNVTDIPKVVLVLLSATNHRLEYLYICKAISQYWDLPGGVISYLRTVETDLSHMQKEGGDEVSDIGEPDSANSSSGNLIQNAVRLHPSASGYTGGPVLARSSGAQEKNLVAVSTQKGLSFKPHSYINHYTNGELAASAAATLAILMSEETHEPDLHKFSNAKKAASSNILLQMKAFSIVASSFFWPSPDKKEITRERCGWCHSCKLTSASRRGCMLNAAVTGATKSAMKIYSGLFPLKNGEGVLSRIAAYALYLEESLRGLIAGPFLSESLRYQWRKKLEEASTCKAMKALLLELEENICSIALSSDWLKLMDDWLIELSIFQSAPVTVGATQKRRPGRRKQRNQAENTAQGSDDDSFTWWRGGKLSKIILLKAVLSKPKIKKAAWQGGTKKFPEFNYGDGSYIPKRSRRSIWKAAVESSKNISQLALQVRYLDMNIRWSELVRPEQNVQDVKGPETEATIFRNASICVKKIIDNKVRYGVVFGNQKHLPSRVMKNVIEVEKSEDRNEKYWFHEARVPLYLIKEYEESLHRVVHIPFIKKPSRKISKLQKRQLKASRANIFSYLASRRDNTEKCSCASCHLDVFLRQPTTPSVLINGQLQNAATSNTKTQIKRLNQQLPSSKTGDNASGVKQITPDFNLAPKSKHKTLSWGVIWRKKNLADTGVSFRHENVMLAGRSDQPNLQPVCWICKLPYNPGLTYIHCTSCDMWYHIEAVKLEESKIPEVVGFKCCRCRRIRSPDCPYMDPKLKEQKQMKQVFFRRQKHGQGNTGIDSDSERMSEPKDSLPSTPSFLSEDTFVPEDDPLLVSVSKVEQITPNSLDVEWNEDGCVPGPQKLQVRRPVKREDTDGNNNLSYTEFTMHPESMPVVKPEMEPTFPVMEWDASGNSNNMNEGELMFDYEDMEFEPQTYFSLTELLTTDDSGQCDGYGDDKDASGITDNPNPQVEAMEQCTSFLYENTIPCQICKHVEPGPDLTCQTCNMTIHSHCSPWEEESTCIGGSWRCGRCREWL

SEQ ID NO: 843 - protein, 1030 aa, Arabidopsis thaliana
  Clone ID: AT_F24C7.C1.p4.tg
MSSQSDDNGLISNCKLRTSLGKKKELVGDDNVEKLVGGSCFNKEKAEVKLEHGEYAEDKEILGLDFRSQVKVEIKDDECGIVELHDEELQVKRKRGRPRKVQISSQSDESRPNTNCKLARTPELSSQSSVDRISLSRLRGRPPKTKETSVSLYIEKGPESNGRRMVRKRGRPPTPQKKRKSGMTDESDWKAKKRLKLCESPLESRHNNPLIDDERMIGEQRSKQTEAGGHSRSKSKKMLSDRILQLLLTAGWTVEYRPRNGRAYQDAVYLNPEGKTHWSVTKAYQVYKKQLESNPNDQKNSTTGSGFGLLPEEDLHLLERTIQKKRSDTGKQRSKLKDRDTNDILVSTKGTGKIKREEKHSRKRCTPSARSSLKDVDSKEDGYILFEGKRTMLGWMIDSTIVPLNGKVQCMDCKKTDILLEGIITKEGIRCNCCDEVFSVLDFEVHAGGNRNQPFKSLYLEGGNSLLQCLHESMNKQSESQLKGYHFVDFGSGDPNDDTCGICGDGGDLICCDGCPSTFHQSCLDIKKFPSGAWYCYNCSCKFCEKDEAAKHETSTLPSLSSCRLCEEKYHQACINQDGTVPGERSTDSFCGKYCQELFEELQLFIGVKHPLPEGFSWSFLRRFELPSEVADCDISEKIAYNAKMAVAFSVMDECFSPLVDHRSGVNLLQNIVYNFGSNFHRLDFSSFLTAVLERGDEIIAVASIRIHGNQLAEMPFIGTRYMYRRQGMCRRLMDGIESFVAYFSQMFLAISEVLLDVWQFCCYPACFGDGPFCFFSGFGFAPVNDSEKKTIKNLNLLVFPGVDMLGKSLVKEKITDSVVSSPNGLVLLAPEMTLPVDVEENKPEESKDSAHERNCATAGVESPSNPVDSCLKLTYVEEGDNDRESNLKLLDGSVEEKEDTKKLTDIDINSLPDEVDDSHADQSDTKEQEIDDKEDKTPLSDDGCEGKAEGTKESNQQPDSNKVDNSQPLGNGGTGEELGNRTLALKREVTPTLRASPRLIQRSWRTSRVNQKFTGTTNAVLLDSPHRCV

SEQ ID NO: 844 - protein, 960 aa, Arabidopsis thaliana
  Clone ID: AT_mpk17.C1.p10.tg
MLETNEQKGFDLNVCASIEDFSESDIKAEGETDSLVDGNVENVIEIKDKKKVIEREILITRRVLRSGSVARDLVNSDKHCKAVKRKGNVVSGGSSVDEVKEEVKQECVKSLVPEEIRGDDFRSEVKVESKDDRSDDGKEEKVQRKRGRPRKFGMSSQSDDNGLISNCKLRTSLGKKKELVGDDNVEKLVGGSCFNKEKAEVKLEHGEYAEDKEILGLDFRSQVKVEIKDDECGIVELHDEELQVKRKRGRPRKVQISSQSDESRPNTNCKLARTPELSSQSSVDRISLSRLRGRPPKTKETSVSLYIEKGPESNGRRMVRKRGRPPTPQKKRKSGMTDESDWKAKKRLKLCESPLESRHNNPLIDDERMIGEQRSKQTEAGGHSRSKSKKMLSDRILQLLLTAGWTVEYRPRNGRAYQDAVYLNPEGKTHWSVTKAYQVYKKQLESNPNDQKNSTTGSGFGLLPEEDLHLLERTIQKKRSDTGKQRSKLKDRDTNDILVSTKGTGKIKREEKHSRKRCTPSARSSLKDVDSKEDGYILFEGKRTMLGWMIDSTIVPLNGKVQCMDCKKTDILLEGIITKEGIRCNCCDEVFSVLDFEVHAGGNRNQPFKSLYLEGGNSLLQCLHESMNKQSESQLKGYHFVDFGSGDPNDDTCGICGDGGDLICCDGCPSTFHQSCLDIKKFPSGAWYCYNCSCKFCEKDEAAKHETSTLPSLSSCRLCEEKCSKHYPHTLADHQACINQDGTVPGERSTDSFCGKYCQELFEELQLFIGVKHPLPEGFSWSFLRRFELPSEVADCDISEKIAYNAKMAVAFSVMDECFSPLVDHRSGVNLLQNIVYNFGSNFHRLDFSSFLTAVLERGDEIIAVASISLCRTKIKKFPKYMPLHGLRIHGNQLAEMPFIGTRYMYRRQGMCRRLMDGIESVGPPPLLMSGNSAAILLVLATGHSAFSQVLSGIKKEIWK

SEQ ID NO: 845 - protein, 802 aa, Arabidopsis thaliana
  Clone ID: AT_T27K22.C1.p4.tg
MPEIDLMRVDHCVSDVKLDDSSSSPPGFFDGGGVPLDSDVKLDEEDSDSLKKRGRRGRPPRILAKASSPPISRKRREDEDVCFVCFDGGSLVLCDRRGCPKAYHPACVKRTEAFFRSRSKWNCVCKRCVRSSEYVVVRENKGFCGICMKTIMLIENAAEANKEKVQVDFDDQGSWEYLFKIYWVSLKEKLGLSLDDLTKAKNPWKSSSSTAAKRRTTSRVHEKDDGNSPGVMKIRRAKVRKMDAVSVSNLGPSLDSNCSLGDRLPQLTSAATWATNELLDFVGYMKNGDISVLSKYDVQTLVLEYVRRNNLQNSPQNSEIMCDSKLMRLFGKERVDNLEMLKLLDSHFIDQVRSPVTDNSAGGVTETMSYQVNAGRSCDRLNTSEQHQEGESQQLNGHSIQVRPSSSDSRNHAVVKPDTSATLSNKPIDGLDTNMVWLYGDPDGKIHGPFSLYNLRQWNSSGHFPPELRIWRLGEQQHSSILLTDALNGQFHKTGLLQNHSIPKQEVTATIANDQNRSVAVPKIESRILDFSPNSVCTDQSVISSSNSVITRSSDVSNKSGNNCSHAVPLDFSLSNERDTVGFISLWDKRKVESSLLVQSPISCSLSLATLPRNSNCSLPPHERWSAGQTDGNSAATTACNQNGSLSGSAEKQVTATVQSCGQNWNAATPSSASNVWDSNSGLTSFPDNQEIDFLDLFSPTFKFNFASTTTDWQPIVAGPDECDESVSDLLAEVEAMESQKRLPSPTSTFRGPEELLIRHSINDSFSPAEGHSPALDVSKGDSMSSTNDLQMHSRSNSTVHF

SEQ ID NO: 846 - protein, 1247 aa, Arabidopsis thaliana
  Clone ID: AT_F24M12.C1.p160.tg
MENQQKQLQQGVPELASLAGREESSVRGIDLMRVDQCEEIGVNQANTPLHIRPPPPPPKKEDKEEDVCFICFDGGDLVLCDRRNCPKAYHPACIKRDEAFFRTTAKWNCGWHICGTCQKASSYMCYTCTFSVCKRCIKDADYVIVRGNMGLCGTCIKPIMLIENIAQGDNEAVKVDFDDKLSWEYLFKVYWLCLKEELSLTVDELTRANNPWKEVPNTAPKVESQNDHTNNRALDVAVNGTKRRRTSDSPTLPNKLDGKNPSNILKKAPGDTSWATKELLEFVSFMKNGDTSVLSQFDVQGLLLDYIKKKNLRDPLQKSQVLCDQMLVKLFGKQRVGHFEMLKLLESHVLIQEKPKGAKTTNGETTHAVPSQIEEDSVHDPMVRDRRRKMRRKTDGRVQNENLDAYAAIDVHNINLIYLRRKFLESLLDDINKVDEKVVGTILRIKVSGSDQKLDIHRLVQVVGTSKAIASYQLGAKTTDVMLEILNLDKREVISIDQLSDQNITEDECKRLRQSIKCGLNKRLTVVDILKTAATLQAMRINEALEAEILKLNHLRDRAKKLELLKSPEERQRLLQEVPEVHTDPSMDPSHALSEDAGLGTRKQDNHVKAQSKGPQNKGVNLNNVGNNVQKKYDAPILRSRNNVHADKDDCSKVHNNSSNIQETGKDDEESEIWHYRDPTGKTQGPFSMVQLRRWKFSGHFPPYLRIWRAHENQDESVLLTDALAGRFDKATTLPSSSSLPQELKPSPHDSGRTGADVNCLQKNQMPVNTSATSSSSSTVTAHSNDPKEKQVVALVACSGKVEDGNSVRPQPQVSCPASISVVPGHVVTPDVRETPGTDQYNTVRADGNHNTTKTLEDETNGGSVSINGSVHAPNLNQESHFLDFPSPTPKSSPEDLEAQAAETIQSLSSCVLVKGPSGVTWSTTTTSTTDAATTTSSVVVTGGQLPQVIQQNTVVLAAPSVKPIELAADHATATQTSDNTQVAQASGWPAIVADPDECDESVSDLLAEVEAMEQNGLPSSPTSTFHCDDDDDLKGPEKDFFNPVARMSLTPETCRLDVSQTSILDNVSAGKSSMLTEAKDNTPFSHCGTAGPELLLFAPPPPPPTAISHDLTLTTTALRLGSETTVEAGTVERLPKSVLGVSSEPSPRSLSSHDSSSARGSTERSPRVSQPKRSSGHSRDRQWLNNGHNSSFNNSHNNRQWPYSNSHGYDHGSGSYAAHPPKGLKICKFYESGYCKRGASCSFWHP

SEQ ID NO: 847 - protein, 883 aa, Arabidopsis thaliana
  Clone ID: AT_F18C1.C1.p6.tg
MGKRNTSWARNSNRKVRSKDKGSDESDEDYVISDEDEEESEADLKEEYASSVDGEPSFDGFNGSDAVEDEELDEVEEEDVMLRNVEWPKVKTGPRGNRKITGCKSRKTNQVVVSDNEDVDLDDADDEDDEIRNSRNAVGKSGSLDGEKHQRIGLGKRRRVFYEIEDEDGDYPEEDGDEEEERDVENVDSNSLHDGEDGKMALEEQDNVSHETEKEDDGDYEDEDEDDDGDEDFTADEDVSLDEEEEEEIIACNKNALKVCKGNKRKRRSGEGRKRRKKCSVAKTRLTRGRKRRVRNTKKGVDEDDDDFVDDCLPARKKAKTKSSRPRPRRRCTVPSDSDVASSGESDYEYTISEEEREQIREAGSLLKSSVNHASSIRQTTVNKDLPQLRKSPVKKGEKKVELVKRDVIKNVCGICLSEEDMRRLKGTLDCCSHYFCFTCIMEWSKVESRCPLCKQRFRTISKPARSTPGVDLREVVIPVPERDQVYQPTEEELRSYLDPYENIICTECHQGDDDGLMLLCDLCDSSAHTYCVGLGREVPEGNWYCEGCRPVALGSASSQTHIISEQQRGSGFYSRPSPLVVSGQYQDVSLIVSPRTPFFNGENLFSPRIPNGDAQGSSPSGLGATTLSRRRTLHRHIQNIINGDRLINMGARTGGTSSDGFVTTQIGHGRTIDPSQPVASQETGISLYAISEERLPNNNSLISAHDPELLSPKLDEFGSEEAFRRLSNNTFLGERPIDLGFHHGLAQGDPLVSNQQRLHSHMPNTMSSMAGERLQERVKAHLKNLSSQNDLGQTTFDEISTCSIHTILAACGLEHESSEVHLVPPPVTCTHHHMTPGSSSSSSSGSSLMKGCCYSCFDSFVEDVVKMILDTRQPHWLSLGLH

SEQ ID NO: 848 - protein, 250 aa, Arabidopsis thaliana
  Clone ID: AT_T21C14.C1.p10.tg
MEGGAALYNPRTVEEVFKDFKGRRTAIVKALTTDVQEFYQQCDPEKENLCLYGLPNEEWEVNLPAEEVPPELPEPALGINFARDGLSEKEWLSLVAIHSDAWLLSVSFYFGSRFSFHKEERKRLFNMINDVPTIFEVVTGMAKAKDKSSAANQNGNKSKSNSKVRTSEGKSSKTKQPKEEDEEIDEDDEDDHGETLCGACGDSDGADEFWICCDLCEKWFHGKCVKITPARAEHIKQYKCPSCSNKRARA

SEQ ID NO: 849 - protein, 1065 aa, Arabidopsis thaliana
  Clone ID: AT_mzn1.C1.p60.tg
MGLFDCRVYRVFHFLNLLSNFGFFSRSLEEGSLGSWYLGTVTSAKKRRRRCIRYDNILSDDGSGNLVETVDVSDIVEGLDDCTDVSDTFRGRLRPVPPKLDVAKLNLAYGLCVDVFFSDAWWEGVLFDHENGSEKRRVFFPDLGDELDADLQSLRITQDWNEATETWECRGSWLFLDLIEIYKEYNYLPVSVKQLWYDIRDRIGFVRIQEWTCSTKHLWQDLMLGVIEDNLKITIDQFLHDFDAERYPQLKLLNEASQAVYETNACLSGMLTIAPQEHQFSCIDKDFKPASQRCQSLSVLTSVSGIRSEASDINKATEISSKKSTAAHKKDILHKKPGIWHPFDCLAKSGPQAVSSFIRSPLLPMAMHVRMHLKYMGWTIEHMVDEAGRQRFRYLSPNGRLKEHSLRQVCFRLKQPDKSLTTPGMANPPSLSSENQTYSTQEMRSIVLALPAFNRSVALGEGLKLSTDTLLEYETQGNEEVFTRESRNFCPKKAFPGQKETLRVRIEPKTKAQGIILRLKSKRKQTPKKDEVIVGLQNVNRSMRRGHTSKKLMDIKNRVTSRGKTRVLRSRKRAQRVITPISRKHSPRNILSWLMDNNVVLPRENIRCCNQKDTTVRKEGKLTREGIKCSCCRRVFTINGFEVHANGASCSGAANIFLDDGRSLLECQVEAYKKRKKAQPPDMLKMKLRQGENDVFCSVCHYGGKLILCDGCPSAFHANCLGLEDVPDGDWFCQSCCCGACGQFFLKTTSTNAKEEKFISCKQCELKYHPSCLRYDGACDSLDKILGEKWFCSKDCEESLEPNMYGDDASKIEAAAENHCILSVALDVMHELFEPVKRPHGGRDLAEDVIFSRWSKFKRLNFSGFYTVLLERNNELVSVATVRILGKKVAEMPFIGTRFQHRQRGMCRVLINELEKVLIDLGVERLVLPAVPCVLNTWINSFGFTKMTISERKNFLKFTLLEFGRTILCEKILIKSGVADPIPSIASLGEQQCDILRIEDNSASDDGSEVHQAEQHLEESRSTKNPPEYVVQTLTPLHHNPKTPTTRKKKHDTNALHGSWERTNT

SEQ ID NO: 850 - protein, 1318 aa, Arabidopsis thaliana
  Clone ID: AT_YUP8H12R.C1.p24.tg
MTQSPVQPPPPLPAQPHSAAGGVIRGDVQVRCAGCRVILRVKTGVVEFSCPTCQLPQMLPPELLSRARPQFPQSPQQPPQPIQTLPPPIQQQLKPLNLPRPPVPAHGIDPTKMQLPCANCQAILNVPHGLTRFSCPQCHVELAVDVSKLNRSLTASQSHSNPPTPAAPTVPPPPPPEEVNEEAIEVEREEDEGGTAGETFMDYRPPKLSIGPPHPDPIVETSSLSAVQPPEPTYDLKIKEELERSKALSCLQIETLVYACQRHLQHLADGTRAGFFVGDGAGVGKGRTIAGWISIGSDLKYDARRDLDDVGATCVGVNPLNKLPYSKLDSKNVGIKEGVVFLTYNSLIASSEKGRSRLQQLVQWCGPEFDGLLIFDECHKAKNLVPEAGSQPTRIGQAVVDIQDKIPQARVIYCSATGASEPRNMGYMVRLGLWGAGTSFSDFNKFLGALDKGGTGALELVAMDMKARGMYVCRTLSYKGAEFEIVEARLEAGMEAMYNKSAEFWAELRIELLSASAFLPNEKPNSSQLWRLYWSSHQRFFRHLCMSAKVPVTVRLAKKALSTNKCVVIGLQSTGEARTEEAGLELDDFVSGPRELLLKFVEENYPLPEQPEPLSEDDSVKELQRKRHSASPGVSIRGRVRKMAKWKPDSDNESDLESEGGFPSENMYSADSADDSNDSDDEFQICQICSGEDERKKLLHCSECDKLFHPDCVVPPVIDLPSEAWICFSCKEKTEEYIQARRLYIAELQKRYEAALERKSKIIEIIRSLNLPNNPLDDIVDQLGGPEKVAEMTGRRGMLVRASNGKGVTYQARNTKDITMEMVNMHEKQLFMDGKKLVAIISEAGSAGVSLQADRRAVNQKRRVHLTLELPWSADRAIQQFGRTHRSNQTSAPEYRLLFTNLGGERRFASIVAKRLETLGALTQGDRRKVPFLTISYNFGKKSLMVMYRGIMEQEKLPVLPPGCSIDEPETVKEFLTKARAALVAVGIVRDSVLANGKDVGRFSGRIIDSDMHDVGRFLNRLLGLPPDIQNRLFELFTSILDVLVHNARIEGSFDSGIVDMKANSVELLSTPKTVHVDQMSGASTMLFTFTLDRGVTWESASSMLEGKRRDGLGSANDGFFESKREWLGRRHFILAFESAASGLFKIVRPAVGESIREMSLSELKTKYRKLSSLEKARTGWEDEYEVSSKQCMHGPKCKLGEYCTVGRRIQEVNVVGGLILPIWGTIEKALSKQARHSHKRIRVIRIETTTDNQRIVGLSIPNAAVETVLQGIASLSHDLETSYDKSDKETEWLSRQSLICVCLFVSADLAWVQEIDD

SEQ ID NO: 851 - protein, 431 aa, Arabidopsis thaliana
  Clone ID: AT_F28H19.C1.p2.tg
MSLHVKGPVCQTCGDIGFEEALVFCDSCMFESIHRYCLGITPIPFTEYITWICEDCDNSESDSDCNEVDQTVKKKKKSRNQPLVVLAEDNVLQEPLEGSKREESSCSRKPHELTCLDGNGESVLEAADSSSVPDHSSCTSKRKEVDQTANLGHILERSEKKKKKKKKKKSINHSPPVLAVEDHELQGTTNVVEPVEVSSSSPTKETMESKRQESSDSRKPHELTCLVGDSETANSSSVPEHNSCAVKKRKLSSGNKQIQLADGSSSCRVAESNMPLTLTSRNYRAQPIKIPIWRGLMSVKGGNSCTMDGIVAHVSSLACPKVHETASSLKGRLSAEILPRLEVWPKTFLKNGGPKDESVALFFFPSSESNDEKVFDSLVDKMKKNDSAMRCVLNDAELLLFTSYMLPKDSWTFNSKYYLWGVFKPRQTSRY

SEQ ID NO: 852 - protein, 349 aa, Arabidopsis thaliana
  Clone ID: AT_MOP9.C1.p18.tg
MVAVRRRRTQASNPRSEPPQHMSDHDSDSDWDTVCEECSSGKQPAKLLLCDKCDKGFHLFCLRPILVSVPKGSWFCPSCSKHQIPKSFPLIQTKIIDFFRIKRSPDSSQISSSSDSIGKKRKKTSLVMSKKKRRLLPYNPSNDPQRRLEQMASLATALRASNTKFSNELTYVSGKAPRSANQAAFEKGGMQVLSKEGVETLALCKKMMDLGECPPLMVVFDPYEGFTVEADRFIKDWTIITEYVGDVDYLSNREDDYDGDSMMTLLHASDPSQCLVICPDRRSNIARFISGINNHSPEGRKKQNLKCVRFNINGEARVLLVANRDISKGERLYYDYNGYEHEYPTEHFV

SEQ ID NO: 853 - protein, 492 aa, Arabidopsis thaliana
  Clone ID: AT_T14N5.C1.p23.tg
MEEATSNGKGTEHNQPNGLVESEALNNWSAGCGAMANSANASSRDSKKIQTYKRRKLGRSYSANKCSENDRFSMEGVSHSESRESVSYERFSIRTHLTGELPKPPSPNKPSSESTNHETVTAGCQHVLSHVLASKEFASLNRLLSENLQGVKIDDFTSRTLIDTRMKEGVYEGSPLLFSTDLQEDVGNDMAVLANSLLELSRTSYKEQLKQFYTGESKPCPNAENIRNDSVSDICKLCGEKAEARDCLACDHCEDMYHVSCAQPGGKGMPTHSWYCLDCTSKGIGSPHENCVVCEKMKTQGMMKTDNRSVDTSTECKEDSNESEENSSCNMNHEVHHVEMSRDSELCRTCGTKVDSGGKQIKLHGVRWYCSSCLCRNCLTDKDDDKIVLCDGCDDAYHIYCMRPPCESVPNGEWFCTACKAAILKVQKARKAFEKKMETVQKQKGIKPKNLQGKPQSKDNGELDQSVGGMDMLLNAADTLKDEEQMTFQSIK

SEQ ID NO: 854 - protein, 743 aa, Arabidopsis thaliana
  Clone ID: AT_MQC12.C1.p3.tg
MDIATSNAPMNLESVAMVDGNGAEPVSPPAKKPRFDEEMNRVAEIVLVLSALGRMRGGETPTALELELMFEARSKLAGMCLEFDPKDIIRKDDVKSVIEDLGFNGKLKDQRLGFRAPTVTISEKLSLGKRKMEEAEKYPTTSTVSTGYTLSQPNGSLASPGGLANKASVAHQWPSSEVATANTSGSHFKLDRPQMVLNGASQGTPVSSANYYAEPWSAQLPSTISFSTAPDKKVPIQSSVRTADPSFRPFRHGTFTGTNQPMHYSQTSSFGGNHTEIAKIIHKFLQPRVKQYPLWNPPSREYMSRAMACQICEVTINEMDTLLICDACEKAYHLKCLQGNNMKGVPKSEWHCSRCVQAFNGKPFPPTYGRATRAVATTTAKMPFRAAGVLSSSAKKIGPMDIKANQQKPIVSTFSRLQNTGLVSGAATTSQFESASVNAKTTASAAKTTNIGSQGSKENVACGANSPAPVSLTETPNRTGIASTISVINNGLISKPLTPVGTMSSTSPLPVVNQLPVNATSNASPSTPITASLVAQAPTVTQNGDGSSTASGTADHSILNADITTQVHTLTVTSSSNSQQAVSHSEVAKATEDAAPLENVSECEKPSESTSHPDSLNDKTISENVQESSKDAKVDSEACQNHPTASPATVVPDQDSTITAAPSVTQEDSAFNTEKTPPQPLSVSSNYDSQTEKETPNVQDSVHNVPGDSEKGKGLNGLDDRHQEQPSEPEFYKSDSVKEENAA

SEQ ID NO: 855 - protein, 653 aa, Arabidopsis thaliana
  Clone ID: AT_F15E12.C1.p11.tg
MGFRYNGTELFAIKLGHETKSSLIPLYIVEENVKHSSEPYCDHCRCTGWSNHFVSKRKYHFIIPIDTEWSLPLEDDAFDSQSHVLHGLIHCNGFGHLVCVNGMESGSKYLCGREIVDFWDRLCNSLGARMITVEDLAKKRSVELRLLYGVAYGHSWFGRWGYKFCCGSFGVTKNEYENAIEALGSLEIDQIEFDFGELRQSKEINQVFRYYREMSEGHLKTFRDLLRFMLIIKSHASPQKLLPVTPPLLTDSPHQKRSSRLLLKKSDVADNDKSPKYRNYSTVAANLGSRWPVRRLIFAAEVIVESLKEMKALKQNGMTRQDVRDSARLHIGDTGLLDYVLKSMNNVVVGDVLVRRYVDPITRILHYTIQDLDDAVKAKEPKKKEAVVLEEITPLRILTPLKPGADVYGDLLLLYTNVLLNYPESELVRSATQAILDSKHFIKEWPIWDNNDTVLQFLCRINPSLVDVRSEQTTELPPGELVTVPLQATVYDLKQAIEETFRDTYCILSNFVVTEIDEVEEDMSLIGSCSALTVRGHGIDLESKLKCQGGCDTWMVKCICRARDDDGERMISCDVCEVWQHTRCCGIDDSDTLPPLFVCSNCCEEFAEQQRKVLQPKYEFPSSENVFLLESADDFFGDQRCLGMIFPEENYLL

SEQ ID NO: 856 - protein, 653 aa, Arabidopsis thaliana
  Clone ID: AT_F27F23.C1.p6.tg
MLVESSFSSSVETSLLNVSEYQDPFAAYDWTSLAESYQMIHKVPEQSQVSFLKNVPVTDTMNLDESKHPKHQESCSEKSVMHKVSGKALTSLVYRRRKRTLIPGGTEEHNLGKIRKQDDSLDDSIVSLYNPEESTKRKNRFNNCLVYSRKKRRGESSCTFTGETTIRGDGLDDAFVSEHDCGETRRRGNRSDDCLVYSRKKGRVKFNSCSFSKHVTGRTKISYDQADSSACSQMGQIVKADSSLTRPKPGEIKKSGHQLVYSQRKQLVKSNGSFTESHVGKTKRNGDRSEVLLTYSRRKKSGKSIGVRVNGFLVYTRKKLKFRGPFARRDLSETKKNGDQRSTVSSRELLDDTQVTEVTCSSDGTNDSCSSLKSSSEVNSTSSKSREDDCYSSDSGVSETDTDGSSSPFRQCKHCDKPGTVEKMLICDECEEAYHTRCCGVQMKDVAEIDEWLCPSCLKNQSSKTKTKGRISHERKWRVTVPFVIGIRIGKMFQADVPDWSGPTMSDTSFVGEPLEIGQSEYMHDLKKAKNSKKQCSAVNWLQCREEDTNGVICGKWRRAPRSEVQTKDWECFCCFSWDPSRADCAVPQKNPSEDEKLAAELETSEILKQLKYIKMVRYFSHYLFDLSRPYSFLIKDLKLKRLDLDQTPKSEN

SEQ ID NO: 857 - protein, 252 aa, Arabidopsis thaliana
  Clone ID: AT_F14L17.C1.p25.tg
MEGIQHPIPRTVEEVFSDFRGRRAGLIKALSTDVQKFYHQCDPEKENLCLYGLPNETWEVNLPVEEVPPELPEPALGINFARDGMQEKDWISLVAVHSDSWLISVAFYFGARFGFGKNERKRLFQMINDLPTIFEVVTGNAKQSKDQSANHNSSRSKSSGGKPRHSESHTKASKMSPPPRKEDESGDEDEDDEQGAVCGACGDNYGGDEFWICCDACEKWFHGKCVKITPAKAEHIKHYKCPSCTTSKKMKA

SEQ ID NO: 858 - protein, 743 aa, Arabidopsis thaliana
  Clone ID: AT_T25N20.C1.p2.tg
MEGGGGSGERSRIASNTPRSLKEKSDGVGRTVSSTETRQNYQKRSRMVVSDSESSDEFMKPPPRRSGVDRKTLGAKEKFVRKRDRVEHDRNGYVRRNNEASGSFMKMNKLDIFEFDEYDGFDSANLMRKRFDNGSVGVRGRSSFASRRVDSSVGRSGSGREGLFDRRRNTFVNGTCSASSQEDSSSESDSDEPMRVQGINGVLKVKVNNKTNTLAASINPRDAEIYERPPSSRKAQRRENVVVKPPFRKSNNVDNNSESEESDMSRKSKRKKSEYSKPKKEFNTKSKSTFPELVNPDVREERRGRRGGGTDKQRLRERIKGMLTDAGWTIDYKPRRNQSYLDAVYVNPSGTAYWSIIKAYDALLKQLKDEGVDARPRKDTAAVASVSEEIVNKLARKAKKTRSEMTKKWKQNSSGSDSENKSEGGAYTDTSEERIRSSIKLGGKSTKKGRNGADWDELHKKSKRSLYYNNARPSCGSDSHYLHGRKTKKIGRCTLLVRSSKDKKNPAINGFNPYSGKRTLLSWLIESGVVQLRQKVQYMRRRGAKVMLEGWITREGIHCDCCSKILTVSRFEIHAGSKSCQPFQNIYLESGASLLQCQVRAWNMQKDATNLALHQVDTDGDDPNDDACGICGDGGDLICCDGCPSTYHQNCLGMQVLPSGDWHCPNCTCKFCDAAVASGGKDGNFISLLSCGMCERRYHQLCLNDEAHKVQSFGSASSFCGPKCLEFCASYKNSHMCISISEG

SEQ ID NO: 859 - protein, 663 aa, Arabidopsis thaliana
  Clone ID: AT_T22E19.C1.p16.tg
MAGCLVPECADDISILLIDHDTASIASLTSMLQQFSKRVMSVDVASKALSMIEKQKKEIGLIIANIEMPHIDSHSFLNALLLKDIPLILINPEIKTKEPSDLLTKRACFSLDKPISNDDIKNMWQHVFSKKSQELKKINITEDQENVMDKDTYQIEAFRANLKRQRISQASLLGRRPFIDTFSTYETFQKRKSIANVEWKTTPSYAIEIENKRKEWKKSVGRRKSLWNSERHMKFIAAISILGEEVLFKKPIGEKEETMPKFHIGGKLDLSNHSVHGNVLNKLSMNVNFVPSTISNNPAYNILSIDSSSIDSSSYTGLVSTGLSSENSPILYGLPSNDGASNTCTSQMESERISIPQYDPNQCHPHRSILETDVNQIDLDFTSILDSFDPLVDECLMKENNRFLPNPTMNLLDTDIDKMDWVSFIENLSHHDINMNHMDWDPSTANYVLPETNMNINFPEKHTNEIGWVSSQVGYVPFENMIPSEVDINHMGMGYSGGSIPPQEETNTNNVGFVSCEIHSEIPPKTNMAILETNYSNPLDWVFPEDITSLETNTIQKSLVSCETSYDALDNMVPLETNMEEMNDALYDISIEDLISFDIDANEKDIFSWLEDNGFSEENNMMESCEYHNIESVNQSDDMKIDDNFDDYRECMDWINEEMNKDV

SEQ ID NO: 860 - protein, 1092 aa, Arabidopsis thaliana
  Clone ID: AT_F17L21.C1.p11.tg
MSLFHVLGFGVKIGHLFWMLCCWFVSWFVDNGIEDKSGLLVGSVGDLEKTKMTTLKKKNKMWFWNKISSSGLKIPSFSYQFLGSVKFNKAWWRKLVVVWVVFWVLVSIWTFWYFSSQAMEKRKETLASMCDERARMLQDQFNVSMNHVQAMSILISTFHHGKIPSAIDQRTFSEYTDRTSFERPLTSGVAYAMRVLHSEREEFERQQGWTIRKMYSLEQNPVHKDDYDLEALEPSPVQEEYAPVIFAQDTVSHVVSLDMLSGKEDRENVLRARSSGKGVLTAPFPLIKTNRLGVILTFAVYKRDLPSNATPKERIEATNGYLGGVFDIESLVENLLQQLASKQTILVNVYDITNHSQPISMYGTNVSADGLERVSPLIFGDPLRKHEMRCRYLQLAHTYVCNFFLFARIQVLTFCCELLPLCRFKQKPPWPVLSMVTSFGILVIALLVAHIIHATVSRIHKVEEDCDKMKQLKKKAEAADVAKSQFLATVSHEIRTPMNGVLGMLHMLMDTELDVTQQDYVRTAQASGKALVSLINEVLDQAKIESGKLELEEVRFDLRGILDDVLSLFSSKSQQKGVELAVYISDRVPDMLIGDPGRFRQILTNLMGNSIKFTEKGHIFVTVHLVDELFESIDGETASSPESTLSGLPVADRQRSWENFKAFSSNGHRSFEPSPPDINLIVSVEDTGVGIPVEAQSRIFTPFMQVGPSISRTHGGTGIGLSISKCLVGLMKGEIGFSSTPKVGSTFTFTAVFSNGMQPAERKNDNNQPIFSEFRGMKAVVVDHRPARAKVSWYHFQRLGIRVEVVPRVEQALHYLKIGTTTVNMILIEQEIWNREADDFIKKLQKDPLFLSPKLILLANSVESSISEALCTGIDPPIVIVKPLRASMLAATLQRGLGIGIREPPQHKGPPALILRNLLLGRKILIVDDNNVNLRVAAGALKKYGADVVCAESGIKAISLLKPPHEFDACFMDIQMPEMDGFEATRRIRDMEEEMNKRIKNGEALIVENGNKTSWHLPVLAMTADVIQATHEECLKCGMDGYRIIRGDGAGRRTAKETQKLVSPMHLEVVEKQIDDCKKSVYRKAGVTRPRT

SEQ ID NO: 861 - protein, 1190 aa, Arabidopsis thaliana
  Clone ID: AT_T13L16.C1.p16.tg
MGSRKKKMQIRKVFDKMTEWVTPWRSNLESPREMMILRGDVEQDEFQYASSHCLSSYYSVFVVRLAIMVMLAILIGLLTVLTWHFTRIYTKQSLQTLAYGLRYELLQRPVLRMWSVLNTTSELTTAQVKLSEYVIKKYDKPTTQEELVEMYQAMKDVTWALFASAKALNAITINYRNGFVQAFHRDPASSSTFYIFSDLKNYSISGTGPEDVSGWNNKSIHGNMSAIWYQQQLDPVTGENLGKPLKIPPDDLINIAGISQVPDGEASWHVTVSKYMDSPLLSAALPVFDASNKSIVAVVGVTTALYSVGQLMRDLVEVHGGHIYLTSQEGYLLATSTDGPLLKNTSNGPQLMKATDSEEWVIKSGAQWLEKTYGSKRPHVVHAENVKLGDQRYYIDSFYLNLKRLPIVGVVIIPRKFIMGKVDERAFKTLIILISASVCIFFIGCVCILILTNGVSKEMKLRAELIRQLDARRRAEASSNYKSQFLANMSHELRTPMAAVIGLLDILISDDCLSNEQYATVTQIRKCSTALLRLLNNILDLSKVESGKLVLEEAEFDLGRELEGLVDMFSVQCINHNVETVLDLSDDMPALVRGDSARLVQIFANLISNSIKFTTTGHIILRGWCENINSLHDEMSVSVDRRKPWAPMKTKQVQHRNHLQKSCKNANKMVLWFEVDDTGCGIDPSKWDSVFESFEQADPSTTRTHGGTGLGLCIVRNLVNKMGGEIKVVQKNGLGTLMRLYLILSTPDTVDQNIQPDFSKYGLVVMLSMYGSTARMITSKWLRKHGIATVEASDWNELTQIIRDLLETGSRDNSFDSQHNISDPLRAELSNIVEIKNPVFVIVVDIGVLDLTTNIWKEQLNYLDRFSNKAKFAWLLKHDTSNTVKTELRRKGHVMMVNKPLYKAKMIQILEAVIKNRKRGLCNDLRNRGNGSDESHDCLEIDPTQFDTCSSDDSSETSGEKQVDKSVKPSTLHSPVLKNYLIDATTSNDDSTSASMTQKNPEEEDWKDRLYSGIALDGKNQKSLEGIRILLAEDTPVLQRVATIMLEKMGATVTAVWDGQQAVDSLNYKSINAQAPTEEHKSFEEETANKVTTRETSLRNSSPYDLILMDCQMPKMDGYEATKAIRRAEIGTELHIPIVALTAHAMSSDEAKCLEVGMDAYLTKPIDRKLMVSTILSLTKPSAFQTSLSA

SEQ ID NO: 862 - protein, 558 aa, Arabidopsis thaliana
  Clone ID: AT_T31K7.C1.p5.tg
MTSSEEVVEVTVVKAPEAGGGKLSRRKIRKKDAGVDGLVKWERFLPKIALRVLLVEADDSTRQIIAALLRKCSYRVAAVPDGLKAWEMLKGKPESVDLILTEVDLPSISGYALLTLIMEHDICKNIPVIMMSTQDSVNTVYKCMLKGAADYLVKPLRRNELRNLWQHVWRRQTSLAPDSFPWNESVGQQKAEGASANNSNGKRDDHVVSGNGGDAQSSCTRPEMEGESADVEVSARDAVQMECAKSQFNETRLLANELQSKQAEAIDFMGASFRRTGRRNREESVAQYESRIELDLSLRRPNASENQSSGDRPSLHPSSASAFTRYVHRPLQTQCSASPVVTDQRKNVAASQDDNIVLMNQYNTSEPPPNAPRRNDTSFYTGADSPGPPFSNQLNSWPGQSSYPTPTPINNIQFRDPNTAYTSAMAPASLSPSPSSVSPHEYSSMFHPFNSKPEGLQDRDCSMDVDERRYVSSATEHSAIGNHIDQLIEKKNEDGYSLSVGKIQQSLQREAALTKFRMKRKDRCYEKKVRYESRKKLAEQRPRIKGQFVRQVQSTQAP

SEQ ID NO: 863 - protein, 206 aa, Arabidopsis thaliana
  Clone ID: AT_F14D16.C1.p12.tg
MAVGEVMRMEIPAGGDLTVTTPELHVLAVDDSIVDRKVIERLLRISSCKVTTVESGTRALQYLGLDGGKGASNLKDLKVNLIVTDYSMPGLSGYDLLKKIKESSAFREVPVVIMSSENILPRIQECLKEGAEEFLLKPVKLADVKRIKQLIMRNEAEECKILSHSNKRKLQEDSDTSSSSHDDTSIKDSSCSKRMKSESENLFSLL

SEQ ID NO: 864 - protein, 720 aa, Arabidopsis thaliana
  Clone ID: AT_F9G14.C1.p120.tg
MNANEEGEGSRYPITDRKTGETKFDRVESRTEKHSEEEKTNGITMDVRNGSSGGLQIPLSQQTAATVCWERFLHVRTIRVLLVENDDCTRYIVTALLRNCSYEVVEASNGIQAWKVLEDLNNHIDIVLTEVIMPYLSGIGLLCKILNHKSRRNIPVIMMSSHDSMGLVFKCLSKGAVDFLVKPIRKNELKILWQHSSGSGSESGTHQTQKSVKSKSIKKSDQDSGSSDENENGSIGLNASDGSSDGSGAQSSWTKKAVDVDDSPRAVSLWDRVDSTCAQVVHSNPEFPSNQLVAPPAEKETQEHDDKFEDVTMGRDLEISIRRNCDLALEPKDEPLSKTTGIMRQDNSFEKSSSKWKMKVGKGPLDLSSESPSSKQMHEDGGSSFKAMSSHLQDNREPEAPNTHLKTLDTNEASVKISEELMHVEHSSKRHRGTKDDGTLVRDDRNVLRRSEGSAFSRYNPASNANKISGGNLGSTSLQDNNSQDLIKKTEAAYDCHSNMNESLPHNHRSHVGSNNFDMSSTTENNAFTKPGAPKVSSAGSSSVKHSSFQPLPCDHHNNHASYNLVHVAERKKLPPQCGSSNVYNETIEGNNNTVNYSVNGSVSGSGHGSNGPYGSSNGMNAGGMNMGSDNGAGKNGNGDGSGSGSGSGSGNLADENKISQREAALTKFRQKRKERCFRKKVRYQSRKKLAEQRPRVRGQFVRKTAAATDDNDIKNIEDS

SEQ ID NO: 865 - protein, 454 aa, Arabidopsis thaliana
  Clone ID: AT_F19D11.C1.p7.tg
MGEIVVLSSDDGMETIKNRVKSSEVVQWEKYLPKTVLRVLLVESDYSTRQIITALLRKCCYKGRLVFPFISLFVAVSDGLAAWEVLKEKSHNIDLILTELDLPSISGFALLALVMEHEACKNIPVIMMSSQDSIKMVLKCMLRGAADYLIKPMRKNELKNLWQHVWRRLTLRDDPTAHAQSLPASQHNLEDTDETCEDSRYHSDQGSGAQAINYNGHNKLMENGKSVDERDEFKETFDVTMDLIGGIDKRPDSIYKDKSRDECVGPELGLSLKRSCSVSFENQDESKHQKLSLSDASAFSRFEESKSAEKAVVALEESTSGEPKTPTESHEKLRKVTSDQGSATTSSNQENIGSSSVSFRNQVLQSTVTNQKQDSPIPVESNREKAASKEVEAGSQSTNEGIAGQSSSTEKPKEEESAKQRWSRSQREAALMKFRLKRKDRCFDKKVRDTQASS

SEQ ID NO: 866 - protein, 950 aa, Arabidopsis thaliana
  Clone ID: AT_MAJ23.C1.p80.tg
METDQIEEMDVEVLSSMWPEDVGTEADKQFNVEKPAGDLDTLKEVTIETRTIADMTRLPNLLNSTHQGSSQLTNLVKQWEYMQDNAVRLLKEELKNLDRQREEAEAKELKIIEEYKFESNEPENVPVLDETSDLFRRFRQKKRDALVDSKKIEIYEEFDTVAYWKQKALSLEKMLEASTERERRLMEKLSESLKTMESQSAPVQELTQNLKRAEGFLHFILQNAPIVMGHQDKDLRYLFIYNKYPSLREQDILGKTDVEIFHGGGVKESEDFKREVLEKGKASKREITFTTDLFGSKTFLIYVEPVYNKAGEKIGINYMGMEVTDQVVKREKMAKLREDNAVRKAMESELNKTIHITEETMRAKQMLATMSHEIRSPLSGVVGMAEILSTTKLDKEQRQLLNVMISSGDLVLQLINDILDLSKVESGVMRLEATKFRPREVVKHVLQTAAASLKKSLTLEGNIADDVPIEVVGDVLRIRQILTNLISNAIKFTHEGNVGIKLQVISEPSFVRDNALNADTEEHEQNGLTETSVWICCDVWDTGIGIPGKQAILTNEHEKTKKLQLTYILTWFMFWCSCAENALPCLFKKYMQASADHARKYGGTGLGLAICKQLVELMGGQLTVTSRVSEGSTFTFILPYKVGRSDDYSDDQDEFSDMADQQSEPDDTAEGYFQFKPLLGSIYSNGGPGISNDFLPHKVMLTSPIKLINGFVADPSNNTGQSEMLQLENGGYMDESKLETSSGHCPESAHQYENGNGRCFSKESESCSSSQASSEGGTLEMESELTVSSHREEEKAETEVKETSKPKILLVEDNKINIMVAKSMMKQLGHTMDIANNGVEAITAINSSSYDLVLMDVCMPVLDGLKATRLIRSYEETGNWNAAIEAGVDISTSENEQVCMRPTNRLPIIAMTANTLAESSEECYANGMDSFISKPVTLQKLRECLQQYLH

SEQ ID NO: 867 - protein, 1020 aa, Arabidopsis thaliana
  Clone ID: AT_F14G6.C1.p18.tg
MGEVGPQVAAPISVHHPMGKKRDLYVQPHWLVSSQLPKDDWQMNRWKWDGQRFEAIELQGESLQLSNKKGLDLNLPCGFNDVEGTPVDLTRPSKKVRSGSPGSGGGGGGNYPKCQVDNCKEDLSIAKDYHRRHKVCEVHSKATKALVGKQMQRFCQQCSRFHLLSEFDEGKRSCRRRLDGHNRRRRKTQPDAITSQVVALENRDNTSNNTNMDVMALLTALVCAQGRNEATTNGSPGVPQREQLLQILNKIKALPLPMNLTSKLNNIGILARKNPEQPSPMNPQNSMNGASSPSTMDLLAALSASLGSSAPEAIAFLSQGGFGNKESNDRTKLTSSDHSATTSLEKKTLEFPSFGGGERTSSTNHSPSQYSDSRGQDTRSSLSLQLFTSSPEEESRPKVASSTKYYSSASSNPVEDRSPSSSPVMQELFPLHTSPETRRYNNYKDTSTSPRTSCLPLELFGASNRGATANPNYNVLRHQSGYASSGSDYSPPSLNSNAQERTGKISFKLFEKDPSQLPNTLRTEIFRWLSSFPSDMESFIRPGCVILSVYVAMSASAWEQLEENLLQRVRSLVQDSEFWSNSRFLVNAGRQLASHKHGEIRLSKSWRTLNLPELITVSPLAVVAGEETALIVRGRNLTNDGMRLRCAHMGNYASMEVTGREHRLTKVDELNVSSFQVQSASSVSLGRCFIELENGLRGDNFPLIIANATICKELNRLEEEFHPKDVIEEQIQNLDRPRSREEVLCFLNELGWLFQRKWTSDIHGEPDFSLPRFKFLLVCSVERDYCSLIRTVLDMMVERNLGKDGLLNKESLDMLADIQLLNRAIKRRNTKMAETLIHYSVNPSTRNFIFLPSIAGPGDITPLHLAASTSSSDDMIDALTNDPQEIGLSCWNTLVDATGQTPFSYAAMRDNHSYNTLVARKLADKRNGQISLNIENGIDQIGLSKRLSSELKRSCNTCASVALKYQRKVSGSRRLFPTPIIHSMLAVATVCVCVCVFMHAFPMVRQGSHFSWGGLDYGSI

SEQ ID NO: 868 - protein, 359 aa, Arabidopsis thaliana
  Clone ID: AT_MBA10.C1.p13.tg
MDWNFKLSSGYLSGFDQEPDLSPMDGSISFGGSSQSKADFSFDLKLGRNIGNSSSVFGDTEQVISLSKWKDSALAKPEGSRSSSSKRTRGNGVGTNQMPICLVDGCDSDFSNCREYHKRHKVCDVHSKTPVVTINGHKQRFCQQCSRFHALEEFDEGKRSCRKRLDGHNRRRRKPQPEHIGRPANFFTGFQGSKLLEFSGGSHVFPTTSVLNPSWGNSLVSVAVAANGSSYGQSQSYVVGSSPAKTGIMFPISSSPNSTRSIAKQFPFLQEEESSRTASLCERMTSCIHDSDCALSLLSSSSSSVPHLLQPPLSLSQEAVETVFYGSGLFENASAVSDGSVISGNEAVRLPQTFPFHWE

SEQ ID NO: 869 - protein, 359 aa, Arabidopsis thaliana; identical to SEQ ID NO: 868
  Clone ID: AT_MFB16.C1.p6.tg

SEQ ID NO: 870 - protein, 510 aa, Arabidopsis thaliana
  Clone ID: AT_MCP4.C1.p5.tg
MLLEETEPPNQTLDHVLSWLEDSVSLSPLPGFDDSYLLHEFDGSQTWEWDQTQDPEHGFIQSYSQDLSAAYVGCEATNLEVVTEAPSIDLDLPPEIQQPNDQSRKRSHDGFLEAQQVKKSARSKRKAIKSSEKSSKDGNKEGRWAEKLLNPCALAITASNSSRVQHYLCVLSELASSSGDANRRLAAFGLRALQHHLSSSSVSSSFWPVFTFASAEVKMFQKTLLKFYEVSPWFALPNNMANSAILQILAQDPKDKKDLHIIDIGVSHGMQWPTLLEALSCRLEGPPPRVRITVISDLTADIPFSVGPPGYNYGSQLLGFARSLKINLQISVLDKLQLIDTSPHENLIVCAQFRLHHLKHSINDERGETLKAVRSLRPKGVVLCENNGECSSSADFAAGFSKKLEYVWKFLDSTSSGFKEENSEERKLMEGEATKVLMNAGDMNEGKEKWYERMREAGFFVEAFEEDAVDGAKSLLRKYDNNWEIRMEDGDTFAGLMWKGEAVSFCSLWK

SEQ ID NO: 871 - protein, 410 aa, Arabidopsis thaliana
  Clone ID: AT_F3A4.C1.p30.tg
MTKTRILNPTRFPSPKPLRGCGDANFMEQLLLHCATAIDSNDAALTHQILWVLNNIAPPDGDSTQRLTSAFLRALLSRAVSKTPTLSSTISFLPQADELHRFSVVELAAFVDLTPWHRFGFIAANAAILTAVEGYSTVHIVDLSLTHCMQIPTLIDAMASRLNKPPPLLKLTVVSSSDHFPPFINISYEELGSKLVNFATTRNITMEFTIVPSTYSDGFSSLLQQLRIYPSSFNEALVVNCHMMLRYIPEEPLTSSSSSLRTVFLKQLRSLNPRIVTLIEEDVDLTSENLVNRLKSAFNYFWIPFDTTDTFMSEQRRWYEAEISWKIENVVAKEGAERVERTETKRRWIERMREAEFGGVRVKEDAVADVKAMLEEHAVGWGMKKEDDDESLVLTWKGHSVVFATVWVPI

SEQ ID NO: 872 - protein, 445 aa, Arabidopsis thaliana
  Clone ID: AT_T5A14.C1.p22.tg
MLTSFKSSSSSSEDATATTTENPPPLCIASSSAATSASHHLRRLLFTAANFVSQSNFTAAQNLLSILSLNSSPHGDSTERLVHLFTKALSVRINRQQQDQTAETVATWTTNEMTMSNSTVFTSSVCKEQFLFRTKNNNSDFESCYYLWLNQLTPFIRFGHLTANQAILDATETNDNGALHILDLDISQGLQWPPLMQALAERSSNPSSPPPSLRITGCGRDVTGLNRTGDRLTRFADSLGLQFQFHTLVIVEEDLAGLLLQIRLLALSAVQGETIAVNCVHFLHKIFNDDGDMIGHFLSAIKSLNSRIVTMAEREANHGDHSFLNRFSEAVDHYMAIFDSLEATLPPNSRERLTLEQRWFGKEILDVVAAEETERKQRHRRFEIWEEMMKRFGFVNVPIGSFALSQAKLLLRLHYPSEGYNLQFLNNSLFLGWQNRPLFSVSSWK

SEQ ID NO: 873 - protein, 483 aa, Arabidopsis thaliana
  Clone ID: AT_T12G13.C1.p90.tg
MNYPYEDFLDLFFSTHTDPLATAASTSSNGYSLNDLDIDWDCDFRDVIESIMGDEGAMMEPESEAVPMLHDQEGLCNSASTGLSVADGVSFGEPKTDESKGLRLVHLLVAAADASTGANKSRELTRVILARLKDLVSPGDRTNMERLAAHFTNGLSKLLERDSVLCPQQHRDDVYDQADVISAFELLQNMSPYVNFGYLTATQAILEAVKYERRIHIVDYDINEGVQWASLMQALVSRNTGPSAQHLRITALSRATNGKKSVAAVQETGRRLTAFADSIGQPFSYQHCKLDTNAFSTSSLKLVRGEAVVINCMLHLPRFSHQTPSSVISFLSEAKTLNPKLVTLVHEEVGLMGNQGFLYRFMDLLHQFSAIFDSLEAGLSIANPARGFVERVFIGPWVANWLTRITANDAEVESFASWPQWLETNGFKPLEVSFTNRCQAKLLLSLFNDGFRVEELGQNGLVLGWKSRRLVSASFWASCQTNQ

SEQ ID NO: 874 - protein, 967 aa, Arabidopsis thaliana
  Clone ID: AT_T24P13.C1.p13.tg
MEATAVNPSIVTASRTVQPYRRLSTLSLRFPTYRNKRVSPFTLTITRCSTTKSREAGQDSSISLKRGLVFDLGVSKDSWHSEEIGSPVVKRFLSDNEERWYMWYHGSSKQNPVSDSIGLAVSNNGIHWERGNGKVESSEDVGLVMSCGEDWWGFDTASVRPGEVVIMSSSKVRANSSVYWMYYTGYTKETVEFQSQDFTSVLGNPERFHLCDENAEKSRVYYRSLPGLAISQDGRHWARIEGEHHSGALFDVGSEKDWDFLYIASPHVVFHGDGDLRMYYHSFDEKTGEFCIGMARSRDGIKWLKLGKILGGRKSEKDGLGFFDELGGRYPCVTRNKRDESYVMAYEGVDRTGKTSIGFAVSKDGIKDWKRVQDEEAVIAVGEGGAWDNEGVGCPYLIEMDGDSDHQWRLYYRGVGNGGRTAMRGEQFELEEDRDGPLELLQSLRSKATELLLREEWEESIKVYTEFIDLSRRQVSSTGGSDPDPDSIAKLRKSLCLALCNRAEARARLRDFLEAMRDCDQALEIEKTHFKTLLCKGKVLLGLSKYSLALECFKTALLDPQASDNLETVTVYIEKCKKLEFQAKTGAFDLSDWILSEFRGKCPELAEFIGSIEIKKSELSGRGLFATKNIVAGTLVLVTKAVAIERGILGNGECGEKAQLIMWKNFVEEVTESVRKCGRTRRVVSALSTGQGEDSLEIPEIALFRPDEAFETCGDWKQSLDTEKLLSILDVNSLVEDAVSGKVMGKNKEYYGVGLWTLASFINHSCIPNARRLHVGDYVIVHASRDIKTGEEISFAYFDVLSPLEKRKEMAESWGFCCGCSRCKFESVLYATNQEVREFEMGLERGVDAGNAVYMVEEGMKRWKVKGKDKGLLRASYWGVYDEIYNSERLMKRWGRKIPTMEVVVDSVSDVVGSDERLMKMAVEGMMKKHGGFSNIVEMEKIMKLGKGVYGKVVSKKKAMKTLLGIE

SEQ ID NO: 875 - protein, 302 aa, Arabidopsis thaliana
  Clone ID: AT_T14P4.C1.p30.tg
MEKRKFELRYIPSVATHASHHQSFDLNQPAAEDDNGGDNKSLLSRMQNPLRHFSASSDYNSYEDQGYVLDEDQDYALEEDVPLFLDEDVPLLPSVKLPIVEKLPRSITWVFTKSSQLMAESDSVIGKRQIYYLNGEALELSSEEDEEDEEEDEEEIKKEKCEFSEDVDRFIWCSKDCNNRFGGCNCAIGQCTNRQCPCFAANRECDPDLCRSCPLSCGDGTLGETPVQIQCKNMQFLLQTNKKLMIVRGDQRIGLFAERAIEEGEELFFDYCYGPEHADWSRGREPRKTGASKRSKEARPAR

SEQ ID NO: 876 - protein, 460 aa, Arabidopsis thaliana
  Clone ID: AT_MSD21.C1.p13.tg
MDSVYKTDENFAADVAALLAPLPTPQLQEYFNKLITSRRCNGIEVKNNGTIGKGVYANSEFDEDELILKDEILVGIQHSSNKVDCLVCSFCFRFIGSIEKQIGRKLYFKNLGVSGCCDDDSSEEDECVKYNGNEEQCGGSSSSHNTLPEGVVSSLMNGEMALPHTDKFPLPSPLSCPGGCQEAFYCSESCAAADWESSHSLLCTGERSESISREALGEFIKHANDTNDIFLLAAKAIAFTILRYRKLKAEHVDKKAKQSEPKQSLLLEAWKPVSIGYKRRWWDCIALPDDVDPTDEGAFRMQIKNLACTSLELLKIAIFDKECEARIPPSQDLVVASPVEDYFLYIDDLPDAEKEETEEITRPFLDALGDEYSDCCQGTAFFPLQSCMNHSCCPNAKAFKREEDRDGQAVIIALRRISKNEEVTISYIDEELPYKERQALLADYGFSCKCSKCLEDSSSI

SEQ ID NO: 877 - protein, 312 aa, Arabidopsis thaliana
  Clone ID: AT_T6P5.C1.p10.tg
MGLVGLHSGTIDMEFIGVEDHGDEEGKQIAVSVISSGKNADKTEDPDSLIFTGFGGTDMYHGQPCNQKLERLNIPLEAAFRKKSIVRVVRCMKDEKRTNGNIYIYDGTYMITNRWEEEGQNGFIVFKFKLVREPDQKPAFGIWKSIQNWRNGLSIRPGLILEDLSNGAENLKVCLVNEVDKENGPALFRYVTSLIHEVINNIPSMVDRCACGRRSCGSKHVFREKLSVSSSLVISAKKSGNVARFMNHSCSPNVFWQSIAREQNGLWCLYIGFFAMKHIPPLTELRYDYGKSRGGGKKMCLCRTKKCCGSFG

SEQ ID NO: 878 - protein, 528 aa, Arabidopsis thaliana
  Clone ID: AT_F28O16.C1.p8.tg
MQFSCDPDQEGDELPQYEHIYQNDFSYRKHKKQKEEDISICECKFDFGDPDSACGERCLNVITNTECTPGYCPCGVYCKNQKFQKCEYAKTKLIKCEGRGWGLVALEEIKAGQFIMEYCGEVISWKEAKKRAQTYETHGVKDAYIISLNASEAIDATKKGSLARFINHSCRPNCETRKWNVLGEVRVGIFAKESISPRTELAYDYNFEWYGGAKVRCLCGAVACSGFLGAKSRGFQASPYVIILIEDTYVWEDGDDRYSVDKIPVYDSAEDELTSEPSKNGESNTNEEKEKDISTENHLESTALNIQQQSDSTPTPMEEDVVTETVKTETSEDMKLLSQNSQEDSSPKTAIVSRVHGNISKIKSESLPKKRGRPFSGGKTKNVAQKHVDIANVVQLLATKEAQDEVLKYEVKQFFKRIGTNSKPSQYQMCLVNCCLQEVKKEAAVRLSSLYDEIRPAIEEHERDSQDSVATSVAEKWIQASCNKLKAEFDLYSSVIKNIASTPIKPQDTKTKVAEAGNEDHIKLLEAK

SEQ ID NO: 879 - protein, 468 aa, Arabidopsis thaliana
  Clone ID: AT_F21M11.C1.p35.tg
MLEMGKSNIHVQEWDWETKDILNDTTAMDVSPSSAIGESSEHKVAAASVELASSTSGEAKICLSFAPATGETTNLHLPSMEDLRRAMEEKCLKSYKIVHPEFSVLGFMKDMCSCYIDLAKNSTSQLLETETVCDMSKAGDESGAVGISMPLVVVPECEISGDGWKAISNMKDITAGEENVEIPWVNEINEKVPSRFRYMPHSFVFQDAPVIFSLSSFSDEQSCSTSCIEDCLASEMSCNCAIGVDNGFAYTLDGLLKEEFLEARISEARDQRKQVLRFCEECPLERAKKVEILEPCKGHLKRGAIKECWFKCGCTKRCGNRVVQRGMHNKLQVFFTPNGKGWGLRTLEKLPKGAFICEYIGEILTIPELYQRSFEDKPTLPVILDAHWGSEERLEGDKALCLDGMFYGNISRFLNHRDIEAMEELAWDYGIDFNDNDSLMKPFDCLCGSRFCRNKKRSTKTMQILNKA

SEQ ID NO: 880 - protein, 650 aa, Arabidopsis thaliana
  Clone ID: AT_T6G15.C1.p10.tg
MGSSHIPLDPSLNPSPSLIPKLEPVTESTQNLAFQLPNTNPQALISSAVSDFNEATDFSSDYNTVAESARSAFAQRLQRHDDVAVLDSLTGAIVPVEENPEPEPNPYSTSDSSPSVATQRPRPQPRSSELVRITDVGPESERQFREHVRKTRMIYDSLRMFLMMEEAKRNGVGGRRARADGKAGKAGSMMRDCMLWMNRDKRIVGSIPGVQVGDIFFFRFELCVMGLHGHPQSGIDFLTGSLSSNGEPIATSVIVSGGYEDDDDQGDVIMYTGQGGQDRLGRQAEHQRLEGGNLAMERSMYYGIEVRVIRGLKYENEVSSRVYVYDGLFRIVDSWFDVGKSGFGVFKYRLERIEGQAEMGSSVLKFARTLKTNPLSVRPRGYINFDISNGKENVPVYLFNDIDSDQEPLYYEYLAQTSFPPGLFVQQSGNASGCDCVNGCGSGCLCEAKNSGEIAYDYNGTLIRQKPLIHECGSACQCPPSCRNRVTQKGLRNRLEVFRSLETGWGVRSLDVLHAGAFICEYAGVALTREQANILTMNGDTLVYPARFSSARWEDWGDLSQVLADFERPSYPDIPPVDFAMDVSKMRNVACYISHSTDPNVIVQFVLHDHNSLMFPRVMLFAAENIPPMTELSLDYGVVDDWNAKLAICN

SEQ ID NO: 881 - protein, 352 aa, Arabidopsis thaliana
  Clone ID: AT_F24G16.C1.p230.tg
MSSSKKGSDRNQIRKSLRKLKKQIGELEKLESPDRLNNVKPIFIKRNIYLKKKLKKKVKDHGIFCSCSLDPGSSTLCGSDCNCGILLSSCSSSCKCSSECTNKPFQQRHIKKMKLVQTEKCGYGIVADEDINSGEFIIEYVGEVIDDKICEERLWKLNHKVETNFYLCQINWNMVIDATHKGNKSRYINHSCSPNTEMQKWIIDGETRIGIFATRFINKGEQLTYDYQFVQFGADQDCYCGAVCCRKKLGAKPCKTKNTTLEEAVKPVACKVTWKTPKLLNSEVRETNLDASGQAWNNHSQRKICCRDCIGAYYTAQMKVLTLVVDIFQVMYEDGVTEIIDMCREVWKVVTA

SEQ ID NO: 882 - protein, 408 aa, Arabidopsis thaliana
  Clone ID: AT_T14N5.C1.p15.tg
MVCHCKPSPDGRLGCGEECLNRMLNIECLQGTCPAGDLCSNQQFQKRKYVKFERFQSGKKGYGLRLLEDVREGQFLIEYVGEVLDMQSYETRQKEYAFKGQKHFYFMTLNGNEVIDAGAKGNLGRFINHSCEPNCRTEKWMVNGEICVGIFSMQDLKKGQELTFDYNYVRVFGAAAKKCYCGSSHCRGYIGGDPLNGDVIIQSDSDEEYPELVILDDDESGEGILGATSRTFTDDADEQMPQSFEKVNGYKDLAPDNTQTQSSVSVKLPEREIPPPLLQPTEVLKELSSGISITAVQQEVPAEKKTKSTSPTSSSLSRMSPGGTNSDKTTKHGSGEDKKILPRPRPRMKTSRSSESSKRDKGGIYPGVNKAQVIPVNKLQQQPIKSKGSEKVSPSIETCNVLVLDVNC

SEQ ID NO: 883 - protein, 1421 aa, Arabidopsis thaliana
  Clone ID: AT_MDH9.C1.p9.tg
MVAVDSTFPSHGSSYSSRRKKVSALEPNYFGSMCMGVYSDDVSISAREVAQDYSCDSCGDLATVSSACCNFDELCGLDSALEMGCRSNEDCRAGQEASGSGIASGLDKSVPGYTMYASGWMYGNQQGQMCGPYTQQQLYDGLSTNFLPEDLLVYPIINGYTANSVPLKYFKQFPDHVATGFAYLQNGIISVAPSVTSFPPSSSNATVHQDEIQTEHATSATHLISHQTMPPQTSSNGSVLDQLTLNHEESNMLASFLSLGNEHACWFLVDGEGRNHGPHSILELFSWQQHGYVSDAALIRDGENKLRPITLASLIGVWRVKCGDANCDEPVTGVNFISEVSEELSVHLQSGIMKIARRALLDEIISSVISDFLKAKKSDEHLKSYPPTSAVESISSRVINAEKSVVSNTESAGCKNTMNEGGHSSIAAESSKYTKSVGSIENFQTSCSAVCRTLHHHCMQIMWNAVFYDTVATHSSCWRKNKIWFRSSDISTVNYCKGSHTKYSDKPESFESFTCRVDSSSSKTAYSDEFDLATNGARVRGLSSDTYGTESVIASISEHVENELFLSLKTHLTDYTSILIKDGANNTTSSARDGKMHEGSFREQYNLEGSSKKKNGLNVVPAKLRFSNDFSDSQRLLQEGESSEQITSEDIIANIFSTALETSDIPVNDELDALAIHEPPPPGCESNINMPCLRYKYQPVRSKESIPEIKAYVSMALCRQKLHNDVMRDWKSLFLKCYLNEFLASLKGSHQVSRKETLALKKRKTVTRNKKLVQSNISNQTAEKLRKPCVGASEKVLVKRSKKLSDSHSMKEVLKVDTPSIDLSVRKPSQQKMRNTDRRDHCIIKDATKLHKEKVGKDAFSKVICDKSQDLEMEDEFDDALLITRLRRISRNKTKELRECRNAAKSCEEISVTAEESEETVDCKDHEESLSNKPSQKVKKAHTSKLKRKNLSDARDEGTKSCNGAVKSFTEISGKEGDTESLGLAISDKVSHQNLSKRRKSKIALFLFPGFENTSRKCFTKLLSPEDAAKNGQDMSNPTGNPPRLAEGKKFVEKSACSISQKGPSQSSILKRKHQLDEKISNVPSRRRLSLSSTDSEDAVIKEDYDVRNEEKLPCHTSDKLQKGPNKLIRRRKPLAKHTTERSPIKDLSVDDGRPKPIALKPLEKLSSKPSKKKLFLSIPKSDGCARTSINGWHWHAWSLKASAEERARVRGSSCVHMQHFGSKSSLTQNVLSARTNRAKLRNLLAAADGADVLKMSQLKARKKHLRFQQSKIHDWGLVALEPIEAEDFVIEYVGELIRSSISEIRERQYEKMGIGSSYLFRLDDGYVLDATKRGGIARFINHSCEPNCYTKIISVEGKKKIFIYAKRHIDAGEEISYNYKFPLEDDKIPCNCGAPNVYCFCEQVPWIAKLKRRTWFSRRN

SEQ ID NO: 884 - protein, 477 aa, Arabidopsis thaliana
  Clone ID: AT_F6I18.C1.p230.tg
MNDEEPSNRTKRGMLDLGNMSMSASVALTCCPSFLPAASGPELAKSINSPENLAGECNGKHLPMIPPEEEVKDIKIANGVTAFTRKQNPSDRVKKGFVLDDHVKDWVKRRVASGVSESTCFLPFLVGAKKMVDCLVCHKPVYPGEDLSCSVRGCQGAYHSLCAKESLGFSKSSKFKCPQHFLIEWSMQECFVCKQRTQWRCVKCPMAAHDKHSPWSKEILHLKDQPGRAVCWRHPTDWRLDTKVDFLVYRFHKILLEASYDLYFHRVLLTGLTKSLLIEQHAVAQSEIEGCSCPESCGNRPFRKEKKIKIVKTEHCGWGVEAAESINKEDFIVEYIGEVISDAQCEQRLWDMKHKGMKDFYMCEIQKDFTIDATFKGNASRFLNHSCNPNCVLEKWQVEGETRVGVFAARQIEAGEPLTYDYRFVQFGPEVKCNCGSENCQGYLGTKRKEPNCLVVSWGAKRRRLFHRPIARKPQQD

SEQ ID NO: 885 - protein, 424 aa, Arabidopsis thaliana
  Clone ID: AT_T27C4.C1.p2.tg
MQQAMLTNKDEKVLKALERTRQLDIPDEKTMPVLMKLLEEAGGNWSYIKLDNYTALVDAIYSVEDENKQSEGSSNGNRGKNLKVIDSPATLKKTYETRSASSGSSIQVVQKQPQLSNGDRKRKYKSRIADITKGSESVKIPLVDDVGSEAVPKFTYIPHNIVYQSAYLHVSLARISDEDCCANCKGNCLSADFPCTCARETSGEYAYTKEGLLKEKFLDTCLKMKKEPDSFPKVYCKDCPLERDHDKGTYGKCDGHLIRKFIKECWRKCGCDMQCGNRVVQRGIRCQLQVYFTQEGKGWGLRTLQDLPKGTFICEYIGEILTNTELYDRNVRSSSERHTYPVTLDADWGSEKDLKDEEALCLDATICGNVARFINHRCEDANMIDIPIEIETPDRHYYHIAFFTLRDVKAMDELTWVSTMIKLP

SEQ ID NO: 886 - protein, 344 aa, Arabidopsis thaliana
  Clone ID: AT_F6E13.C1.p28.tg
MPASKKISDRNHLGQVFDKLLNQIGESEEFELPEWLNKGKPTPYIFIRRNIYLTKKVKRRVEDDGIFCSCSSSSPGSSSTVCGSNCHCGMLFSSCSSSCKCGSECNNKPFQQRHVKKMKLIQTEKCGSGIVAEEEIEAGEFIIEYVGEVIDDKTCEERLWKMKHRGETNFYLCEITRDMVIDATHKGNKSRYINHSCNPNTQMQKWIIDGETRIGIFATRGIKKGEHLTYDYQFVQFGADQDCHCGAVGCRRKLGVKPSKPKIASDEAFNLVAHELAQTLPKVHQNGLVNRHIDAGKSWNNLSQRDTCSRDVRGWCYRVCRHVERRLGDCLILFSDCFEVEKPK

SEQ ID NO: 887 - protein, 912 aa, Arabidopsis thaliana
  Clone ID: AT_T13J8.C1.p20.tg
MIIKRKFKTQIPSLERCKLGNESRKKKRKLNLGGGGYYYPLNLLGEIAAGIVPGNGRNGFSASWCTEVTKPVEVEESLSKRRSDSGTVRDSPPAEVSRPPLVRTSRGRIQVLPSRFNDSVLDNWRKDSKSDCDLEEEEIECRNEKVVSFRVPKATNLKSKELDRKSKYSALCKEERFHEQHNDEARARVDEKLPNKKGTFGPENFYSGDLVWAKSGRNEPFWPAIVIDPMTQAPELVLRSCIPDAACVVFFGHSGNENERDYAWVRRGMIFPFVDYVARFQEQPELQGCKPGNFQMALEEAFLADQGFTEKLMHDIHLAAGNSTFDDSFYRWIQETAVSNQELNNNAPRQASVSMILGLLKKHRNPLACAGCETVISFEMAKKMKDLIPGDQLLCKPCSRVRCDGCKVRIHAECDQISDRHLKITTVLLAEQNLTLTYQIQKNKTQSQSRPLRLNFYYCFLNGFLLIAKCLNLGVFWYRVAKGDGQMVLPDKVIVVCAGVEGVYFPRLHLVVCKCGSCGPKKKALSEWERHTGSKSKNWKTSVKVKSSKLALEDWVEKEMESCNMLQCFECFCDAFVGFSFRCWQRHMSRSMRSGQQNDVQFADGLKIGTTTRLLSATGGALKPTDVETLWVHVTCAWFQPEVCFASEEKMEPAVGILSIPSTNFVKICVICKQIHGSCTQCCKCSTYYHAMCASRAGYRMELHCLEKNGQQITKMVSYCAYHRAPNPDNVLIIQTPSGAFSAKSLVQNKKKGGSRLISLIREDDEAPAENTITCDPFSAARCRVFKRKINSKKGTTSPLAGKNSLMFERDWNVQRTEMDRVCFGRSGIHGWGLFARRNIQEGEMVLEYRGEQVRGSIADLREARYRRVGKDCYLFKISEEVVVDATDKGNIARLINHSVSCLAWTFYVQEI

SEQ ID NO: 888 - protein, 624 aa, Arabidopsis thaliana
  Clone ID: AT_MAC12.C1.p7.tg
MAGKRKRANAPDQTERRSSVRVQKVRQKALDEKARLVQERVKLLSDRKSEICVDDTELHEKEEENVDGSPKRRSPPKLTAMQKGKQKLSVSLNGKDVNLEPHLKVTKCLRLFNKQYLLCVQAKLSRPDLKGVTEMIKAKAILYPRKIIGDLPGIDVGHRFFSRAEMCAVGFHNHWLNGIDYMSMEYEKEYSNYKLPLAVSIVMSGQYEDDLDNADTVTYTGQGGHNLTGNKRQIKDQLLERGNLALKHCCEYNVPVRVTRGHNCKSSYTKRVYTYDGLYKVEKFWAQKGVSGFTVYKYRLKRLEGQPELTTDQVNFVAGRIPTSTSEIEGLVCEDISGGLEFKGIPATNRVDDSPVSPTSGFTYIKSLIIEPNVIIPKSSTGCNCRGSCTDSKKCACAKLNGGNFPYVDLNDGRLIESRDVVFECGPHCGCGPKCVNRTSQKRLRFNLEVFRSAKKGWAVRSWEYIPAGSPVCEYIGVVRRTADVDTISDNEYIFEIDCQQTMQGLGGRQRRLRDVAVPMNNGVSQSSEDENAPEFCIDAGSTGNFARFINHSCEPNLFVQCVLSSHQDIRLARVVLFAADNISPMQELTYDYGYALDSVHGPDGKVKQLACYCGALNCRKRLY

SEQ ID NO: 889 - protein, 710 aa, Arabidopsis thaliana
  Clone ID: AT_MRH10.C1.p10.tg
MAPNLHIKKAFMAMRAMGIEDARVKPVLKNLLALYEKNWELIAEDNYRVLADAIFDSHEDQAIQESEEKKADEVKEDEGCAAEVDRGKKKLHESIEDDEDVMAESDRPLKRLRRRGEGGSALASPSLGSPTLEGPSINDEENAPILLPYHPVPIENDHDAGELILTKVEPITNMPLSSIPDSVDRGDSSMLEIDKSNGHVEEKAGETVSTADGTTNDISPTTVARFSDHKLAATIEEPPALELASSASGEVKINLSFAPATGGSNPHLPSMEELRRAMEEKCLRSYKILDPNFSVLGFMNDICSCYLDLATNGRDSANQLPKNLPFVTTNIDALKKSAARMAYTSQASNDVVEICSNEHMRDAENGAVGDSMALVVVPECQLSADEWRLISSVGDISLGKETVEIPWVNEVNDKVPPVFHYIAQSLVYQDAAVKFSLGNIRDDQCCSSCCGDCLAPSMACRCATAFNGFAYTVDGLLQEDFLEQCISEARDPRKQMLLYCKECPLEKAKKEVILEPCKGHLKRKAIKECWSKCGCMKNCGNRVVQQGIHNKLQVFFTPNGRGWGLRTLEKLPKGAFVCELAGEILTIPELFQRISDRPTSPVILDAYWGSEDISGDDKALSLEGTHYGNISRFINHRCLDANLIEIPVHAETTDSHYYHLAFFTTREIDAMEELTWDYGVPFNQDVFPTSPFHCQCGSDFCRVRKQISSE

SEQ ID NO: 890 - protein, 354 aa, Arabidopsis thaliana
  Clone ID: AT_F20H23.C1.p22.tg
MQRLRESPPPKTRCLGEASDIIPAADRFLRCANLILPWLNPRELAVVAQTCKTLSLISKSLTIHRSLDAARSLENISIPFHNSIDSQRYAYFIYTPFQIPASSPPPPRQWWGAAANECGSESRPCFDSVSESGRFGVSLVDESGCECERCEEGYCKCLAFAGMEEIANECGSGCGCGSDCSNRVTQKGVSVSLKIVRDEKKGWCLYADQLIKQGQFICEYAGELLTTDEARRRQNIYDKLRSTQSFASALLVVREHLPSGQACLRINIDATRIGNVARFINHSCDGGNLSTVLLRSSGALLPRLCFFAAKDIIAEEELSFSYGDVSVAGENRDDKLNCSCGSSCCLGTLPCENT

SEQ ID NO: 891 - protein, 669 aa, Arabidopsis thaliana
  Clone ID: AT_F3N23.C1.p30.tg
MQGVPGFNTVPNPNHYDKSIVLDIKPLRSLKPVFPNGNQGPPFVGCPPFGPSSSEYSSFFPFGAQQPTHDTPDLNQTQNTPIPSFVPPLRSYRTPTKTNGPSSSSGTKRGVGRPKGTTSVKKKEKKTVANEPNLDVQVVKKFSSDFDSGISAAEREDGNAYLVSSVLMRFDAVRRRLSQVEFTKSATSKAAGTLMSNGVRTNMKKRVGTVPGIEVGDIFFSRIEMCLVGLHMQTMAGIDYIISKAGSDEESLATSIVSSGRYEGEAQDPESLIYSGQGGNADKNRQASDQKLERGNLALENSLRKGNGVRVVRGEEDAASKTGKIYIYDGLYSISESWVEKGKSGCNTFKYKLVRQPGQPPAFGFWKSVQKWKEGLTTRPGLILPDLTSGAESKPVSLVNDVDEDKGPAYFTYTSSLKYSETFKLTQPVIGCSCSGSCSPGNHNCSCIRKNDGDLPYLNGVILVSRRPVIYECGPTCPCHASCKNRVIQTGLKSRLEVFKTRNRGWGLRSWDSLRAGSFICEYAGEVKDNGNLRGNQEEDAYVFDTSRVFNSFKWNYEPELVDEDPSTEVPEEFNLPSPLLISAKKFGNVARFMNHSCSPNVFWQPVIREGNGESVIHIAFFAMRHIPPMAELTYDYGISPTSEARDESLLHGQRTCLCGSEQCRGSFG

SEQ ID NO: 892 - protein, 754 aa, Arabidopsis thaliana
  Clone ID: AT_MYC6.C1.p7.tg
MKYGGKDDQKMKNIQNVEDYYDDADEDSRDGEGEEKRRDFTDLELKPDHGNRPLWACADGKIFLETFSPLYKQAYDFLIAIAEPVCRPESMHEYNLTPHSLYAAVSVGLETETIISVLNKLSKTKLPGEIIDFIHASTANYGKVKLVLKKNRYFIESPFPEVLKRLLSDDVINRARFTSEPYYGGDGFTIGKTSGELEAGPGELLNEAELAAAAEEKETHSFEIDPALVENVKQRCLPNALNYPMLEEYDFRNDNVNPDLDMELKPHAQPRPYQEKSLSKMFGNGRARSGIIVLPCGAGKSLVGVSAAARIKKSCLCLATNAVSVDQWAYQFKLWSTIKDDQICRFTSDSKERFRGNAGVVVTTYNMIAFGGKRSEEAEKIIEEMRNREWGLLLMDEVHVVPAHMFRKVISITKSHCKLGLTATLVREDEKITDLNFLIGPKLYEANWLDLVKGGFIANVQCAEVWCPMTKEFFAEYLKKENSKKKQALYVMNPNKFRACEFLIRFHEQQRGDKIIVFADNLFALTEYAMKLRKPMIYGATSHIERTKILEAFKTSKTVNTVFLSKVGDNSIDIPEANVIIQISSHAGSRRQEAQRLGRILRAKGKLEDRMAGGKEEYNAFFYSLVSTDTQEMYYSTKRQQFLIDQGYSFKVITSLPPPDAGSSLGYHSQEEQLSLLGKVLNAGDDMVGLEQLEEDTDGKALKTRRSMGSMSAMSGANGRVYMEYNSGRQKSGNQSKKPKDPTKRHNIFKKRYV

SEQ ID NO: 893 - protein, 1909 aa, Arabidopsis thaliana
  Clone ID: AT_T25K16.C1.p4.tg
MVMEDEPREATIKPSYWLDACEDISCDLIDDLVSEFDPSSVAVNESTDENGVINDFFGGIDHILDSIKNGGGLPNNGVSDTNSQINEVTVTPQVIAKETVKENGLQKNGGKRDEFSKEEGDKDRKRARVCSYQSERSNLSGRGHVNNSREGDRFMNRKRTRNWDEAGNNKKKRECNNYRRDGRDREVRGYWERDKVGSNELVYRSGTWEADHERDVKKVSGGNRECDVKAEENKSKPEERKEKVVEEQARRYQLDVLEQAKAKNTIAFLETGAGKTLIAILLIKSVHKDLMSQNRKMLSVFLVPKVPLVYQQAEVIRNQTCFQVGHYCGEMGQDFWDSRRWQREFESKQVLVMTAQILLNILRHSIIRMETIDLLILDECHHAVKKHPYSLVMSEFYHTTPKDKRPAIFGMTASPVNLKGVSSQVDCAIKIRNLETKLDSTVCTIKDRKELEKHVPMPSEIVVEYDKAATMWSLHETIKQMIAAVEEAAQASSRKSKWQFMGARDAGAKDELRQVYGVSERTESDGAANLIHKLRAINYTLAELGQWCAYKVGQSFLSALQSDERVNFQVDVKFQESYLSEVVSLLQCELLEGAAAEKVAAEVGKPENGNAHDEMEEGELPDDPVVSGGEHVDEVIGAAVADGKVTPKVQSLIKLLLKYQHTADFRAIVFVERVVAALVLPKVFAELPSLSFIRCASMIGHNNSQEMKSSQMQDTISKFRDGHVTLLVATSVAEEGLDIRQCNVVMRFDLAKTVLAYIQSRGRARKPGSDYILMVERGNVSHAAFLRNARNSEETLRKEAIERTDLSHLKDTSRLISIDAVPGTVYKVEATGAMVSLNSAVGLVHFYCSQLPGDRYAILRPEFSMEKHEKPGGHTEYSCRLQLPCNAPFEILEGPVCSSMRLAQQAVCLAACKKLHEMGAFTDMLLPDKGSGQDAEKADQDDEGEPVPGTARHREFYPEGVADVLKGEWVSSGKEVCESSKLFHLYMYNVRCVDFGSSKDPFLSEVSEFAILFGNELDAEVLSMSMDLYVARAMITKASLAFKGSLDITENQLSSLKKFHVRLMSIVLDVDVEPSTTPWDPAKAYLFVPVTDNTSMEPIKGINWELVEKITKTTAWDNPLQRARPDVYLGTNERTLGGDRREYGFGKLRHNIVFGQKSHPTYGIRGAVASFDVVRASGLLPVRDAFEKEVEEDLSKGKLMMADGCMVAEDLIGKIVTAAHSGKRFYVDSICYDMSAETSFPRKEGYLGPLEYNTYADYYKQKYGVDLNCKQQPLIKGRGVSYCKNLLSPRFEQSGESETVLDKTYYVFLPPELCVVHPLSGSLIRGAQRLPSIMRRVESMLLAVQLKNLISYPIPTSKILEALTAASCQETFCYERAELLGDAYLKWVVSRFLFLKYPQKHEGQLTRMRQQMVSNMVLYQFALVKGLQSYIQADRFAPSRWSAPGVPPVFDEDTKDGGSSFFDEEQKPVSEENSDVFEDGEMEDGELEGDLSSYRVLSSKTLADVVEALIGVYYVEGGKIAANHLMKWIGIHVEDDPDEVDGTLKNVNVPESVLKSIDFVGLERALKYEFKEKGLLVEAITHASRPSSGVSCYQRLEFVGDAVLDHLITRHLFFTYTSLPPGRLTDLRAAAVNNENFARVAVKHKLHLYLRHGSSALEKQIREFVKEVQTESSKPGFNSFGLGDCKAPKVLGDIVESIAGAIFLDSGKDTTAAWKVFQPLLQPMVTPETLPMHPVRELQERCQQQAEGLEYKASRSGNTATVEVFIDGVQVGVAQNPQKKMAQKLAARNALAALKEKEIAESKEKHINNGNAGEDQGENENGNKKNGHQPFTRQTLNDICLRKNWPMPSYRCVKEGGPAHAKRFTFGVRVNTSDRGWTDECIGEPMPSVKKAKDSAAVLLLELLNKTFS

SEQ ID NO: 894 - protein, 1589 aa, Arabidopsis thaliana
  Clone ID: AT_F5O24.C1.p210.tg
MRDEVDLSLTIPSKLLGKRDREQKNCEEEKNKNKKAKKQQKDPILLHTSAATHKFLPPPLTMPYSEIGDDLRSLDFDHADVSSDLHLTSSSSVSSFSSSSSSLFSAAGTDDPSPKMEKDPRKIARRYQVELCKKATEENVIVYLGTGCGKTHIAVMLIYELGHLVLSPKKSVCIFLAPTVALVEQQAKVIADSVNFKVAIHCGGKRIVKSHSEWEREIAANEVLVMTPQILLHNLQHCFIKMECISLLIFDECHHAQQQSNHPYAEIMKVFYKSESLQRPRIFGMTASPVVGKDGPPLDSFTYFSGSFQSENLSKSINSLENLLNAKVYSVESNVQLDGFVSSPLVKVYYYRSALSDASQSTIRYENMLEDIKQRRANVYCLRFLEAAKIQLNSDHNVQDEPVGKNPKSKICDTYLSMAAEALSSGVAKDENASDLLSLAALKEPLFSRKLVQLIKILSVFRLEPHMKCIIFVNRIVTARTLSCILNNLELLRSWKSDFLVGLSSGLKSMSRRSMETILKRFQSKELNLLVATKVGEEGLDIQTCCLVIRYDLPETVTSFIQSRGRARMPQSEYAFLVDSGNEKEMDLIENFKVNEDRMNLEITYRSSEETCPRLDEELYKVHETGACISGGSSISLLYKYCSRLPHDEFFQPKPEFQFKPVDEFGGTICRITLPANAPISEIESSLLPSTEAAKKDACLKAVHELHNLGVLNDFLLPDSKDEIEDELSDDEFDFDNIKGEGCSRGDLYEMRVPVLFKQKWDPSTSCVNLHSYYIMFVPHPADRIYKKFGFFMKSPLPVEAETMDIDLHLAHQRSVSVKIFPSGVTEFDNDEIRLAELFQEIALKVLFERGELIPDFVPLELQDSSRTSKSTFYLLLPLCLHDGESVISVDWVTIRNCLSSPIFKTPSVLVEDIFPPSGSHLKLANGCWNIDDVKNSLVFTTYSKQFYFVADICHGRNGFSPVKESSTKSHVESIYKLTEPQELDEYFIEIPPELSHLKIKGLSKDIGSSLSLLPSIMHRMENLLVAIELKHVLSASIPEIAEVSGHRVLEALTTEKCHERLSLERLEVLGDAFLKFAVSRHLFLHHDSLDEGELTRRRSNVYIRDQALDPTQFFAFGHPCRVTCDEVASKEVHSLNRDLGILESNTGEIRCSKGHHWLYKKTIADVVEALVGAFLVDSGFKGAVKFLKWIGVNVDFESLQVQDACIASRRYLPLTTRNNLETLENQLDYKFLHKGLLVQAFIHPSYNRHGGGCYQRLEFLGDAVLDYLMTSYFFTVFPKLKPGQLTDLRSLSVNNEALANVAVSFSLKRFLFCESIYLHEVIEDYTNFLASSPLASGQSEGPRCPKISPIKELIELCQSYKWDREISATKKDGAFTVELKVTKNGCCLTVSATGRNKREGTKKAAQLMITNLKAHENITTSHPLEDVLKNGIRNEAKLIGYNEDPIDVVDLVGLDVENLNILETFGGNSERSSSYVIRRGLPQAPSKTEDRLPQKAIIKAGGPSSKTAKSLLHETCVANCWKPPHFECCEEEGPGHLKSFVYKVILEVEDAPNMTLECYGEARATKKGAAEHAAQAAIWCLKHSGFLC

SEQ ID NO: 895 - protein, 688 aa, Arabidopsis thaliana
  Clone ID: AT_MVI11.C1.p12.tg
MEEEDEEILSSSDCDDSSDSYKDDSQDSEGENDNPECEDLAVVSLSSDADRKSKNVKDLLSNVTTIMVHSVLVKFLRPHQREGVQFMFDCVSGLHGSANINGCILADDMGLGKTLQSITLLYTLLCQGFDGTPMVKKAIIVTPTSLVSNWEAEIKKWVGDRIQLIALCESTRDDVLSGIDSFTRPRSALQVLIISYETFRMHSSKFCQSESCDLLICDEAHRLKNDQTLTNRALASLTCKRRVLLSGTPMQNDLEEFFAMVNFTNPGSLGDAAHFRHYYEAPIICGREPTATEEEKNLAADRSAELSSKVNQFILRRTNALLSNHLPPKIIEVVCCKMTTLQSTLYNHFISSKNLKRALADNAKQTKVLAYITALKKLCNHPKLIYDTIKSGNPGTVGFENCLEFFPAEMFSGRSGAWTGGDGAWVELSGKMHVLSRLLANLRRKTDDRIVLVSNYTQTLDLFAQLCRERRYPFLRLDGSTTISKRQKLVNRLNDPTKDEFAFLLSSKAGGCGLNLIGANRLVLFDPDWNPANDKQAAARVWRDGQKKRVYVYRFLSTGTIEEKVYQRQMSKEGLQKVIQHEQTDNSTRQVLAGMLYASSINDTHSNGLSQSLFSGNVARSEIHEKMSCSRCQNDASGTENIEEGNENNVDDNACQIDQEDIGGFAKDAGCFNLLKNSERQVPSCACY

SEQ ID NO: 896 - protein, 2049 aa, Arabidopsis thaliana
  Clone ID: AT_F24B22.C1.p240.tg
MAQQQSSRLNRLLTLLDTGSTQATRLTAAKQIGDIAKSHPQDLSSLLRKVLHHLRSKKWDTRVAAAHAIGAIVLNVKHPSLSELLNSLATKLGEAGISDNVDEVVAFRNLQSKILANAPFRSFEMNKVLEFGALLASGGQEYDILNDNSKNPRDRVARQKKNLRRRLGLDMCEQFMDVNEMIRDEDLIEQKSNVPANGVGNRLYANCSPHHIQQFVSRMVPRVNSRRPSARELNLLKRKAKISSKDQAKGSCEVADVEMSSSHVASTSKRILSDSLDSSKADIGNEDDIEPDGDGKWPFHSFVEQLILDMFDPAWEIRHGSVMALREILMLHGGSAGVSTEEFSSDNGFELKDVLNKVTREREIDLNMQVSENELEPLRKRPKIEDPSKSFIDNTVLEVIGGDYDINVKDEDAEFLLPPVKVNGQTDCSSTKLEPQSSMDDSTSHSEINHVAEVNNHFEDKSFIEEPVIPKQQEENLEVLDLVKQARHSWIKNFEFLQDCTIRFLCVLSLDRFGDYISDQVVAPVREACAQALGATFKYMNPSLIYETLNILLQMQRRPEWEIRHGSLLGIKYLVAVRQEMLQDLLGYILPACKAGLEDSDDDVRAVAADALIPAAAAIVSLRGQTLLSIVMLLWDILLELDDLSPSTSSIMNLLAEIYSQDDMTLVMHEELSLGEEQNIELNEMGHIESIGERRDVKESPYALSGLAPRLWPFTRHDITSVRFSAIRTLERLLEAGCRKNISGQSKSSFWPSSILGDTLRIVFQNLLLESTEEILECSERVWRLLVQCPVDDLEDTAKFYMASWIELAATPYGSTLDATKMFWPVAPPRKSHFKAAAKMKAVKLENEASSILGFDYARSSASLEKQEDASARSTKIIVGSDMEMSVTRTRVVTASALGIFASRLREGSMQFVVDPLSSTLTSMSGVQRQVGSIVLISWFRETKCKAPSDGSGSLPGFPSPLKKWLLDLLACADPAFPTKDIFLPYAELSRTYTKMRNEASQLLHTVETCHCFDKLLSTNKLNVESVTADETIDFASTLDLWNKESAGNESLEKQVFEDVESSRQQLLSTAGYLKCVQSNLHITVTSLVAAAVVWMSEFPARLNPIILPLMASIKREQEQILQQIAAEALAELIAYCVDRKPSPNDKLIKNICSLTCMDPSETPQASIISSMDIVDDMDFLSSRSNTGKQKAKVVLASGEDRSKVEGFITRRGSELALKHLSLKFGGSLFDKLPKLWECLTEVLVPEIPSDQQKIDLKIESISDPQVVRSIAPVMEETLKPRLLSLLPCIFKCVRHSHVAVRLAASRCVMTMAKSMTTDVMAAVVESAIPMLGDLTCISGRQGAGMLIGLLVQGLGVELVPYSPLLVVPLLRCMSDVDSSVRQSVTRSFAALVPMLPLARGVPPPVGLSKDLSSNAEDAKFLEQLLDNSHIDDYKLCTELKVQLRRYQQEGINWLGFLKRFKLHGILCDDMGLGKTLQASAIVASDAAERRGSTDELDVFPSIIVCPSTLVGHWAFEIEKYIDLSLLSVLQYVGSAQDRVSLREQFNNHNVIITSYDVVRKDVDYLTQFSWNYCILDEGHIIKNAKSKITAAVKQLKAQHRLILSGTPIQNNIMELWSLFDFLMPGFLGTERQFQASYGKPLLAARDPKCSAKDAEAGVLAMEALHKQVMPFLLRRTKEEVLSDLPEKIIQDRYCDLSPVQLKLYEQFSGSSAKQEISSIIKVDGSADSGNADVAPTKASTHVFQALQYLLKLCSHPLLVLGDKVTEPVASDLAAMINGCSDIITELHKVQHSPKLVALQEILEECGIGSDASSSDGTLSVGQHRVLIFAQHKALLDIIEKDLFQAHMKSVTYMRLDGSVVPEKRFEIVKAFNSDPTIDVLLLTTHVGGLGLNLTSADTLVFMEHDWNPMRDHQFANIELNKLWQAMDRAHRLGQKRVVNVHRLIMRGTLEEKVMSLQKFKVSVANTVINAENASMKTMNTDQLLDLFASAETSKKGGGSSKKGSEDNDQIAGTGKGMKAILGNLEELWDQSQYTEEYNLSQFLTKLNG

SEQ ID NO: 897 - protein, 1132 aa, Arabidopsis thaliana
  Clone ID: AT_F2O10.C1.p13.tg
MVAQQLQERCGGTSQEDPVETTKSLICALNYISRDLPLPPHLFTAVSSIYHGASSSSLSDSDVSPPLPTSPPANKAPYGADLMGEFEDALLKQRPDCESGSRLIQLLDNRNKSHIQRRLSELEGGCFVLTLCVFESELPSTRGEDLQAKCLLELYGLKLRELQGKVRTAVSSEFWLRLNCADVSSQVFDWGMMRLPRPFYGVGDPFAMEADDQFRKKRDAELSIFVIGIADVLKVFVQRLSRLEEEEKNLIETAKRKFFAEVLNAVREFQLQIQATQKRRRQRNDGVQAWHGRQRQRATRAEKLRLMALKSDDQEAYMKLVKESKNERLTTLLEETNKLLANLGAAVQRQKDAKLPEGIDLLKDSESDLSELDAPRSEPLQDLLPDQDIDITESDNNDDSNDLLEGQRQYNSAIHSIQEKVTEQPSLLEGGELRSYQLEGLQWMVSLFNNNLNGILADEMGLGKTIQTISLIAYLLENKGVPGPYLIVAPKAVLPNWVNEFATWVPSIAAFLYDGRLEERKAIREKIAGEGKFNVLITHYDLIMRDKAFLKKIEWYYMIVDEGHRLKNHESALAKTLLTGYRIKRRLLLTGTPIQNSLQELWSLLNFLLPHIFNSVQNFEEWFNAPFADRGNVSLTDEEELLIIHRLHHVIRPFILRRKKDEVEKFLPGKTQVILKCDMSAWQKVYYKQVTDMGRVGLQTGSGKSKSLQNLTMQLRKCCNHPYLFVGGDYNMWKKPEIVRASGKFELLDRLLPKLRKAGHRILLFSQMTRLIDVLEIYLTLNDYKYLRLDGTTKTDQRGLLLKQFNEPDSPYFMFLLSTRAGGLGLNLQTADTVIIFDSDWNPQMDQQAEDRAHRIGQKKEVRVFVLVSVGSVEEVILERAKQKMGIDAKVIQAGLFNTTSTAQDRREMLEEIMRKGTSSLGTDVPSEREINRLAARSEDEFWMFERMDEERRRKENYRARLMQEQEVPEWAYTTQTQEEKLNNGKFHFGSVTGKRKRKEIVYSDTLSELQWLKAVESGEDLSKLSMRYNRREENASNTKTSTSKKVIESIQTVSDGTSEEDEEEQEEERAKEMSGKQRVDKSEEEEEEGEEENDGKAIFKWNTHKKKRSRYSFTCSSSDSRAQSSNGSRRK

SEQ ID NO: 898 - protein, 678 aa, Arabidopsis thaliana
  Clone ID: AT_T14P4.C1.p33.tg
MAGLRSVHVGSETKVVSKNECAHVTLWTGTAQGDLGVAMEPHSHHKNAILPSSSQDENLKEEEVPDDDDSVGGEVQGEVNANDYIPNPAAPANTKRKWQIMKEKVQMTEDDDFDEQNAVIAEAAEQPLDLIIPLLKYQKEFLAWATIQELSAVRGGILADEMGMGKTIQAISLVLARREVDRAKSREAVGHTLVLVPPVALSQWLDEISRLTSPGSTRVLQYHGPKRDKNVQKLMNYDFVLTTSPIVENEYRKDEGVDETMSPLHSIKWNRIIVDEAHDIKNRSSRTAKAVFALEATYRWALSGTPLQNDVDELYSLVSYSFLNFFYSTYASFAFRHTHITFARNVTVKFLIGGNILPLSIPVRIENVPAVLIMQINTSLGGKRRDALSVVEADFYESLYKVSKTTFDGYIQAGTLMNNYAHIFGLLIRLRQAVDHPYLVSYSSPSGANANLLDANKNEKECGFGHDPSKDYFVTSSEHQASKTKLKGFRASSILNRINLDDFKTSTKIEALREEIRFMVERDWSAKAIVFSQFTSFLDLISYALGKSGVSCVQLVGSMSKAAKDAALKNFKEEPDCRVLLMSLQAGGVALNLTAASHVFMMDPWWNPAVERQAQDRIHRIGQCKPVRVVRFIMEKTVEEKILTLQKKKEDLFESTLGDSEEAVVQKLGEDDIKSLFA

SEQ ID NO: 899 - protein, 1053 aa, Arabidopsis thaliana
  Clone ID: AT_MBM17.C1.p5.tg
MAENTASHRRKPRSLNDRHYSILQDLSAPPRQPPSSSHGEDEETKKSMIKLAGRRRLCKALPKEDEADGYDDPDLVDFYSPVKGETSLDSAGIGNKFTSWDESKEANTELAGEPNFSIITDFCSPSPQLKQKEEMQGDGGRNEIMGILDDLTSKLGTMSIQKKKDSQSNDFDACGVKSQVDKFDFEDAKSSFSLLSDLSKSSPDVVTTYNAGVNSIKDKQGKSGFAIREEQTSKEFSREWEERISNVGKQNSYSGRHFDDNSEDNRQGYNLDRGKSQCKEVDQSMKTTRHIEVSEKIRTVGRSNAAKLRDLDEDDDDDDCLILSGKKAAEMKINKPARSYNAKRHGYDERSLEDEGSITLTGLNLSYTLPGKIATMLYPHQREGLNWLWSLHTQGKGGILGDDMGLGKTMQICSFLAGLFHSKLIKRALVVAPKTLLPHWMKELATVGLSQMTREYYGTSTKAREYDLHHILQGKGILLTTYDIVRNNTKALQGDDHYTDEDDEDGNKWDYMILDEGHLIKNPNTQRAKSLLEIPSSHRIIISGTPIQNNLKALSFNRFKQNYEHYILRGTDKNATDREQRIGSTVAKNLREHIQPFFLRRLKSEVFGDDGATSKLSKKDEIVVWLRLTACQRQLYEAFLNSEIVLSAFDGSPLAALTILKKICDHPLLLTKRAAEDVLEGMDSTLTQEEAGVAERLAMHIADNVDTDDFQTKNDSISCKLSFIMSLLDSLTSNGYSFLRIDGTTKAPDRLKTVEEFQEGHVAPIFLLTSQVGGLGLTLTKADRVIVVDPAWNPSTDNQSVDRAYRIGQTKDVIVYRLMTSATVEEKIYRKQVYKGGLFKTATEHKEQIRYFSQQDLRELFSLPKGGFDVSPTQQQLYEEHYNQIKLDEKLESHVKFLETLGIAGVSHHSLLFSKTAPIQAIQKDEEEQIRRETALLLGRASASISQDTVINGADYAFKPKDVNLDKRINISPVDDKELSESVIKARLNRLTMLLQNKGTVSRLPDGGAKIQKQIAELTRELKDMKAAERINMPQVIDLEEDISRKMQKGLNL

SEQ ID NO: 900 - protein, 638 aa, Arabidopsis thaliana
  Clone ID: AT_MGL6.C1.p5.tg
MDDTMDMSSGSDEEVQEEKTTVNERVIYQAALQDLKQPKTEKDLPPGVLTVPLMRHQKIALNWMRKKEKRSRHCLGGILADDQGLGKTISTISLILLQKLKSQSKQRKRKGQNSGGTLIVCPASVVKQWAREVKEKVSDEHKLSVLVHHGSHRTKDPTEIAIYDVVMTTYAIVTNEVPQNPMLNRYDSMRGRESLDGSSLIQPHVGALGRVRWLRVVLDEAHTIKNHRTLIAKACFSLRAKRRWCLTGTPIKNKVDDLYSYFRFLRYHPYAMCNSFHQRIKAPIDKKPLHGYKKLQAILRGIMLRRTKEWSFYRKLELNSRWKFEEYAADGTLHEHMAYLLVMLLRLRQACNHPQLVNGYSHSDTTRKMSDGVRVAPRENLIMFLDLLKLSSTTCSVCSDPPKDPVVTLCGHVFCYECVSVNINGDNNTCPALNCHSQLKHDVVFTESAVRSCINDYDDPEDKNALVASRRVYFIENPSCDRDSSVACRARQSRHSTNKDNSISGLVCAMLMSLKAGNLGLNMVAASHVILLDLWWNPTTEDQAIDRAHRIGQTRAVTVTRIAIKNTVEERILTLHERKRNIVASALGEKNWQKFCDSTNTRRSRISVFWCVEYPRVFIDKRNKTFSYLISHKCECNE

SEQ ID NO: 901 - protein, 1277 aa, Arabidopsis thaliana
  Clone ID: AT_K9D7.C1.p2.tg
MAIVDDAEMRLTESEAVSSSDDRKIVADTPDFIDESSLVIRTTTGVRISALPAEQSLVDSDGSNSEVTLPAKDEVISDGFTCVNKEIVESDSFREQNLEIGEPDLDVENRKEAMIIDSIENSVVEIVSSASGDDCNVKVEVVEPELLVENLVVAKEEEEMIVDSIEDSVVEIVSTASGCDCNVKVEVVDPELCVDNLVVVKEEEMIADSIAESVVETVSRGLDYECVDVKVKEEPDLGTKLEEDSVFPNVLEKKDEVIKVLEDQPSEINKKLEQENDDLFSSGDSDGTSAKRRKMEMESYAPVGVESCILAPTPLRVVKPEKLDTPEVIDLESEKSYTHVKMEPVEEIKVEAVKMSSQVEDVKFSREQKSVYVKKEPVGARKVKVEDGDFPVEKDWYLVGRSLVTATSTSKGRKLEDNEIVNFTFSSVAKWKVPNIVRFSTKRCGEIGRLPMEWSNWAVSLLRSGKVKMLGRCVAAPPFLTMMQEIMLYVSFYIHSSIFTDVSKSTWRIGSSPNLESTLHPLLQLFKHLTIKPYQKAEFTPEELNSRKRSLNLEDDYDERAALLAIAKRRKGCQQSLEQNKDEEEAPESYMNRVVGAADSYNLEEMEAPSTLTCNLRPYQKQALYWMSESEKGIDVEKAAETLHPCWEAYRICDERAPSIYLNIFSGEATIQFPTATQMARGGILADAMGLGKTVMTIALILARPGRGNPENEDVLVADVNADKRNRKEIHMALTTVKAKGGTLIICPMALLSQWKDELETHSKPDTVSVLVYYGGDRTHDAKAIASHDVVLTTYGVLTSAYKQDMANSIFHRIDWYRIVLDEAHTIKSWKTQAAKATFELSSHCRWCLTGTPLQNKLEDLYSLLCFLHVEPWCNWAWWSKLIQKPYENGDPRGLKLIKAILRPLMLRRTKETRDKEGSLILELPPTDVQVIECEQSEAERDFYTALFKRSKVQFDQFVAQGKVLHNYANILELLLRLRQCCNHPFLVMSRADSQQYADLDSLARRFLDNNPDSVSQNAPSRAYIEEVIQDLRDGNSKECPICLESADDPVLTPCAHRMCRECLLTSWRSPSCGLCPICRTILKRTELISCPTDSIFRVDVVKNWKESSKVSELLKCLEKIKKSGSGEKSIVFSQWTSFLDLLEIPLRRRGFEFLRFDGKLAQKGREKVLKEFNETKQKTILLMSLKAGGVGLNLTAASSVFLMDPWWNPAVEEQAIMRIHRIGQKRTVFVRRFIVKDTVEERMQQVQARKQRMIAGALTDEEVRSARLEELKMLFR

SEQ ID NO: 902 - protein, 881 aa, Arabidopsis thaliana
  Clone ID: AT_MUG13.C1.p1.tg
MRVLKYFRAPSSLRHRSSPMAQFLRRFSSSPMANEDEFQSPVEPSQQQSQDCVSESYLIGFVIANIVGLKYYSGRINGREMVGLVREPLNVYDNNAIRVLNTRSEQVGHIERTVAAVLAPMIDSHTIVVEGIVPNTRSNSNRYRIPCQIHVFAKLEASSTVKSTISRGGLVLISESDTSFGLSEAVVVKEQMGNGDKRSVDKIFKLVDENVKLMGKLVAAEPPREVIKSELFAHQKEGLGWLLHREKSGELPPFWEEKDGEFLNTLTNYRSDKRPDPLRGGVFADDMGLGKTLTLLSLIAFDRYGNASTSTPTEEPLDGEGDKIEKKGKKRGRGKSSESVTRKKLKTDDVVGMNVSQKTTLIVCPPSVISAWITQLEEHTVPGILKVYMYHGGERTDDVNELMKYDIVLTTYGTLAVEESWEDSPVKKMEWLRIILDEAHTIKNANAQQSRVVCKLKASRRWAVTGTPIQNGSFDLYSLMAFLRFEPFSIKSYWQSLIQRPLGQGNKKGLSRLQVLMATISLRRTKEKSLIGLPPKTVETCYVELSPEERQLYDHMEGEAKGVVQNLINNGSLMRNYSTVLSIILRLRQLCDDMSLCPPELRSFTTSTSVEDVTDKPELLQKLVAALQDGEDFDCPICISPPTNIIITRCAHIFCRACILQTLQRSKPLCPLCRGSLTQSDLYNAPPPPPDSSNTDGEDAKSSTKSSKVSALLSLLMASRQENPNTKSVVFSQFRKMLLLLETPLKAAGFTILRLDGAMTVKKRTQVIGEFGNPELTGPVVLLASLKASGTGINLTAASRVYLFDPWWNPAVEEQAMDRIHRIGQKQEVKMIRMIARNSIEERVLELQQKKKNLANEAFKRRQKKDEREVNVEDVVALMSL

SEQ ID NO: 903 - protein, 816 aa, Arabidopsis thaliana
  Clone ID: AT_F3K23.C1.p21.tg
MFTAWNLRSRSRSITQEELAKRPDPFCLPNLLDGLEDGLYGRLADDVKRLCKLRQEYLNGSISLEDIEARQDNKRAKSSHNLIIDSDDELPQESVTQINPLEKRLKKLKEVIVVKNGDSSGSDSSPQGYDEEDSSRNSTDIDNQSLYVDAEEEEELWRKMAFAQESIKVTVEDSQSNDHKQIEDCDHSFICKDDIGEVCRVCGLIKKPIESMIEVVFNKQKRSRRTYMREKENGETSRDFSGIQSSHTNILGEKMFIHPWHDQEMRPHQTEGFRFLCNNLAADEPGGCILAHAPGSGKTFLLISFLQSFMAMDPQARPLVVLPKGIIESWKREFTLWEVEKIPLLDFYSVKAESRKQQLKVLGQWIKERSILFLGYQQFTRIICDDNFEAASEDCKLILLEKPTLLILDEGHTSRNKETYMLSSLARVKTRRKVVLTGTLFQNNVEEVFNILDLVRPKFLKRPGTREIVSRIMSKAEIPRGKQVNQSSSSIEGTFFAAVELTLQRSTNFSAKASLIKDLREMTRNILHYHKADFSGLLPGLSEFTVMLNLSSIQRDEVKGLRKMELFKQISLGAALYIHPKLKSFLEENPSNGEKGFSDNNTTVMKLDKMLKKINVRDGVKMKFFLNLLALCESTGEKLLVFSQYIVPIKTLERLMSSMKGWRLGKEMFTITGDSSNEQREWSMERFNNSLEAKVFFGSIKACGEGISLVGASRVLILDVHLNPSVTQQAVARAYRPGQKRKVYAYKLVAADSPEEENYETCTRKEMMSKMWFEWNVGSGREDFGFRAIDADHSGDAFLETTKMKEDIKCLYTKVN

SEQ ID NO: 904 - protein, 1261 aa, Arabidopsis thaliana
  Clone ID: AT_F7C8.C1.p10.tg
MKKRGFYNLKHPFDPCPFEFFCSGTWKPVEYMRIEDGMMTIRLLENGYVLEDIRPFQRLRLRSRKAALSDCICFLRPDIDVCVLYRIHEDDLEPVWVDARIVSIERKPHESECSCKINVRIYIDQGCIGSEKQRINRDSVVIGLNQISILQKFYKEQSTDQFYRWRFSEDCTSLMKTRLSLGKFLPDLSWLTVTSTLKSIVFQIRTVQTKMVYQIVTDEEGSSSTLSSMNITLEDGVSLSKVVKFNPADILDDSQDLEIKQETDYYQEEDEVVELRRSKRRNVRPDIYTGCDYEPDTIDGWVRMMPYQFGKCAVNVESDEDEDDNNEDGDTNDDLYIPLSRLFIKKKKTNSREAKPKSRKGEIVVIDKRRVHGFGRKERKSELSVIPFTPVFEPIPLEQFGLNANSFGGGGSFSRSQYFDETEKYRSKGMKYGKKMTEMEEMMEADLCWKGPNQVKSFQKRTSRSSRSVAPKTEDSDEPRVYKKVTLSAGAYNKLIDTYMNNIESTIAAKDEPTSVVDQWEELKKTNFAFKLHGDMEKNLSEDGEGETSENEMLWREMELCLASSYILDDNEVRVDNEAFEKARSGCEHDYRLEEEIGMCCRLCGHVGSEIKDVSAPFAEHKKWTIETKHIEEDDIKTKLSHKEAQTKDFSMISDSSEMLAAEESDNVWALIPKLKRKLHVHQRRAFEFLWRNVAGSVEPSLMDPTSGNIGGCVISHSPGAGKTFLIIAFLTSYLKLFPGKRPLVLAPKTTLYTWYKEFIKWEIPVPVHLIHGRRTYCTFKQNKTVQFNGVPKPSRDVMHVLDCLEKIQKWHAHPSVLVMGYTSFTTLMREDSKFAHRKYMAKVLRESPGLLVLDEGHNPRSTKSRLRKALMKVGTDLRILLSGTLFQNNFCEYFNTLCLARPKFIHEVLMELDQKFKTNHGVNKAPHLLENRARKLFLDIIAKKIDASVGDERLQGLNMLKNMTNGFIDNYEGSGSGSGDALPGLQIYTLVMNSTDIQHKILTKLQDVIKTYFGYPLEVELQITLAAIHPWLVTSSNCCTKFFNPQELSEIGKLKHDAKKGSKVMFVLNLIFRVVKREKILIFCHNIAPIRMFTELFENIFRWQRGREILTLTGDLELFERGRVIDKFEEPGNPSRVLLASITACAEGISLTAASRVIMLDSEWNPSKTKQAIARAFRPGQQKVVYVYQLLSRGTLEEDKYRRTTWKEWVSCMIFSEEFVADPSLWQAEKIEDDILREIVGEDKVKSFHMIMKNEKASTG

SEQ ID NO: 905 - protein, 773 aa, Arabidopsis thaliana
  Clone ID: AT_YUP8H12.C1.p27.tg
MELRSRNKAIRPSTEVVDLEEGTGINPDEEPYAISSDDDSIGSEFQGDEEEEEELEEVVANDDLPNPVPVLAIVNLPRASKKRKKPDARKEKVVLLWETWEKEQNSWIDEHMSEDVDLDQHNAVIAETAEPPSDLIMPLLRYQKEFLAWATKQEQSVAGGILADEMGMGKTIQAISLVLARREVDRAQFGEAAGCTLVLCPLVAVSQWLNEIARFTSPGSTKVLVYHGAKRAKNIKEFMNYDFVLTTYSTVESEYRRNIMPSKVQCAYCSKSFYPKKLVIHLRYFCGPSAVKTAKQSKQKRKKTSDSSSQQGKEADAGEDKKLKKSKKKTKQTVEKDQLGSDDKEKSLLHSVKWNRIILDEAHYIKERRSNTARAVFALEATYRWALSGTPLQNRVGELYSLIRFLQIRPYSYYFCKDCDCRILDYVAHQSCPHCPHNAVRHFCWWNKYVAKPITVYGSFGLGKRAMILLKHKVLKDILLRRTKLGRAADLALPPRIITLRRDTLDVKEFDYYESLYKNSQAEFNTYIEAGTLMNNYAHIFDLLTRLRQAVDHPYLVVYSNSSGANANLVDENKSEQECGLCHDPAEDYVVTSCAHVFCKACLIGFSASLGKVTCPTCSKLLTVDWTTKADTEHKASKTTLKGFRASSILNRIKLDDFQTSTKIEALREEIRFMVERDGSAKAIVFSQFTSFLDLINYTLGKCGVSCVQLVGSMTMAARDTAINKFKEDPDCRVFLMSLKAGGVALNLTVASHVFMMDPWWNPAVERQAQDRI

SEQ ID NO: 906 - protein, 874 aa, Arabidopsis thaliana
  Clone ID: AT_F11M21.C1.p32.tg
MSLLHTFKETLKPCGSFPSSSSLRVSSTQELEPSRKPPKSSLSQQLLRLDDSYFLPSKHESKISKTQVEDFDHNEDDHKRNIKFDEEEVDEDDERSIEFGRPGLSRAEFDYSGPYEPLMLSSIGEIPIIHVIFLPKSLTFAHVPASINCRLLEHQREGVKFMYNLYKNNHGGILGDDMGLGKTIQTIAFLAAVYGKDGDAGESCLLESDKGPVLIICPSSIIHNWESEFSRWASFFKVSVYHGSNRDMILEKLKARGVEVLVTSFDTFRIQGPVLSGINWEIVIADEAHRLKNEKSKLYEACLEIKTKKRIGLTGTVMQNKISELFNLFEWVAPGSLGTREHFRDFYDEPLKLGQRATAPERFVQIADKRKQHLGSLLRKYMLRRTKEETIGHLMMGKEDNVVFCQMSQLQRRVYQRMIQLPEIQCLVNKDNPCACGSPLKQSECCRRIVPDGTIWSYLHRDNHDGCDSCPFCLVLPCLMKLQQISNHLELIKPNPKDEPEKQKKDAEFVSTVFGTDIDLLGGISASKSFMDLSDVKHCGKMRALEKLMASWISKGDKILLFSYSVRMLDILEKFLIRKGYSFARLDGSTPTNLRQSLVDDFNASPSKQVFLISTKAGGLGLNLVSANRVVIFDPNWNPSHDLQAQDRSFRYGQKRHVVVFRLLSAGSLEELVYTRQVYKQQLSNIAVAGKMETRYFEGVQDCKEFQGELFGISNLFRDLSDKLFTSDIVELHRDSNIDENKKRSLLETGVSEDEKEEEVMCSYKPEMEKPILKDLGIVYAHRNEDIINIGETTTSTSQRLNGDGNSADRKKKKRKGCSEEEDMSSSNREQKREKYKMLAEFKGMEILEFSRWVLSASPFDREKLLQDFLERVK

SEQ ID NO: 907 - protein, 1041 aa, Arabidopsis thaliana
  Clone ID: AT_F7K24.C1.p60.tg
MVKQLQEQEENDPVEKTKSLISALNYLSRDLLLPSHLYASVSSIYHASVSDLSPSPPLRGNSYTPNRGDLMSEFEDALLQQRLNYESGSRLAELKETRYKNRIHNRLSQLEGLPSNRGEDLQEKCLLELYGLKLQELQCRVRGEVSAEYWLRLNCADPERQLYDWGMMRLPRRMYGVGDSFVMEADDQFRNKRDAERLLRLEEEEKNLIETTQRKFFAEVLNAVREFQLQIQASHRRCKQRNDGVQAWHGKQRQRATRAEKLRIMALKSDDQEEYMKLAKEIQRQKDAKLSENTKLLKGSESDLSDVDAPEDVLPAQDIEIIDSDNNDDSNDLLEGERQFNLAIHSIQEKVTKQPSLLQGGELRSYQLEGLQWMVSLYNNDYNGILADEMGLGKTIQTIALIAYLLESKDLHGPHLILAPKAVLPNWENEFALWAPSISAFLYDGSKEKRTEIRARIAGGKFNVLITHYDLIMRDKAFLKKIDWNYMIVDEGHRLKNHECALAKTLGTGYRIKRRLLLTGTPIQNSLQELWSLLNFLLPHIFNSIHNFEEWFNTPFAECGSASLTDEEELLIINRLHHVIRPFLLRRKKSEVEKFLPGKTQVILKCDMSAWQKLYYKQVTDVGRVGLHSGNGKSKSLQNLTMQLRKCCNHPYLFVGADYNMCKKPEIVRASGKFELLDRLLPKLKKAGHRILLFSQMTRLIDLLEIYLSLNDYMYLRLDGSTKTDQRGILLKQFNEPDSPYFMFLLSTRAGGLGLNLQTADTIIIFDSDWNPQMDQQAEDRAHRIGQKKEVRVFVLVSIGSIEEVILERAKQKMGIDAKVIQAGLFNTTSTAQDRREMLEEIMSKGTSSLGEDVPSEREINRLAARTEEEFWMFEQMDEERRKKENYKTRLMEEKEVPEWAYTSETQEDKTNAKNHFGSLTGKRKRKEAVYSDSLSDLQWMKAMESEDEDASKVSQKRKRTDTKTRMSNGSKAEAVLSESDEEKEEEEEERKEESGKESEEENEKPLHSWKTNKKKRSRYPVMTSSPNSRGKGSSKGSKRN

SEQ ID NO: 908 - protein, 1447 aa, Arabidopsis thaliana
  Clone ID: AT_F22O13.C1.p8.tg
MEANEESLKGKIEKLEGKEVIVESKEDEMDIIIEENREAEQEVMEVKARDGRGEQNDVLMEENNNQGEQKDEEMQDASSRSESSDFNSDEDEQILSRRDDELDLEKPLSEEEIDELISDLLAVESKLDEAVAAEMMTFKDEWEATLDELETESATLLEQLDGAGIELPKLYEMIESQAPNGCYTEAWKQRAHWVGTQVTKETVESLANAERFLHTHRPVRKRHGKLLEEGASGFLEKKLADGAVKESLAGTSELDWSSLNKVFSEKRDESVSFGSKQWASVYLASTPHQAAAMGLEFPGVNEVEEIEEIDASLADPFLADAIDNERELALTEEQKTNYIRVKEEDDITCDRVLQLRLKRKRRKKRSKQVIRCAAENMDDDSVYLDGNNTTPNFAKDQVKSPETSTQVHNSEVNIEENGNFSNSDVDKMTPSTHINVDAKRDDSQNPANNFRCTACNKVAVEVHSHPLLEVIVCMDCKRSIEDRVSKVDDSLERHCEWCGHIADLIDCRTCEKLFCASCIKRNIGEEYMSEAQSSGWDCCCCSPIPLQRLTLELEKAMRDKKSIELSSDSSSDSSSDNNSVDTDADVNVTISSKKKSKKKIRRIIDDAELGKDTRTKIAIEKARQERLRSLQFSARYKTISSMGDVKSIPEGAEVEVLGDAHSGYIVNVVREIGEEAVRVPRSISAKLKVHQVTGIRFMWENIIQSISRVKSGDKGLGCILAHTMGLGKTFQVIAFLYTAMRCVDLGLKTALIVTPVNVLHNWRSEFEKWMPSEVKPLRIFMLGDVSRERRFDLLTKWRKKGGVFLMGYTNFRNLSLGRGVKDLNAARGICNALRDGPDILVCDEAHIIKNTKADTTQALKQVKCQRRIALTGSPLQNNLMEYYCMVDFVREGFLGSSPEFRNRFQNPIENGQHMNSTAEDVKIMNQRSHILYEQLKGFVQRMDMNVVKKDLPPKTVFVISVKLSPLQRILYQRFLELYGFSDGRTDERMRKNFFAAYQVLAQILNHPGIPQLRSEDSKNGRRGSIVDIPDDCSSDENIDYNMVTGEKQRTMNDLQDKVDGYLQKDWWVDLLQKNNYKVSDFSGKMILLLDILSMSADVGDKALVFSQSIPTLDLIELYLSRVPRHGKQGKFWKKGKDWYRIDGKTESSERQKLVDRFNEPDNKRVKCTLISTRAGSLGINLYAANRVIIVDGSWNPTYDLQAIFRAWRYGQKKPVFAYRLMARGTIEEKIYKRQVTKEGLAARVVDRQQVHRTISKEEMLHLFEFDDDDEKSEAVTEISKQNEAGHSNLVEQAILWTKKATLSRVGGDKLMENLLQRHGPNWISSFHEHETLLQENEEERLTKEEKDMAWEVYRRALEWEEVQRVPFSESPVVPKPSPSTQTEPLPQPKGFNRSRFVNRNCTRIAHQLTLISQGLKVGSSTVCGECGRVIRWEDVIPASKLSAVIVN

SEQ ID NO: 909 - protein, 1056 aa, Arabidopsis thaliana
  Clone ID: AT_F11F12.C1.p24.tg
MDSAIDISSDSDVEIQETRTRPQHPPRIAEGSHRRDLSTLRPHFLSGSSSGANGHTKTGLTNLDSRNGFESKPLPRAEHHTHIPGNGSIVTSRIPNISVGDYEKFSSQQAFKRTHPPTFSRPPFPPRPDIGTSNGNASHFRGGAHDDLGMGRVTNGTRILPPSVAHGTSASPSHFNGLSDPMHRNGIGEERNSENDERLIYQAALQTMCMEALLFFLFDKREGIGTFTIVAFVSYFALLHQGYDFHLKSLVFLHNSPGTESTQVRGRFTCWSSFGSPYEASGIQVYIIFQYLSEWSCVLNTVVSQKIALAWMFQKETNSLHCMGGILADDQGLGKTVSTIALILKQMHEAKLKSKNSGNQEAEALDLDADDESENAFEKPESKASNGSGVNGDSGIKKAKGEEASTSTRKFNRKRPAAGTLIVCPASVVRQWARELDEKVTDEAKLSVLIYHGGNRTKDPIELAKYDVVMTTYAIVSNEVPKQPLVDDDENDEKNSEKYGLASGFSINKKRKNVVGTTKKSKKKKGNNNAGDSSDPDSGTLAKVGWFRVVLDEAQTIKNHRTQVARACCGLRAKRRWCLSGTPIQNTIDDLYSYFRFLKYDPYAVYKSFCHQIKGPISRNSLQGYKKLQAVLRAIMLRRTKGTLLDGQPIINLPPKTINLSQVDFSVEERSFYVKLESDSRSQFKAYAAAGTLNQNYANILLMLLRLRQACDHPQLVKRYNSDSVGKVSEEAVKKLPKEDLVSLLSRLESSPICCVCHDPPEDPVVTLCGHIFCYQCVSDYITGDEDTCPAPRCREQLAHDVVFSKSTLRSCVADDLGCSSSEDNSHDKSVFQNGEFSSSKIKAVLDILQSLSNQGTSNSTQNGQMASSSQQPNDDDDDDDDDVTIVEKTSLKSTPSNGGPIKTIIFSQWTGMLDLVELSLIENSIEFRRLDGTMSLIARDRAVKEFSNDPDVKVMIMSLKAGNLGLNMIAACHVILLDLWWNPTTEDQAIDRAHRIGQTRPVTVTRITIKNTVEDRILALQEEKRKMVASAFGEDHGGSSATRLTVDDLKYLFMV

SEQ ID NO: 910 - protein, 1496 aa, Arabidopsis thaliana
  Clone ID: AT_F28O9.C1.p150.tg
MDPSRRPPKDSPYANLFDLEPLMKFRIPKPEDEVDYYGSSSQDESRSTQGGVVANYSNGSKSRMNASSKKRKRWTEAEDAEDDDDLYNQHVTEEHYRSMLGEHVQKFKNRSKETQGNPPHLMGFPVLKSNVGSYRGRKPGNDYHGRFYDMDNSPNFAADVTPHRRGSYHDRDITPKIAYEPSYLDIGDGVIYKIPPSYDKLVASLNLPSFSDIHVEEFYLKGTLDLRSLAELMASDKRSGVRSRNGMGEPRPQYESLQARMKALSPSNSTPNFSLKVSEAAMNSAIPEGSAGSTARTILSEGGVLQVHYVKILEKGDTYEIVKRSLPKKLKAKNDPAVIEKTERDKIRKAWINIVRRDIAKHHRIFTTFHRKLSIDAKRFADGCQREVRMKVGRSYKIPRTAPIRTRKISRDMLLFWKRYDKQMAEERKKQEKEAAEAFKREQEQRESKRQQQRLNFLIKQTELYSHFMQNKTDSNPSEALPIGDENPIDEVLPETSAAEPSEVEDPEEAELKEKVLRAAQDAVSKQKQITDAFDTEYMKLRQTSEMEGPLNDISVSGSSNIDLHNPSTMPVTSTVQTPELFKGTLKEYQMKGLQWLVNCYEQGLNGILADEMGLGKTIQAMAFLAHLAEEKNIWGPFLVVAPASVLNNWADEISRFCPDLKTLPYWGGLQERTILRKNINPKRMYRRDAGFHILITSYQLLVTDEKYFRRVKWQYMVLDEAQAIKSSSSIRWKTLLSFNCRNRLLLTGTPIQNNMAELWALLHFIMPMLFDNHDQFNEWFSKGIENHAEHGGTLNEHQLNRLHAILKPFMLRRVKKDVVSELTTKTEVTVHCKLSSRQQAFYQAIKNKISLAELFDSNRGQFTDKKVLNLMNIVIQLRKVCNHPELFERNEGSSYLYFGVTSNSLLPHPFGELEDVHYSGGQNPIIYKIPKLLHQEVLQNSETFCSSVGRGISRESFLKHFNIYSPEYILKSIFPSDSGVDQVVSGSGAFGFSRLMDLSPSEVGYLALCSVAERLLFSILRWERQFLDELVNSLMESKDGDLSDNNIERVKTKAVTRMLLMPSKVETNFQKRRLSTGPTRPSFEALVISHQDRFLSSIKLLHSAYTYIPKARAPPVSIHCSDRNSAYRVTEELHQPWLKRLLIGFARTSEANGPRKPNSFPHPLIQEIDSELPVVQPALQLTHRIFGSCPPMQSFDPAKLLTDSGKLQTLDILLKRLRAGNHRVLLFAQMTKMLNILEDYMNYRKYKYLRLDGSSTIMDRRDMVRDFQHRSDIFVFLLSTRAGGLGINLTAADTVIFYESDWNPTLDLQAMDRAHRLGQTKDETVEEKILHRASQKNTVQQLVMTGGHVQGDDFLGAADVVSLLMDDAEAAQLEQKFRELPLQDRQKKKTKRIRIDAEGDATLEELEDVDRQDNGQEPLEEPEKPKSSNKKRRAASNPKARAPQKAKEEANGEDTPQRTKRVKRQTKSINESLEPVFSASVTESNKGFDPSSSAN

SEQ ID NO: 911 - protein, 588 aa, Arabidopsis thaliana
  Clone ID: AT_T25N20.C1.p13.tg
MYPHQQEGFEFIWKNLAGTIMLNELKDFENSDETGGCIMSHAPGTGKTRLTIIFLQAYLQCFPDCKPVIIAPASLLLTWAEEFKKWNISIPFHNLSSLDFTGKENSAALGLLMQKNATARSNNEIRMVKIYSWIKSKSILGISYNLYEKLAGVKDEDKKTKMVREVKPDKELDDIREILMGRPGLLVLDEAHTPRNQRSCIWKTLSKVETQKRILLSGTPFQNNFLELCNVLGLARPKYLERLTSTLKKSGMTVTKRGKKNLGNEINNRGIEELKAVMLPFVHVHKGSILQSSLPGLRECVVVLNPPELQRRVLESIEVTHNRKTKNVFETEHKLSLVSVHPSLVSRCKISEKERLSIDEALLAQLKKVRLDPNQSVKTRFLMEFVELCEVIKEKVLVFSQYIDPLKLIMKHLVSRFKWNPGEEVLYMHGKLEQKQRQTLINEFNDPKSKAKVFLASTKACSEGISLVGASRVILLDVVWNPAVERQAISRAYRIGQKRIVYTYHLVAKGTPEGPKYCKQAQKDRISELVFACSSRHDKGKEKIAEAVTEDKVLDTMVEHSKLGDMFDNLIVQPKEADLVEGFSILMP

SEQ ID NO: 912 - protein, 1256 aa, Arabidopsis thaliana
  Clone ID: AT_T12K4.C1.p120.tg
MKRKHYFEFNHPFNPCPFEVFCWGTWKAVEYLRIENGTMTMRLLENGQVLDDIKPFQRLRIRSRKATLIDCTSFLRPGIDVCVLYQRDEETPEPVWVDARVLSIERKPHESECLCTFHVSVYIDQGCIGLEKHRMNKVPVLVGLNEIAILQKFCKEQSLDRYYRWRYSEDCSSLVKTRLNLGKFLPDLTWLLVTSVLKNIVFQIRTVHEKMVYQIVTDEDCEGSSSSLSAMNITVEDGVVMSKVVLFNPAEDTCQDSDVKEEIEEEVMELRRSKRRSGRPERYGDSEIQPDSKDGWVRMMPYRYNIWNVSSDDDDEEEDCEDDKDTDDDLYLPLSHLLRKKGSKKGFSKDKQREIVLVDKTERKKRKKTEGFSRSCELSVIPFTPVFEPIPLEQFGLNANSLCGGVSGNLMDEIDKYRSKAAKYGKKKKKKIEMEEMESDLGWNGPIGNVVHKRNGPHSRIRSVSRETGVSEEPQIYKKRTLSAGAYNKLIDSYMSRIDSTIAAKDKATNVVEQWQGLKNPASFSIEAEERLSEEEEDDGETSENEILWREMELCLASSYILDDHEVRVDNEAFHKATCDCEHDYELNEEIGMCCRLCGHVGTEIKHVSAPFARHKKWTTETKQINEDDINTTIVNQDGVESHTFTIPVASSDMPSAEESDNVWSLIPQLKRKLHLHQKKAFEFLWKNLAGSVVPAMMDPSSDKIGGCVVSHTPGAGKTFLIIAFLASYLKIFPGKRPLVLAPKTTLYTWYKEFIKWEIPVPVHLLHGRRTYCMSKEKTIQFEGIPKPSQDVMHVLDCLDKIQKWHAQPSVLVMGYTSFLTLMREDSKFAHRKYMAKVLRESPGLLVLDEGHNPRSTKSRLRKALMKVDTDLRILLSGTLFQNNFCEYFNTLCLARPKFVHEVLVELDKKFQTNQAEQKAPHLLENRARKFFLDIIAKKIDTKVGDERLQGLNMLRNMTSGFIDNYEGSGSGSGDVLPGLQIYTLLMNSTDVQHKSLTKLQNIMSTYHGYPLELELLITLAAIHPWLVKTTTCCAKFFNPQELLEIEKLKHDAKKGSKVMFVLNLVFRVVKREKILIFCHNIAPIRLFLELFENVFRWKRGRELLTLTGDLELFERGRVIDKFEEPGGQSRVLLASITACAEGISLTAASRVIMLDSEWNPSKTKQAIARAFRPGQQKVVYVYQLLSRGTLEEDKYRRTTWKEWVSSMIFSEEFVEDPSQWQAEKIEDDVLREIVEEDKVKSFHMIMKNEKASTGG

SEQ ID NO: 913 - protein, 888 aa, Arabidopsis thaliana
  Clone ID: AT_F16F14.C1.p11.tg
MGFVYIVMTGYYKNVHKRKQNQVDDGPEAKRVKSSAKVIDYSNPFAVSNMLEALDSGKFGSVSKELEEIADMRMDLVKRSIWLYPSLAYTVFEAEKTMDNQQVVEGVINLDDDDDDDTDVEKKALCVVPSSSEIVLLDSDDEDNERQRPMYQFQSTLVQHQKNQGDVTPLIPQCSFEEVDLGRGKEMPSAIKAIVEGQTSRGKVLPIENGVVNEKGVYVGVEEDDSDNESEAADEDLGNIWNEMALSIECSKDVARETSHKEKADVVEDCEHSFILKDDMGYVCRVCGVIEKSILEIIDVQFTKAKRNTRTYASETRTKRFGESDNELKFSEEGLMIGGLAAHPTHAAEMKPHQIEGFQFLCSNLVADDPGGCIMAHAPGSGKTFMIISFMQSFLAKYPQAKPLVVLPKGILPTWKKEFVRWQVEDIPLLDFYSAKAENRAQQLSILKQWMEKKSILFLGYQQFSTIVCDDTTDSLSCQEILLKVPSILILDEGHTPRNEDTNLLQSLAQVQTPRKVVLSGTLYQNHVKEVFNILNLVRPKFLKLDTSKSAVKRILAYTPCDVRGRLTGSNSDMASMFNETVEHTLQKSEDFTVKIKVIQDLREMTKKVLHYYKGDFLDELPGLADFTVVLNLSPKQLNEVKKLRREKRKFKVSAVGSAIYLHPKLKVFSDKSDDVSDTTMDEMVEKLDLNEGVKAKFFLNLINLCDSAGEKLLVFSQYLIPLKFLERLAALAKGWKLGKEVFVLTGNTSSEQREWSMETFNSSPDAKIFFGSIKACGEGISLVGASRILILDVPLNPSVTRQAIGRAFRPGQKKMVHAYRLIAGSSPEEEDHNTCFKKEVISKMWFEWNEYCGYQNFEVETIDVDEAGDTFLESPALREDIRVLYKR

SEQ ID NO: 914 - protein, 1287 aa, Arabidopsis thaliana
  Clone ID: AT_F11P17.C1.p13.tg
MGEEGSMFGLGGEFPVDDCDGGFEFEDDDETIDIETLYRILDEKPDSAEVVFSAFVGSQENLSPVGSSADELKDSQLLNGSFDEHVKMEAGLSPSPAHTCSASLKDWFSLSQGEQPVETCGVSQSEMTSCSISSSFSDPDGNMMAFNPVNCDVDTVSKQDDKIIDSKSMLTPYFDNVTGYGVGLGANHNSSAMSVFFNNSNSLSDSADNYVSSAQDCYNTSGTSLSDHTPNSVQNFAFEFFPNKEEAVNDVESGVSESQSDGASRMIFDRHGRVDNGSLERKPPIDFSSARGISFKFESNPSVSPACVKPYNSFDSHLADSDLDRPNNYSCSFQDNKTVHVKVKPEAESEKVVYSSVPGEFSVRDDAYLSGETNRWWSGASSSAVSYQTDIEKGYSYMAPQTALPSQDSGKISSNHFYDSDTCLQYVVEDPSPVTQNNEYKDFQIQQGDREYIQPRGIDSQFSNASFESVQSHSSECISDSDDDSDVCIIEPYGQSAIPHRPLAMKMPVVSSEYSTVSHNFNQSGGLKLQSNKENMIFQAALQDLTQPNSEAILPDGVLTVPLLRHQRIALSWMAQKETSGFPCSGGILADDQGLGKTVSTIALILKERSKPAQACEESTKKEIFDLESETGECAPLKPSGRSKHFEHSQLLSNENKVGGDSVGKVTGRPAAGTLVVCPTSVMRQWADELHKKVTSEANLSVLVYHGSSRTKDPHELAKYDVVVTTFSIVSMEVPKQPLVDDEDEEKDGVHDGGTAATGFCSNKKRKYPPDSKKKGSKKKKVEFLSGPLAKVSWFRVVLDEAQSIKNYKTQVARACWGLRAKRRWCLSGTPIQNSIDDLYSYFRFLKYDPYSSYVLFCSTIKNPITRNPVKGYQKLQAILKTVMLRRTKGSLLDGKPIISLPPKSIELRKVDFTVEERDFYSKLEAESRTQFREYAEAGTVKQNYVNILLMLLRLRQACDHPLLVNGEYSFTWESSVGLAKKQIQSDASLAICGICNDAPEDAVASVCGHVFCKQCIYERLTGDSNHCPFANCNVRLTISSLSSKTRLDDAMPDMQERATSNSLSPCSDEDLPYGSSKIKAALEILQSLPKAHDLTDSNQISENREYSGLSITPVKNEGMSVDVPIKVAGEKAIVFSQWTKMLNLLEASLVSSHIQYRRLDGTMSVAARDKAVQDFNTLPEVTVMIMSLKAASLGLNMVAACHVLMLDLWWNPTTEDQAIDRAHRIGQTRPVTVVRFTVKDTVEDRILALQQKKRMMVASAFGEDEKGSRQSHLTVEDLSYLFMADS

SEQ ID NO: 915 - protein, 1132 aa, Arabidopsis thaliana
  Clone ID: AT_K7M2.C1.p9.tg
MDMTSCVARRTRSRTESYLNSILNKSKGISGEEEDQSLGCVNSRTEKRRVNMRDACSPSPRKKKRRRRKDDDDDVVFVRTEYPEGKRDDENVGSTSGNLQSKSFDFGDRVCDFDADDRNLGCEEKASNFNPIDDDDDVVFVGTVQRENDHVEDDDNVGSASVISPRVCDFDEDDAKVSGKENPLSPDDDDDVVFLGTIAGENQHVEDVNAGSEVCDILLDDANLRGEEKTYVSDEVVSLSSSSDDEEDPLEELGTDSREEVSGEDRDSGESDMDEDANDSDSSDYVGESSDSSDVESSDSDFVCSEDEEGGTRDDATCEKNPSEKVYHHKKSRTFRRKHNFDVINLLAKSMLESKDVFKEDIFSWDKIAEVDSREDPVVRESSSEKVNEHGKPRERRSFHRVREKNHLNGESFYGGEKLCDGEETINYSTEDSPPLNLRFGCEEPVLIEKTEEEKELDSLWEDMNVALTLEGMHSSTPDKNGDMLCSKGTHDFVLDDEIGLKCVHCAYVAVEIKDISPAMDKYRPSVNDNKKCSDRKGDPLPNRLEFDASDPSSFVAPLDNIEGTVWQYVPGIKDTLYPHQQEGFEFIWKNLAGTTKINELNSVGVKGSGGCIISHKAGTGKTRLTVVFLQSYLKRFPNSHPMVIAPATLMRTWEDEVRKWNVNIPFYNMNSLQLSGYEDAEAVSRLEGNRHHNSIRMVKLVSWWKQKSILGISYPLYEKLAANKNTEGMQVFRRMLVELPGLLVLDEGHTPRNQSSLIWKVLTEVRTEKRIFLSGTLFQNNFKELSNVLCLARPADKDTISSRIHELSKCSQEGEHGRVNEENRIVDLKAMIAHFVHVHEGTILQESLPGLRDCVVVLNPPFQQKKILDRIDTSQNTFEFEHKLSAVSVHPSLYLCCNPTKKEDLVIGPATLGTLKRLRLKYEEGVKTKFLIDFIRISGTVKEKVLVYSQYIDTLKLIMEQLIAECDWTEGEQILLMHGKVEQRDRQHMIDNFNKPDSGSKVLLASTKACSEGISLVGASRVVILDVVWNPSVESQAISRAFRIGQKRAVFIYHLMVKDTSEWNKYCKQSEKHRISELVFSSTNEKDKPINNEVVSKDRILDEMVRHEKLKHIFEKILYHPKKSDMNTSFF

SEQ ID NO: 916 - protein, 1178 aa, Arabidopsis thaliana
  Clone ID: AT_MXM12.C1.p5.tg
MEVSEEQRRRDEATRLAFAEKRKQSFDSSENPQRQQDFRLAKCRKLDGSNDVCPQEGYRNYEPVRVLSTSVPEKFRVRLEICSPDSFSVTPVQLQGFRCPEEQECLRQLRKILSDAIPLHYTQNDDGGKAGVYKIRDYNKVSGCLKRSKSVEVEGVPWKTLAVVEKLSQSYISGKWQPCLPEHYTEEKVEQLIETLPRKLVNALLPFQLDGLRFGLRRGGRCFIADEMGLGKTLQAIAIAGCFISEGSILVVCPAVLRFTWAEELERWLPSCLPSDVHLVFGHQDNPAYLPRWPKVVVISYKMLQHLRTTMLEREWALLIVDESHHLRCSKKKSDPPEIKTVLDVAEKVKHIILLSGTPSVSRPGLLGKDKYEFAKTYCEVGLVRGIQGKIFQDFSKGTRLLELNILLNQTVMIRRLKQHLLTQLPPKRRQIVTILLKKSDIALAMAIVSEAKKQKDGAIAEVTEKSHEPDQNARGSNEAGHVNAENSDGPNSDKENQLCGKLSYQQLGIAKLSAFREWLSLHPLLSGLDYTPEEIDGDRSSTKMVVFAHHHKVLDGIQEFICDKGIGFVRIDGTTLPRDRQLAVQSFQFSSEVKIAIIGVEAGGVGLDFSAAQNVVFLELPKTPSLLLQAEDRAHRRGQTSAVNVYIFCAKDTMDESNWQNLNKKLHRISSTTDGKYDGKTEIEIGGASIFKPAEESSEREVLEGQPSESNTVVADKIVESCDDPGTETDVSNTIDLKDDMTSQLEILEVCPFVENGSGSGMRSSGTISLTMLAQENQENHKPKNLIADDGLVKEVDSSSIFPLIDSLRFEVSQNTGRIHLYSCIPGKDPRPRPHFQNFRPEEIEASNPSQGTTKEKNPESITDDPVHVLAILEFMKEWKSLRPIEKRKLLGKPLQLPLSLELSYLSESTSHNSEGLLRGGSKRRNTPFSEISIPLPENAVWIKVNLRSGHQRKEKEYTQAWSMSNEPLCKLCQKPCAGYNAKEPEYLEDLFCELACYEDYRTRTSSRYIRQIEHGICTNCKLDCHQLVKRLRPLPLEKRRTYINKAAPELFARKNLLETLVNDPTEGNAWHADHIIPVYQGGGECRLENMRTLCVACHADVTAAQCAERKLIRSKARKQLKNTLNELRNNPKQKDLSADENTKETDSATNEEEDELMIEVPGSAYSIDQKINHDAS

SEQ ID NO: 917 - protein, 476 aa, Arabidopsis thaliana
  Clone ID: AT_F27C12.C1.p6.tg
MDAKRKLSQEKDMYQNDDKRKKVVALENQEAGGSCIDGNVAHWFSKTKFNGLVNVPIVYLALEENIVKNDLTLRSSLKHVIFGGSSGGSNSGKGLAKDLYLDGNELVEVHVRSDREINMMKDKGKAIFDLNEAVWPRDEAVSNTFEDHPLPPGFGSNICKDIKMRVPKDGFSGTGIFPHPLHKMIMKPHHFEIFNFLCKNLVVENSNGCIIAQTPLSEKTFLMISFIYGYLEKHPNSKPLFVLPKWVLNFWKTKFGELKVNDLVLLDFYSAKASTRSQQLEVLNRWIKTRSIIFLGAKQFSNIISDNSGAEASDSCRDILLNIPSVVVFDRGTDPRNEMMSFLKVVARIKTPHKVLLTGSLYQNNIKEVFNILDVVFPEFLKHNRIGKNIRKFLNVEADGPSTNLKMPLFDKLEEALLSQDSDHGDKISYLTELRMLTNKFIYNHKEEFLLEVPGLMDFTVVLKPTLSQKSAWEIE

SEQ ID NO: 918 - protein, 1029 aa, Arabidopsis thaliana
  Clone ID: AT_MDJ22.C1.p17.tg
MGTKVSDDLVSTVRSVVGSDYSDMDIIRALHMANHDPTAAINIIFDTPSFAKPDVATPTPSGSNGGKRVDSGLKGCTFGDSGSVGANHRVEEENESVNGGGEESVSGNEWWFVGCSELAGLSTCKGRKLKSGDELVFTFPHSKGLKPETTPGKRGFGRGRPALRGASDIVRFSTKDSGEIGRIPNEWARCLLPLVRDKKIRIEGSCKSAPEALSIMDTILLSVSVYINSSMFQKHSATSFKTASNTAEESMFHPLPNLFRLLGLIPFKKAEFTPEDFYSKKRPLSSKDGSAIPTSLLQLNKVKNMNQDANGDENEQCISDGDLDNIVGVGDSSGLKEMETPHTLLCELRPYQKQALHWMTQLEKGNCTDEAATMLHPCWEAYCLADKRELVVYLNSFTGDATIHFPSTLQMARGGILADAMGLGKTVMTISLLLAHSWKAASTGFLCPNYEGDKVISSSVDDLTSPPVKATKFLGFDKRLLEQKSVLQNGGNLIVCPMTLLGQWKTEIEMHAKPGSLSVYVHYGQSRPKDAKLLSQSDVVITTYGVLTSEFSQENSADHEGIYAVRWFRIVLDEAHTIKNSKSQISLAAAALVADRRWCLTGTPIQNNLEDLYSLLRFLRIEPWGTWAWWNKLVQKPFEEGDERGLKLVQSILKPIMLRRTKSSTDREGRPILVLPPADARVIYCELSESERDFYDALFKRSKVKFDQFVEQGKVLHNYASILELLLRLRQCCDHPFLVMSRGDTAEYSDLNKLSKRFLSGKSSGLEREGKDVPSEAFVQEVVEELRKGEQGECPICLEALEDAVLTPCAHRLCRECLLASWRNSTSGLCPVCRNTVSKQELITAPTESRFQVDVEKNWVESSKITALLEELEGLRSSGSKSILFSQWTAFLDLLQIPLSRNNFSFVRLDGTLSQQQREKVLKEFSEDGSILVLLMSLKAGGVGINLTAASNAFVMDPWWNPAVEEQAVMRIHRIGQTKEVKIRRFIVKGTVEERMEAVQARKQRMISGALTDQEVRSARIEELKMLFT

SEQ ID NO: 919 - protein, 327 aa, Arabidopsis thaliana
  Clone ID: AT_T8N9.C1.p103.tg
MRVPKDGFSGTGIFPHPFHKMIMKPHHFEILNFLYKNLVVENSNGCIIAQTPLSEKTFLMISFIYGYLEKHPNSKSLFVLPKWVLNLEVLKRWIKTWSIIFLGAKQFSNIVSDNSGAEASDSCRDILLNILSVVVFDRGTDPRNEMMSFLKVVSRIKTPHKVLLTGSLYQNNIKEVFNILDVAFPEFLKHNQIGKNFRKLLNVEADGPSTNLKMPLFDKLEEALLSQDSDHGDKICYLTELKMLTNKVIYNHKGECLLEVPGLMDFTVVLKPTSSQKSAWEVERKSNGKGFKKYSTLSGIMLHPLLCAFSDRAKGLPAPNEDEMDEM

SEQ ID NO: 920 - protein, 675 aa, Arabidopsis thaliana
  Clone ID: AT_F11A17.C1.p28.tg
MDDFWDLTVEEMDAIENEALQRINQQRNSSSSSSLPIPNEVFPQSLSLSLGDFVAVHTSSQGARILPSTLAPKPNTVLVSVPIDAGSKPQEQKVSVKILLHSSGVLAAKFPYNQVVVDAVRKIPKAIWNAKESPGYGPFLILHCLQQKIFYEKFPALKLRHRVCQPYVVPVVFLYYQMSSNLLWLPDDFCLIIGLHLSRKAIAVTTCVQESWPVLIIAPSSLRLHWATVSLRYLNSTWTLFMTLEMIHNAAFLQMIHQWLHVPPSDIVVVLPQPGGSNKCGFTIVSSNTKGTIHLDGVFNIVSYDVVTKLDKLLMALDFKVVIADESHFLKNGQAKRTSACLPVIKKAQYAILLSGTPALSRPIELFKQLEALYPDVYRNIHEYGGRYCKGVSPLHIEKLPRSSYKGFFGTYQGASNHDELHNLMKATVMIRRLKKDVLTELPSKRRQQVFLDLAAKDMKQINALFHELKVVKSKIKDCISEDDIKSLKFIEKNLINKIYTDSAVAKIPAVLDYLENVIEAGCKFLVFAHHQSMLEELHQFLKKKKVGCIRIDGSTPASSRQALVSDFQDKDEIKAAVLSIRAAGVGITLTAASTVIFAELSWTPGDLIQAEDRAHRIGQVSSVNIHYLLANDTVDDIIWDVVQSKLDNLGQVYSFSMSLHMERKSLGVKYTSII

SEQ ID NO: 921 - protein, 120 aa, Arabidopsis thaliana
  Clone ID: AT_F15P11.C1.p20.tg
MFKKALELSTLCNIEVCVIYYGRDGELFKTWPEDESKVRDMAERFTKLNERERRKKRTNLSLFLRKKILDDNKLSGKVLEMKDSLERGLRVLQDKLLLLQPENQTKSLTRSVSSLDYVFV

SEQ ID NO: 922 - protein, 165 aa, Arabidopsis thaliana
  Clone ID: AT_F9L11.C1.p29.tg
MPMRKEGITKKLYELATLCDIKACAGKISEHQYGARDLQDLSFHIDHYINQLNSRVKILTNNGESSSSVPPLLHTSVAGAGAAPLPVAGADLPMDQNQYEPIQLYIPIGLSYHIQYQHEIYDNFKHAHILFMNGNYYNYHQTPTVGLTTTGHMPSNNNTTPTTDV

SEQ ID NO: 923 - protein, 119 aa, Arabidopsis thaliana
  Clone ID: AT_T1G16.C1.p140.tg
MKKVHELSTLCGITSCAIIYSPYDTSHEVWPSNSGVQRVVSEFRTLPEMDQHKKMVDQEGFLKQRIAKPTENLRRQRKDNKELEMTEVMFRCLIGNMEMLKSESQSESTTMVYENDEPS

SEQ ID NO: 924 - protein, 310 aa, Arabidopsis thaliana
  Clone ID: AT_T1P2.C1.p16.tg
MATPSSSFWNTASREAMKSGVLLAKLYCFLHVTTNYLGFMAYAYGPSMTPTLHPSGNVLLAERISKRYQKPSRGDIVVIRSPENPNKTPIKRVIGIEGDCISFVIDSRKSDESQTIVVPKGHVFVQGDYTHNSRDSRNFGTVPYGLIQGRVLWRRRNGIYTKLSELSILCGAEVAFLGYSCSGKPYTFGSPSFQAVAERFLNGEASSSSSSSLQRSVMNAHQQAKIQELCKVYNRLVEEITVEEVKLKKTAALAEMMPMNEDAWWKVDPNDVKDREEVKKMMEKHQELYEKLCEEAASRIKRGHDENNNK

SEQ ID NO: 925 - protein, 157 aa, Arabidopsis thaliana
  Clone ID: AT_F15P11.C1.p60.tg
MDSSTSTKKNTKLFVRNQTCFKKSSLSSSNAKKTTNLSMREQTMFKKALELSTLCDIEVCVIYYGRDGKLIKTWPEDQSKILHDKKLSEKVLEMEDSLESGLRVLQDKLLLLQPEKNQTELGQSCAVYSTTYPLSSPSLIEDHQHQQQWTEPLSNTE

SEQ ID NO: 926 - protein, 385 aa, Arabidopsis thaliana
  Clone ID: AT_MSN9.C1.p20.tg
MTMRSLPFSSSSYSLASTSLSNRLETIFKKASELCTLCDIEACVIYYGPDGELKTWPKEKEKVRDIALRYSQLNEALRSKKSVNLHGFLNKKKKKKKKGLKNPNNKRKTCLKKNVNVLKYPLADHYPPDQVSQLTQSLKLHVSKFQERLRFLESQKQTKPDHQSLTPSSLNHQTQSLNPRQFSLFMYNHGDNTLSQISVSASNFNQNYFSALLEQSELKNQLMKQDGYDQNQNMRMGDITNNNFQLPYFSKKEAVQESVNYFGMNQLMLKELYGCDQNMCMGNINSNSFQHPCVSKAQHYSAVEGSVNNQRQSELMQQELCGYEQNMCFTNNNFQVSNKEAVQESVTNFGLMQHELYGCDQNMSMGNIINNSFQQRLKHRTRICE

SEQ ID NO: 927 - protein, 330 aa, Arabidopsis thaliana
  Clone ID: AT_MEE6.C1.p27.tg
MTMRSSSPSSSSSYSLAFTSLSNRLETIFKKASELCTLCDIEACVIYYGPDGELKTWPKEKEKVRDIALRYSLLNEALRRKKSVNLHGFLNKKKNKGLKNPNKKMKTSLKNVNILKYPLADHYPPDQVSPLIQSLELHVSKFQERLRFLESQKQNQTKPDHQSLTPSSLNHYTQSLNPSQFSLFMYNHGDNTLSQIPVSASNFNQDYFSALLEESELKNQLMKPEICGYDQNQNMSMGDITNNKFQDPCVSNKEAVQESVNNFGLNQLMYKEFYGCDQNMSMGNINSNSFQNPCVSNTQHYSAVEESVKNPWLNQLMQNELYGYGYAGFC

SEQ ID NO: 928 - protein, 341 aa, Arabidopsis thaliana
  Clone ID: AT_MNA5.C1.p6.tg
MKQASSSSSSRNSTSLTNRLKTIFKKAEELSILCAIEVCVIYYGPDGELRTWPKERETVKDMALRYKEARKRKKSRNLHEFLEKEKDKDKGKTNLKKNWYPNFDHYSPQQLSQLIQSLERTLSTLQERLRIVEAQKLQNTNLVHQSLTPSYLNQTQHLNPSKFSLFMYNHGDATLSQLPLSAPHSNQLINYQNHLMQHGFGQNMCSDNITNNNFEHPGVSNTQDYSPLLSVQASAVNNYGLNNHLMQQQDQLHGFDQNMCMVSEIINNNNGLQHPNLSNTVPHEFSSDFNQNPYGNAVGNISFSQDMFSSYDASSLLQTSSLPPLHNIPSSYCFPGNSRLL

SEQ ID NO: 929 - protein, 223 aa, Arabidopsis thaliana
  Clone ID: AT_F15A18.C1.p40.tg
MDSSMSTKKKTKLSVRNQTCFKKSSLSSSSTAKKTTNLSMREETMFKKALELSTLCDIEVCVIYYGRDGELIKTWPEDQSKVRDMAERFSKLHERERRKKRTNLSLFLRKKILDDNKLSEKVLEMKDSLESGLRVLQDKLLLLQPENQTELGQSRAVSSTTNPLSSPEDHHHQQWTEPLVTGVSNTEQDLSTSPLSNHQSKYSVFVYNHDSGSFYQVPDSICF

SEQ ID NO: 930 - protein, 287 aa, Arabidopsis thaliana
  Clone ID: AT_F15P11.C1.p40.tg
MDSSMSTKKKTKLSVRNQTCFKKSSLSSSSTAKKTTNLSMREQTMFKKALELSTLCNIDVCVIYYGRDGKLIKTWPEDQSKVRDMAERFSRLHERERCKKRTNLSLFLRKKILDDTKLSEKVLEMEDSLESGLRVLQDKLLLLQPEKNQTEFGQTRAVSSTTNPLSPPPSLIEDHRHQQWTEPLMSGVSNTEQDLSTSSLSQNQSRISVFLYNHDNRSFYQVPDSVSSFDQSALLGEQGSGLGSNFDLPPMVFPPQMQTQTPLVPFDQFAAWNQAPSFADPMMFPYN

SEQ ID NO: 931 - protein, 289 aa, Arabidopsis thaliana
  Clone ID: AT_F2P16.C1.p210.tg
MDSSMSTKKKTKLSVRNQTCFKKSSLSSSSTAKKTTNLSMREQTMFKKALELSTLCNIDVCVIYYGRDGKLIKTWPDDQSKVRDMAERFSRLHERERCKKRTNLSLFLRKKILDDTKLSEKVLEMEDSLESGLRVLQDKLLLLQPEKNQTEFGQTRAVSSTTNPLSPPPSLIEDHRHQQRTEPLMSGVSNTEQDLSTSSLSQNQSKFSVFLYNHDNCSFYQVPDSVSSFDSLTSTGLLGEQGSGLGSSFDLPMVFPPQMQTQTPLVPFDQFAPWNQAPSFADPMMFPYN

SEQ ID NO: 932 - protein, 426 aa, Arabidopsis thaliana
  Clone ID: AT_MKD10.C1.p40.tg
MTTIRSSPSSSRCSNSSSSSSYSLASTSLSNRLETIFKKASELCTLCDIEACVIYYGPDGELKTWPKEREKVRDIALRFNQLNEALRHKKSVNLHGFLNKKKKNKGLKNPNKKKKTSLKNVNVLKYPLADHYSPDQVSQLTQSLELNVSKFQERLRFLESQKQNETKPDHQSLTSISSLNQSLNPSQFSLFMYNHGYNTLSQIPVSASNFNQDYISALLEQSELKSQIMKQEVCGYEQNMCMSNHGDATLSQIPFSASNFNQDFSANNNFQHSFVSNTQDYYSVQKSVNNNYGLKNQLMKHDLCGYEHNMCMSNHGDATFSQIPLSASNFNQDFSVSIQEESGLMQQELCGYDQNQNMSMGDITNNNFQVTCASVLESVNNFGLNQLMHKEFYGCHQNMSMGNINNNSFQHPWVSNADHTRRYKNL

SEQ ID NO: 933 - protein, 284 aa, Arabidopsis thaliana
  Clone ID: AT_T2K10.C1.p9.tg
MAPRQKKPNKSDDDDGDLHRKKQSFFKQRFPGFKKKASELSVLCGNSVGFICYGPDNDLHVWPQSQDHNPQALHEIVAKFNALSDERRKNHACDLNDFPHHLKGLSREELRKHLLHLDSQLLGVREQKIEILKKTLTGSSEKDGARVSENSAISDHKLKIEPNLTDILSEDHLIRVSDKKLGSCDVFDELAYVVRGSRNLNENVSNYESKDAAYTGMDHLGTFGGNYLQEAAAELYQTYNLGNFCDDHVWDLEFASRLPPLHTFSDPLMTTNTCQTMSSDMISI

SEQ ID NO: 934 - protein, 283 aa, Arabidopsis thaliana
  Clone ID: AT_F23H11.C1.p13.tg
MAPRQKKPNKSDDDDDLRRKKQSFFKQRFPGFKKKASELSVLCGNSVGFICYGPDSDLHVWPQSQDHNPQALHEIVAKFNALSDERRKNHACDLNDFPHHLKGLSREELRKHLLHLDSQLLGVREQKIEILKKTLTGSSEKDGARVSENSAISDHKLKIEPHLKDILSEDHLIRVSDKKLGSCDVFDELAYVVRGSRNLNENVSKYESKDADNTGLDHLVTLGGDYLQEAAAELYQTYNLGNFCDDHVWDLEFASRLPLLHTFSDPLMTTNTCQTMSTDMISI

SEQ ID NO: 935 - protein, 355 aa, Arabidopsis thaliana
  Clone ID: AT_MKM21.C1.p40.tg
MAIRSLPSSSRCSSSSSSSSYSLASTSLSNRLETIFKKASELCTLCDIEACVIYYGPDGELKTWPPEREKVEDIALRYSQLNEALRRKKSVTLYDFLNKKKDKTNLEKKAKITDNDDLKTCLKNVNILKYPLADHYSPDQVSQLIQSLEPHVSKVRERIRFVESQKHKETKPDHQSLASSSLNHQTQSLNPSQFSLFMYNHGDNTLSQIPVSASNFNQDYFSALLEQSELKSQIMKQDLCGYEQNMCMSNHGDATLSQIPLSASNLNQDFSALLQDESGLMQQELCGYDQNMFMNNNNFQHSFVSNTQDHSAPVVQESVNNNYGLMPHVPCGYDQNLFTSDITNNNLLINNSMFL

SEQ ID NO: 936 - protein, 329 aa, Arabidopsis thaliana
  Clone ID: AT_F8L21.C1.p40.tg
MKQASSSSSCNPTSLTNRLKTIFKKAEELSILCAIDVCVIYYGPDGDLRTWPKDRETVKNMALRYKEDRKRKKCLNLHEFLEKEKVKDKDKYKGKTNYVKNPNWYPNFDHYSPQQLSQLIQSLERTLSTLQKRLRIVESQKKQNTNLVHQSLTPSYLNQTQHLDPSKFSLYMYNHGDATLSQLPLSASQSNQLINYQMQHGFGQNMCLDNITNNNNFQHPGVSNTQDYSPLLSANNYGLNNHLMQQQDQLHGFDQNLCMMSEIINNNNGLQHPNLSNTVPHEFPYGNTSFSQDMFSSYDGSSLLQTSSLPPLHNIPNSYCFSDNSRLLC

SEQ ID NO: 937 - protein, 329 aa, Arabidopsis thaliana
  Clone ID: AT_MKM21.C1.p100.tg
MAIRSLPSSSGCSNSSSSSSYSLASTSLSNRLETIFRKASELCTLCDIEACVIYYGPDGELKTWPPEREKVEDIALRYSQLNEALRRKKSVTLYDFLNKKKNKTNLEKKAKIKDNDLKRLSLEPHVSKVRERIRFVESQKHKETKPDHQSLASSSLNNQTQSLNPSQFSLFMYNHGDNILSQIPVSASNFNQDYFSALLEQSELKSQIMKQEVCGYEQNMCMSNNGDATLSQIPLSASNFNQEFSALLQEESGLMQQELCNYDQNMFMNNNNFQHSFVSNTQDHSAPAVQESVNNNYGLMPHVPCGYDQNLFTSDITNNNLLIDNSMFL

SEQ ID NO: 938 - protein, 226 aa, Arabidopsis thaliana
  Clone ID: AT_T8F5.C1.p14.tg
MVKKTLGRRKVEIVKMTKESNLQVTFSKRKAGLFKKASEFCTLCDAKIAMIVFSPAGKVFSFGHPNVDVLLDHFRGCVVGHNNTNLDESYTKLHVQMLNKSYTEVKAEVEKEQKNKQSRAQNERENENAEEWWSKSPLELNLSQSTCMIRVLKDLKKIVDEKAIQLIHQTNPNFYVGSSSNAAAPATVSGGNISTNQGFFDQNGMTTNPTQTLLFGFDIMNRTPGV

SEQ ID NO: 939 - protein, 298 aa, Arabidopsis thaliana
  Clone ID: AT_T21B4.C1.p40.tg
MKKGTKRKIEIKKRETKEQRAVTCSKRRQTVFSKAADLCLISGANIAVFVTSPSDSSDVVYSFSGYSSAYEIADCYLNRKPPPKIVNPAGSKLGFWWEDPDLYHSCDDLSELSIIEDRLQRMKKHVMACLEKEEKSQLVSSFDQNPNSTCSLDVEDCDGSSYSQIASTFTPNSVNEYCSDQTFSSFHGDQNPNLSSPSFDQDCYSSLYQICGESSSQVASFDQNPSSEIQGFETEEEINQINLLLQETQTEANVNLDDEICFWNDLSNDDVFGLNSYFGLDNTNAMINFGDSDFRRHV

SEQ ID NO: 940 - protein, 277 aa, Arabidopsis thaliana
  Clone ID: AT_MDF20.C1.p13.tg
MGRKMVKMTRITNEKTRITTYKKRKACLYKKASEFSTLCGVDTCVIVYGPSRAGDEMVMEPELWPKDGSKVREILTKYRDTASSSCTKTYTVQECLEKNNTKVEKPTIATKYPTWDKKLDQCSLNDLYAVFMAVENKIQEATNRNQTFPDTSCWSNDQLGLCGYNRQCFEQYQLFPLPTMDYNGLSFFPFNNQMTSNTAEVSSFSNVTEPMIANGQSLFYGSCSDGPYGPMVQRTAYMEPIHWGLGNSMFNNVKQFQDYPFRFAQVNDLEDSSKLSM

SEQ ID NO: 941 - protein, 217 aa, Arabidopsis thaliana
  Clone ID: AT_T13M22.C1.p2.tg
MKDLFMEGERETSSMTCLTPKDSVQSPNMLVRQPKKETTTQTPKTTRGRQKIEIKKIEEETKRQVTFSKRRRGLFKKSAELSVLTGAKIAVITFSKCDRIYRFGHVDALIDKYLRKSPVKLEGYSGDNAADEESRRPWWERPVESVPEEELEEYMAALSMLRENIGKKIVAMGNDRTVDMVPAWPINVMGWKPTMDMQKLENLTDGVNRCRVGQNGD

SEQ ID NO: 942 - protein, 339 aa, Arabidopsis thaliana
  Clone ID: AT_F27M3.C1.p17.tg
MRSKIKLSLIANKTSRRTTFRKRKGGITNKLHELTTLCGVKACAVISSPYENPVVWPSTEGVQEAVSMFMERPATEQSKLMMSHETYLQDKITKETKKLESLRRENRESQLRQFMFDCVEGKMSEHQYGARDLQDLSLYIDHYINQLNSSVMLLTNNGASSSSFPPPLHTSVAGAGAGAGAAPLVVAGAGAAPLAVAGAGASPLAVAGVGAAPLAVAGAGPPMAQNQYEPIQPYIPTAFSDNIQYQAPVDFNHQIQHGIYDNLSLDPNHQYPFQDDPFMEMLMEYPYEQVGYAAEHAHIPFMNGNYYNYHQPPTVGLTTTGHMPSNNATTTTTTNTTVV

SEQ ID NO: 943 - protein, 163 aa, Arabidopsis thaliana
  Clone ID: AT_F12K8.C1.p31.tg
MGRRKVTHQLISDNATRRVTFRKRKDGLLKKIYELTVLCGLPACAIIYSEYKDGPELWPNLNEVRSILNRLSELPVEKQTKYMMDQKDLMNKMIQDAEKKLEKEKMHTRAMKLGLMAGSNDLITDTDCSEELARAADVVDKKLKAIRERIKAVEAGAPIIKRD

SEQ ID NO: 944 - protein, 327 aa, Arabidopsis thaliana
  Clone ID: AT_F21E10.C1.p10.tg
MGMKKVKLSLIANERSRKTSFIKRKDGIFKKLHELSTLCGVQACALIYSPFIPVPESWPSREGAKKVASRFLEMPPTARTKKMMDQETYLMERITKAKEQLKNLAAENRELQVRRFMFDCVEGKMSQYHYDAKDLQDLQSCINLYLDQLNGRIESIKENGESLLSSVSPFPTRIGVDEIGDESFSDSPIHATTGVVDTLNATNPHVLTGDMTPFLDADATANMNQVQYQAPNNLFNQIQREFYNINLNLNLNLNSNQYLNQQQSFMNPMVEQHMNHVGGRESIPFVDGNCYNYHQLPSNQLPAVDHASTSYMPSTTGVYDPYINNNL

SEQ ID NO: 945 - protein, 79 aa, Arabidopsis thaliana
  Clone ID: AT_F10D13.C1.p25.tg
MGRVKLKIKKLQNMNGRQCTYTKRRHGIMKKAKELSILCDIDVVLLMFSPMGKASICIGKHRSDHTFFLIPKYLSHCSV

SEQ ID NO: 946 - protein, 211 aa, Arabidopsis thaliana
  Clone ID: AT_F21E10.C1.p9.tg
MTFIENETARKSTFKKRKKGLLKKAQELGILCGVPIFAVVNSPYELNPEVWPSREAANQVVSQWKTMSVMDKTKKMVNQETFLQQRITKATESWKKLRKENKELEMKNIMFDCLSGKTLVSSIEKTELRDFGYVIEQQLKDVNRRIEILKRNNEPSSALVPVAAPTTSSVMPVVEMGSSSVGFYDKVRDQIQITLNMKQTTNDLDLNKKQW

SEQ ID NO: 947 - protein, 242 aa, Arabidopsis thaliana
  Clone ID: AT_F15M7.C1.p3.tg
MARKKVRAAWIRDDRMRRASLKRRLTGLIKKVNELSILCDMRASVVVFNREEEQLTAWPSPEAANSLIDNFYSLTDHERTMKAVDPESYVQTVIEKIEKKRADTRKVITEFEMDELMFQVQNGRELADLSPTEADKLIPYADKKLMWLSKRMGSTGVDALRASNVASGSGGNGLNMMETGRSFYYVDKWVFVDPQVQNPCDVETHLPTMVSGLDLNMEPSDEDLGTYKGESSMAGGAEDDAE

SEQ ID NO: 948 - protein, 363 aa, Arabidopsis thaliana
  Clone ID: AT_F15F15.C1.p30.tg
MGMKKVKLSLIANERSRKTSFMKRKNGIFKKLHELSTLCGVQACALIYSPFIPVPESWPSREGAKKVASKFLEMPRTARTRKMMDQETHLMERITKAKEQLKNLAAENRELQVRRFMFDCVEGKMSQYRYDAKDLQDLLSCMNLYLDQLNGRIESIKENGESLLSSVSPFPTRIGVDEIGDESFSDSPIHSTTRVVDTPNATNPHVLAGDMTPFLDADANAVTAPSRFSDHIQYENMNMSQNLHEPFQHLVPTNVCDFYQNQNMNQVQYQAPNNLFNQIQREFYNINLNLNLNLNSNQYLNQQQSFMNPMVEQHMNHVGGRESIPFVDRNYYNYNQLPAVDLASTSYMPSTTDVYDPYINNNL

SEQ ID NO: 949 - protein, 182 aa, Arabidopsis thaliana
  Clone ID: AT_F3M18.C1.p10.tg
MNPKKTKGKQKINIKKIEKDEGRSVTFSKRLNGIYTKISELSILCGVEVAFIGYSCSGKPYTFGSPSFQAVAERFLNGDASSSSSSSLVMNAHKQAKIQELCKKYNRLVEELKVDEVKVKKAAALAETRVVNKDVWWKVDPNDVKDHEKAKKMMEKYQELYDKLCEQAASRIKRGHDENNNK

SEQ ID NO: 950 - protein, 279 aa, Arabidopsis thaliana
  Clone ID: AT_T8F5.C1.p11.tg
MRGKMKLSFIENDSVRKTTFTKRKKGMLKKFNELVTLCGVDACAVIRSPYNSIQEPWPSREGVEEVMSKFMEFSVLDRTKKMVDQETFLRQRIAKETERLQKLRDENRNSQIRDLMFGCLKGEVDVSHLHGRDLLDLNVFLNKYLNGVIRRVEILKENGESSSSVPPPIGVAPTVVDASVPIGFDGRMIQDQNQNQQEPVQFQYQALYDFYDQIPKKLHDFNMKMNIDPNQSMNLDLNDGEDEGIPCMDNNNYHPEIDCLATVTTAPTDVCAPNIINDL

SEQ ID NO: 951 - protein, 304 aa, Arabidopsis thaliana
  Clone ID: AT_F21E10.C1.p14.tg
MGMKKVKLSLIANEISRETSFMKRKNGIMKKLYELSTLCGVQACTLIYSPFIPVPEFLEMSPTARTRKMMNQETYLMERITKAKEQLQNLVGANQELQVRRFMFDCVEGKMSQYRYDAKDLQDLLSCINLYLDQLNGRIEILKEHGDSLPSVSPFPTRIGVEETGDESSSDSPILATTGVVDTPNATNPRVLVADTTHFLDANATANMNQVQYQAPPNDMFNQIQREFYNINLNQKSNQYMNQQQPFMNPMVEQHMSHVGGRESIPFMDGNYYNYNQLPVVDHGSTSYMPSTTGVYDPYFNNNL

SEQ ID NO: 952 - protein, 386 aa, Arabidopsis thaliana
  Clone ID: AT_MVE11.C1.p1.tg
MASSSSSSLSFSTSKKNKTFFKKPNSAFSSSRATSLIKRQQTVFKKAKELSILCDIDVCVICYGSNGELKTWPEEREKVKAIARRYGELSETKRRKGSVDLHEFLEKMNKDDPEKEEKKKIKVRRVPKVKYPVWDPRFDNYSVEQLMGLVQSLERNLTRIQHRTCAVVEAQGQRRVQYTNMANQELMMANTMNQLQQHSNQVSMYLWNHGNGAFSQIPVSALASNQTQSLAPIPPELMIYPNSDAGNYSGSLGVQGTGINGLQNMNMLTYNNINSVNDFSKQFDQNSRAESYSSLLGVHEDGNNEFENPNMSSRNNFNVQDCAGLLGMQGAGTNGLQSMNMHDYSNNNSINSNGLSHQYVQFPTYNSQHQDRVFNLDQNGNNTRSL

SEQ ID NO: 953 - protein, 335 aa, Arabidopsis thaliana
  Clone ID: AT_F2E2.C1.p14.tg
MGRVKLEIKRIENTTNRQVTFSKRRNGLIKKAYELSILCDIDIALIMFSPSDRLSLFSGKTRIEDVFSRFINLPKQERESALYFPDQNRRPDIQNKECLLRILQQLKTENDIALQVTNPAAINSDVEELEHEVCRLQQQLQMAEEELRRYEPDPIRFTTMEEYEVSEKQLLDTLTHVVQRRDHLMSNHLSSYEASTMQPNIGGPFVNDVVEGWLPENGTNQTHLFDASAHSNQLRELSSAMYEPLLQGSSSSSNQNNMSECHVTNHNGEMFPEWAQAYSSSALFASMQQQHEGVGPSIEEMMPAQQSDIPGVTAETQVDHEVSDYETKVPQLSSQ

SEQ ID NO: 954 - protein, 184 aa, Arabidopsis thaliana
  Clone ID: AT_T2E6.C1.p17.tg
MGRRKIEIKFIEDSIERKATFSRRRNGIFKKADELAKLCNVEIAVLVISPTNIPYTYGYPCFNDVVERIQNPSASSKLRSLMKELEQIKEFQEDLRKKQQRNLEKSNMKENVDLKLEDLVAFKAKLEAYQAGLKRKHVEMEDLSSPSILSKNTKNKMMRTEYSSGQSKGMYEFRAFGPGFLGTI

SEQ ID NO: 955 - protein, 191 aa, Arabidopsis thaliana
  Clone ID: AT_T7P1.C1.p6.tg
MGGTKRKIEMKRIEDKNVRAVAFTKRKSGLFHKASELCLLSPGTQIAILATPLSSHSHASFYSFGHSSVDHVVSSLLHNQHPSLPTNQDNRSGLGFWWEDQAFDRLENVDELKEAVDAVSRMLNNVRLRLDDAVKSNQRDGSLVIHQEDEEVLQLGYKDTNQITKLEGETSASASLLKNVVDNLHIDDRYY

SEQ ID NO: 956 - protein, 121 aa, Arabidopsis thaliana
  Clone ID: AT_F2P16.C1.p130.tg
MFKKALELSTLCDIEVCVILYSRDGELIKTWPEDQSKVRDMAERFSKLHERERRKKRTNLSLFLRKKILDNSKLSEKVLEMKDSLESGLRVLQDKLLLLQPEKNQTELGQIPVINNGQNHW

SEQ ID NO: 957 - protein, 247 aa, Arabidopsis thaliana
  Clone ID: AT_F22L4.C1.p5.tg
MARKNLGRRKIELVKMTNESNLQVTFSKRRSGLFKKGSELCTLCDAEIAIIVFSPSGKAYSFGHPNVNKLLDHSLGRVIRHNNTNFAESRTKLRIQMLNESLTEVMAEKEKEQETKQSIVQNERENKDAEKWWRNSPTELNLAQSTSMKCDLEALKKEVDEKVAQLHHRNLNFYVGSSSNVAAPAAVSGGNISTNHGFFDQNGNSTSAPTLPFGFNVMNRTPAGYNSYQLQNQEVKQVHPQYWARYY

SEQ ID NO: 958 - protein, 249 aa, Arabidopsis thaliana
  Clone ID: AT_F10A16.C1.p16.tg
MTRKKLNLSYITNESMRKATFNKRKKGLVKKIHELSVLCGIEACAVIYSPFNSNPEVWPSNSEVKNVMENFEMLTKLEQEKKMVSHEGFIRQNISKTMESNNKKMIDNAERTMKEAMFQLLSGKGEKLNLTDRNREDLCKYIDQYLKELYHHKNKTINQSHIEPGESSGATNAMTPTSVVENPNFNHLSHNQYQYQQQFGYPILVQDGIYNPSQIQNQHEEWLDDHMMNHSKEISHPLMDDNNFYYQQP

SEQ ID NO: 959 - protein, 321 aa, Arabidopsis thaliana
  Clone ID: AT_K15N18.C1.p16.tg
MTRKKVKLAYISNDSSRKATFKKRKKGLMKKVHELSTLCGITACAIIYSPYDTNPEVWPSNSGVQRVVSEFRTLPEMDQHKKMVDQEGFLKQRIAKATETLRRQRKDSRELEMTEVMFQCLIGNMEMFHLNIVDLNDLGYMIEQYLKDVNRRIEILRNSGTEIGESSSVAVAASEGNIPMPNLVATTAPTTTIYEVGSSSSFAAVANFVNPIDLQQFRHPAAQHVGLNEQPQNLNLNLNQNYNQNQEWFMEMMNHPEQMRYQTEQMGYQFMDDNHHNHIHHQPQEHQHQIHDESSNALDAANSSSIIPVTSSSITNKTWFH

SEQ ID NO: 960 - protein, 161 aa, Arabidopsis thaliana
  Clone ID: AT_T22H22.C1.p17.tg
MKTDWSHYLSVEMESTISNELSILCGAEVAFLGYSCSGKPYTFGSPSFQAVAERFLNREASSSLQRSVMNAHQQAKIQELCKVYNRMVEEAKTEEAKVKKAAALAETMPVDEDAWWKVDPKEVEDHEEAKKIMEKCEGLYEKLCNEAAARIQRGDAENNNK

SEQ ID NO: 961 - protein, 274 aa, Arabidopsis thaliana
  Clone ID: AT_T8F5.C1.p8.tg
MKLSLIENSVSRKTTFTKRKKGMTKKLTELVTLCGVEACAVVYSPFNSIPEAWPSREGVEDVVSKFMELSVLDRTKKMVDQETFISQRIAKEKEQLQKLRDENHNSQIRELMFGCLKGETNVYNLDGRDLQDLSLYIDKYLNGLTRRIEILIENGESSSSLPLPIVANAAAPVGFDGPMFQYHNQNQQKPVQFQYQALYDFYDQIPKKIHGFNMNMNKDSNQSMVLDLNQNLNDGEDEGIPCMDNNNYHPEIDCLATVTTAPTDVCAPNITNDL

SEQ ID NO: 962 - protein, 404 aa, Arabidopsis thaliana
  Clone ID: AT_F6A14.C1.p14.tg
MGRVKLKIKRLESTSNRQVTYTKRKNGILKKAKELSILCDIDIVLLMFSPTGRATAFHGEHRYNYQNHSYALKKTFKKLDHDVNIHDFLGARNQTIEVWIDHLRFMNFLGYFLISLSQIAKVCVNITTRQGLSNQVAIYQAQLMECHRRLSCWTNIDRIENTEHLDLLEESLRKSIERIQIHKEHYRKNQLLPIECATTQFHSGIQLPMAMGGNSSMQEAHSMSWLPDNDHQQTILPGDSSFLPHREMDGSIPVYSSCFFESTKPEDQICSNPGQQFEQLEQQGNGCLGLQQLGEEYSYPTPFGTTLGMEEDQEKKIKSEMELNNLQQQQQQQQQQQQQDPSMYDPMANNNGGCFQIPHDQSMFVNDHHHHHHHHHQNWVPDSMFGQTSYNQVCVFTPPLELSR

SEQ ID NO: 963 - protein, 294 aa, Arabidopsis thaliana
  Clone ID: AT_k19m22.C1.p90.tg
MVPKVVDLQRIANDKTRITTYKKRKASLYKKAQEFSTLCGVETCLIVYGPTKATDVVISEPEIWPKDETKVRAIIRKYKDTVSTSCRKETNVETFVNDVGKGNEVVTKKRVKRENKYSSWEEKLDKCSREQLHGIFCAVDSKLNEAVTRQERSMFRVNHQAMDTPFPQNLMDQQFMPQYFHEQPQFQGFPNNFNNMGFSLISPHDGQIQMDPNLMEKWTDLALTQSLMMSKGNDGTQFMQRQEQPYYNREQVVSRSAGFNVNPFMGYQVPFNIPNWRLSGNQVENWELSGKKTI

SEQ ID NO: 964 - protein, 124 aa, Arabidopsis thaliana
  Clone ID: AT_F28K19.C1.p16.tg
MGRVKLELKRIEKSTNRQITFSKRKKGLIKKAYELSTLCDIDLALLMFSPSDRLCLFSGQTRIEDVLARYINLPDQERENAIVFPDQSKRQGIQNKEYLLRTLEKLKIEDDMALQINEPRFIPH

SEQ ID NO: 965 - protein, 185 aa, Arabidopsis thaliana
  Clone ID: AT_F3M18.C1.p11.tg
MNPKKTKGKQKINIKKIEKDEDRSVTLSKRLNAIYTMIIELSILCGVEVAFIGYSCSGKPYTFGSPSFQAVVERFLNGEASSSSSSSLQRSVKNAHKQAKIQELCKRYNRLVEELKVDEVKVKKAAALAETRAVNKDAWWKADPNDVKDHEKAKKMMEKYQELKEKLREEVALRIKRGHDENNNK

SEQ ID NO: 966 - protein, 464 aa, Arabidopsis thaliana
  Clone ID: AT_F27M3.C1.p16.tg
MRTKTKLVLIPDRHFRRATFRKRNAGIRKKLHELTTLCDIKACAVIYSPFENPTVWPSTEGVQEVISEFMEKPATERSKTMMSHETFLRDQITKEQNKLESLRRENRETQLKHFMFDCVGGKMSEQQYGARDLQDLSLFTDQYLNQLNARKKFLTEYGESSSSVPPLFDVAGANPPVVADQAAVTVPPLFAVAGANLPVVADQAAVTVPPLFAVAGANLPVVADQAAVNVPTGFHNMNVNQNQYEPVQPYVPTGFSDHIQYQNMNFNQNQQEPVHYQALAVAGAGLPMTQNQYEPVHYQSLAVAGGGLPMSQLQYEPVQPYIPTVFSDNVQYQHMNLYQNQQEPVHYQALGVAGAGLPMNQNQYEPVQPYVPTGFSDHFQFENMNLNQNQQEPVQYQAPVDFNHQIQQGNYDMNLNQNMKHAHIPFMDGNYYNYHQPPTVGLTSTGHMPSTTTTTTNNNNNNNV

SEQ ID NO: 967 - protein, 285 aa, Arabidopsis thaliana
  Clone ID: AT_K6M13.C1.p3.tg
MRFVPYLYEIERLWLSLVNYLSPRKNKNRRCGEIDKIRMVKKGGTKRKIAIETIQKSDYLRVTCTKRREGLFSKASQLCLLSDAQIAILATPPTSESNISFYSFGHSSVDAVVSSFLSGQRCVPLQEDTKEMREDVAICLSRTNLGLGFWWNNESLNKSENPQEISDAINSMLTLLSNLKELSGEEALVNDHKDLKKNERSDVVLQHGTQYETLNPNSNTTTICCVPDELPANSNEIVGISPNPLIMLEKKKSQIEEKFEKEWQVSVTRIENEATSSYAKRRRSI

SEQ ID NO: 968 - protein, 434 aa, Arabidopsis thaliana
  Clone ID: AT_K24M9.C1.p4.tg
MNNNIFSTTTTINDDYMLFPYNDHYSSQPLLPFSPSSSINDILIHSTSNTSNNHLDHHHQFQQPSPFSHFEFAPDCALLTSFHPENNGHDDNQTIPNDNHHPSLHFPLNNTIVEQPTEPSETINLIEDSQRISTSQDPKMKKAKKPSRTDRHSKIKTAKGTRDRRMRLSLDVAKELFGLQDMLGFDKASKTVEWLLTQAKPEIIKIATTLSHHGCFSSGDESHIRPVLGSMDTSSDLCELASMWTVDDRGSNTNTTETRGNKVDGRSMRGKRKRPEPRTPILKKLSKEERAKARERAKGRTMEKMMMKMKGRSQLVKVVEEDAHDHGEIIKNNNRSQVNRSSFEMTHCEDKIEELCKNDRFAVCNEFIMNKKDHISNESYDLVNYKPNSSFPVINHHRSQGAANSIEVPYLYLRVTFIIFMSFFPMVLSKAIHS

SEQ ID NO: 969 - protein, 188 aa, Arabidopsis thaliana
  Clone ID: AT_T1J8.C1.p18.tg
MIFQNVCRNESNFNAIASESRSQTQFGVSKSSSSGGGCISARTKDRHTKVNGRSRRVTMPALAAARIFQLTRELGHKTEGETIEWLLSQAEPSIIAATGYGTKLISNWVDVAADDSSSSSSMTSPQTQTQTPQSPSCRLDLCQPIGIQYPVNGYSHMPFTAMLLEPMTTTAESEVEIAEEEERRRRHH

SEQ ID NO: 970 - protein, 341 aa, Arabidopsis thaliana
  Clone ID: AT_F15O4.C1.p35.tg
MESHNNNQSNNNTTGSAHLVPSMGPISGSVSLTTTAPNSTTTTVTAAKTPAKRPSKDRHIKVDGRGRRIRMPAICAARVFQLTRELQHKSDGETIEWLLQQAEPAIIAATGTGTIPANISTLNISLRSSGSTLSAPLSKSFHMGRAAQNAAVFGFQQQLYHPHHITTDSSSSSLPKTFREEDLFKDPNFLDQEPGSRSPKPGSEAPDQDPGSTRSRTQNMIPPMWALAPTPASTNGGSAFWMLPVGGGGGPANVQDPSQHMWAFNPGHYPGRIGSVQLGSMLVGGQQLGLGVAENNNLGLFSGGGGDGGRVGLGMSLEQKPQHQVSDHATRDQNPTIDGSP

SEQ ID NO: 971 - protein, 477 aa, Arabidopsis thaliana
  Clone ID: AT_F1P2.C1.p170.tg
MDGGDSVGGGGGDDHHRHLHHHHRPTFPFQLLGKHDPDDNHQQQPSPSSSSSLFSLHQHQQLSQSQPQSQSQKSQPQTTQKELLQTQEESAVVAAKKPPLKRASTKDRHTKVDGRGRRIRMPALCAARVFQLTRELGHKSDGETIEWLLQQAEPSVIAATGTGTIPANFTSLNISLRSSGSSMSLPSHFRSAASTFSPNNIFSPAMLQQQQQQQRGGGVGFHHPHLQGRAPTSSLFPGIDNFTPTTSFLNFHNPTKQEGDQDSEELNSEKKRRIQTTSDLHQQQQQHQHDQIGGYTLQSSNSGSTATAAAAQQIPGNFWMVAAAAAAGGGGGNNNQTGGLMTASIGTGGGGGEPVWTFPSINTAAAALYRSGVSGVPSGAVSSGLHFMNFAAPMAFLTGQQQLATTSNHEINEDSNNNEGGRSDGGGDHHNTQRHHHHQQQHHHNILSGLNQYGRQVSGDSQASGSLGGGDEEDQQD

SEQ ID NO: 972 - protein, 360 aa, Arabidopsis thaliana
  Clone ID: AT_MSL3.C1.p90.tg
MRSGECDEEEIQAKQERDQNQNHQVNLNHMLQQQQPSSVSSSRQWTSAFRNPRIVRVSRTFGGKDRHSKVCTVRGLRDRRIRLSVPTAIQLYDLQDRLGLSQPSKVIDWLLEAAKDDVDKLPPLQFPHGFNQMYPNLIFGNSGFGESPSSTTSTTFPGTNLGFLENWDLGGSSRTRARLTDTTTTQRESFDLDKGKWIKNDENSNQDHQGFNTNHQQQFPLTNPYNNTSAYYNLGHLQQSLDQSGNNVTVAISNVAANNNNNLNLHPPSSSAGDGSQLFFGPTPPAMSSLFPTYPSFLGASHHHHVVDGAGHLQLFSSNSNTASQQHMMPGNTSLIRPFHHLMSSNHDTDHHSSDNESDS

SEQ ID NO: 973 - protein, 325 aa, Arabidopsis thaliana
  Clone ID: AT_T6C23.C1.p11.tg
MDPDPDHNHRPNFPLQLLDSSTSSSSTSLAIISTTSEPNSEPKKPPPKRTSTKDRHTKVEGRGRRIRMPAMCAARVFQLTRELGHKSDGETIEWLLQQAEPAVIAATGTGTIPANFTSLNISLRSSRSSLSAAHLRTTPSSYYFHSPHQSMTHHLQHQHQVRPKNESHSSSSSSSQLLDHNQMGNYLVQSTAGSLPTSQSPATAPFWSSGDNTQNLWAFNINPHHSGVVAGDVYNPNSGGSGGGSGVHLMNFAAPIALFSGQPLASGYGGGGGGGGEHSHYGVLAALNAAYRPVAETGNHNNNQQNRDGDHHHNHQEDGSTSHHS

SEQ ID NO: 974 - protein, 359 aa, Arabidopsis thaliana
  Clone ID: AT_F1N21.C1.p8.tg
MSSSTNDYNDGNNNGVYPLSLYLSSLSGHQDIIHNPYNHQLKASPGHMVSAVPESLIDYMAFKSNNVVNQQGFEFPEVSKEIKKVVKKDRHSKIQTAQGIRDRRVRLSIGIARQFFDLQDMLGFDKASKTLDWLLKKSRKAIKEVVQAKNLNNDDEDFGNIGGDVEQEEEKEEDDNGDKSFVYGLSPGYGEEEVVCEATKAGIRKKKSELRNISSKGLGAKARGKAKERTKEMMAYDNPETASDITQSEIMDPFKRSIVFNEGEDMTHLFYKEPIEEFDNQESILTNMTLPTKMGQSYNQNNGILMLVDQSSSSNYNTFLPQNLDYSYDQNPFHDQTLYVVTDKNFPKGKVWIQDSFVN

SEQ ID NO: 975 - protein, 375 aa, Arabidopsis thaliana
  Clone ID: AT_F28P5.C1.p10.tg
MNQNSSVAEATLQLNSGEKPSPGSIPFISSGQHGNISTSATSSTSTSSGSALAVVKSAVKKPTKDRHTKVDGRGRRIRMPAMCAARVFQLTRELGHKSDGETIEWLLQQAEPAIIASTGTGTIPANFSTLNASLRSGGGSTLFSQASKSSSSPLSFHSTGMSLYEDNNGTNGSSVDPSRKLLNSAANAAVFGFHHQMYPPIMSTERNPNTLVKPYREDYFKEPSSAAEPSESSQKASQFQEQELAQGRGTANVVPQPMWAVAPGTTNGGSAFWMLPMSGSGGREQMQQQPGHQMWAFNPGNYPVGTGRVVTAPMGSMMLGGQQLGLGVAEGNMAAAMRGSRGDGLAMTLDQHQHQLQHQEPNQSQASENGGDDKK

SEQ ID NO: 976 - protein, 361 aa, Arabidopsis thaliana
  Clone ID: AT_T16B12.C1.p12.tg
MGLKGYSVGEGGGEIVEVQGGHIIRATGRKDRHSKVFTSKGPRDRRVRLSAHTAIQFYDVQDRLGYDRPSKAVDWLIKKAKTAIDKLELGETTTTTTRQEPVNTKPESPTLVFQRENNDQTQFVAANLDPEDAMKTFFPATTTTNGGGGTNINFQNYPHQDDNNMVSRTTTPPPNLSQDLGLSLHPFQGNNNTVVVPETNNFTTTHFDTFGRISGWNHHDLTMTSSSSSEHQQQEQEERSNGGFMVNHHPHHHHHQPSMMTLLNSQQQQVFLGGQQQQQQRGTLQSSLFPHSFRSWDHHQTTSDHHHHQNQASSMFASSSQYGSHGMMMMQGLSFPNTTRLLHGEEATQPNSSSSPPNSHL

SEQ ID NO: 977 - protein, 355 aa, Arabidopsis thaliana
  Clone ID: AT_F1C9.C1.p6.tg
MNIVSWKDANDEVAGGATTRREREVKEDQEETEVRATSGKTVIKKQPTSISSSSSSWMKSKDPRIVRVSRAFGGKDRHSKVCTLRGLRDRRVRLSVPTAIQLYDLQERLGVDQPSKAVDWLLDAAKEEIDELPPLPISPENFSIFNHHQSFLNLGQRPGQDPTQLGFKINGCVQKSTTTSREENDREKGENDVVYTNNHHVGSYGTYHNLEHHHHHHQHLSLQADYHSHQLHSLVPFPSQILVCPMTTSPTTTTIQSLFPSSSSAGSGTMETLDPRQMVSHFQMPLMGNSSSSSSQNISTLYSLLHGSSSNNGGRDIDNRMSSVQFNRTNSTTTANMSRHLGSERCTSRGSDHHM

SEQ ID NO: 978 - protein, 324 aa, Arabidopsis thaliana
  Clone ID: AT_F12P21.C1.p11.tg
MEVDEDIELQKHQEQQSRKLQRFSEDNTGLMRNWNNPSSRIIRVSRASGGKDRHSKVLTSKGLRDRRIRLSVATAIQFYDLQDRLGFDQPSKAVEWLINAASDSITDLPLLNTNFDHLDQNQNQTKSACSSGTSESSLLSLSRTEIRGKARERARERTAKDRDKDLQNAHSSFTQLLTGGFDQQPSNRNWTGGSDCFNPVQLQIPNSSSQEPMNHPFSFVPDYNFGISSSSSAINGGYSSRGTLQSNSQSLFLNNNNNITQRSSISSSSSSSSPMDSQSISFFMATPPPLDHHNHQLPETFDGRLYLYYGEGNRSSDDKAKERR

SEQ ID NO: 979 - protein, 293 aa, Arabidopsis thaliana
  Clone ID: AT_MJM18.C1.p6.tg
MESNHEGNAIQVIDQVTTMTHLSDPNPKTKPGMMLMKQEDGYLQPVKTKPAPKRPTSKDRHTKVEGRGRRIRMPAGCAARVFQLTRELGHKSDGETIRWLLERAEPAIIEATGTGTVPAIAVSVNGTLKIPTSSPVLNDGGRDGDGDLIKKRRKRNCTSDFVDVNDSCHSSVTSGLAPITASNYGVNILNVNTQGFVPFWPMGMGTAFVTGGPDQMGQMWAIPTVATAPFLNVGARPVSSYVSNASDAEAEMETSGGGTTQPLRDFSLEIYDKRELQFLGGSGNSSPSSCHET

SEQ ID NO: 980 - protein, 165 aa, Arabidopsis thaliana
  Clone ID: AT_T14D3.C1.p90.tg
MDSKNGINNSQKARRTPKDRHLKIGGRDRRIRIPPSVAPQLFRLTKELGFKTDGETVSWLLQNAEPAIFAATGHGVTTTSNEDIQPNRNFPSYTFNGDNISNNVFPCTVVNTGHRQMVFPVSTMTDHAPSTNYSTISDNYNSTFNGNATASDTTSAATTTATTTV

SEQ ID NO: 981 - protein, 250 aa, Arabidopsis thaliana
  Clone ID: AT_MKD15.C1.p14.tg
MSINNNNNNNNNNNDGLMISSNGALIEQQPSVVVKKPPAKDRHSKVDGRGRRIRMPIICAARVFQLTRELGHKSDGQTIEWLLRQAEPSIIAATGTGTTPASFSTASVSIRGATNSTSLDHKPTSLLGGTSPFILGKRVRADEDSNNSHNHSSVGKDETFTTTPAGFWAVPARPDFGQVWSFAGAPQEMFLQQQHHHQQPLFVHQQQQQQAAMGEASAARVGNYLPGHLNLLASLSGGSPGSDRREEDPR

SEQ ID NO: 982 - protein, 243 aa, Arabidopsis thaliana
  Clone ID: AT_MEE6.C1.p10.tg
MVMEPKKNQNLPSFLNPSRQNQDNDKKRKQTEVKGFDIVVGEKRKKKENEEEDQEIQILYEKEKKKPNKDRHLKVEGRGRRVRLPPLCAARIYQLTKELGHKSDGETLEWLLQHAEPSILSATVNGIKPTESVVSQPPLTADLMICHSVEEASRTQMEANGLWRNETGQTIGGFDLNYGIGFDFNGVPEIGFGDNQTPGLELRLSQVGVLNPQVFQQMGKEQFRVLHHHSHEDQQQSAEENGS

SEQ ID NO: 983 - protein, 420 aa, Arabidopsis thaliana
  Clone ID: AT_K15M2.C1.p17.tg
MSDDQFHHPPPPSSMRHRSTSDAADGGCGEIVEVQGGHIVRSTGRKDRHSKVCTAKGPRDRRVRLSAHTAIQFYDVQDRLGFDRPSKAVDWLIKKAKTSIDELAELPPWNPADAIRLAAANAKPRRTTAKTQISPSPPPPQQQQQQQQLQFGVGFNGGGAEHPSNNESSFLPPSMDSDSIADTIKSFFPVIGSSTEAPSNHNLMHNYHHQHPPDLLSRTNSQNQDLRLSLQSFPDGPPSLLHHQHHHHTSASASEPTLFYGQSNPLGFDTSSWEQQSSEFGRIQRLVAWNSGGGGGATDTGNGGGFLFAPPTPSTTSFQPVLGQSQQLYSQRGPLQSSYSPMIRAWFDPHHHHQSISTDDLNHHHHLPPPVHQSAIPGIGFASGEFSSGFRIPARFQGQEEEQHDGLTHKPSSASSISRH

SEQ ID NO: 984 - protein, 314 aa, Arabidopsis thaliana
  Clone ID: AT_MOJ10.C1.p9.tg
MDPKNLNRHQVPNFLNPPPPPRNQGLVDDDAASAVVSDENRKPTTEIKDFQIVVSASDKEPNKKSQNQNQLGPKRSSNKDRHTKVEGRGRRIRMPALCAARIFQLTRELGHKSDGETIQWLLQQAEPSIIAATGSGTIPASALASSAATSNHHQGGSLTAGLMISHDLDGGSSSSGRPLNWGIGGGEGVSRSSLPTGLWPNVAGFGSGVPTTGLMSEGAGYRIGFPGFDFPGVGHMSFASILGGNHNQMPGLELGLSQEGNVGVLNPQSFTQIYQQMGQAQAQAQGRVLHHMHHNHEEHQQESGEKDDSQGSGR

SEQ ID NO: 985 - protein, 317 aa, Arabidopsis thaliana
  Clone ID: AT_F14K14.C1.p9.tg
MFPSFITHIQSPNSHHHYSSPSFPFSSDFLESFDESFLINQFLLQQQDVAANVVESPWKFCKKLELKKKNEKCVDGSTSQEVQWRRTVKKRDRHSKICTAQGPRDRRMRLSLQIARKFFDLQDMLGFDKASKTIEWLFSKSKTSIKQLKERVAASEGGGKDEHLQVDEKEKDETLKLRVSKRRTKTMESSFKTKESRERARKRARERTMAKMKMRLFETSETISDPHQETREIKITNGVQLLEKENKEQEWSNTNDVHMVEYQMDSVSIIEKFLGLTSDSSSSSIFGDSEECYTSLSSVRGTISAAGNSNVLTKNPN

SEQ ID NO: 986 - protein, 378 aa, Arabidopsis thaliana
  Clone ID: AT_T6A23.C1.p24.tg
MESDLIDLFEGAKKAADAAALDGVTSSGPEVSQCIDALKQLKKFPVTYDTLVATQVGKKLRSLAKHPVEDIKSVATDLLEIWKKVVIEETAKAKKTEGTNGCKEAKVNKMDVEKPSNPAPVKVQKLQRGDSAKSIKVERKEPDNKVVTGVKIERKVPDIKVTNGTKIDYRGQAVKDEKVSKDNQSSMKAPAKAANAPPKLTAMLKCNDPVRDKIRELLVEALCRVAGEADDYERESVNASDPLRVAVSVESLMFEKLGRSTGAQKLKYRSIMFNLRDSNNPDLRRRVLTGEISPEKLITLSAEDMASDKRKQENNQIKEKALFDCERGLAAKASTDQFKCGRCGQRKCTYYQMQTRSADEPMTTYVTCVNCDNHWKFC

SEQ ID NO: 987 - protein, 91 aa, Arabidopsis thaliana
  Clone ID: AT_MPE11.C1.p9.tg
MEKSRESEFLFYIIDKEIAYTVSAEDIRRELGISLFGEKTQAEAELPKIKKACEKCQHPELVYTTRQTRSADEGQTTYYTCPNCAHRFTEG

SEQ ID NO: 988 - protein, 106 aa, Arabidopsis thaliana
  Clone ID: AT_F6F3.C1.p9.tg
MEFCPTCGNLLRYEGGGNSRFFCSTCPYVAYIQRQVEIKKKQLLVKKSIEAVVTKDDIPTAAETEAPCPRCGHDKAYFKSMQIRSADEPESRFYRCLKCEFTWREE

SEQ ID NO: 989 - protein, 600 aa, Arabidopsis thaliana
  Clone ID: AT_F3L24.C1.p23.tg
MVWCNHCVKNVPGIRPYDGALACNLCGRILENFHFSTEVTFVKNAAGQSQASGNIVRSVQSGITSSRERRFRIARDELMNLKDALGIGDERDDVIVIAAKFFEMAVEQNFTKGRRTELVQASCLYLTCRELNIALLLIDFSSYLRVSVYELGSVYLQLCEMLYLVENRNYEKLVDPSIFMDRFSNSLLKGKNNKDVVATARDIIASMKRDWIQTGRKPSGICGAALYTAALSHGIKCSKTDIVNIVHICEATLTKRLIEFGDTDSGNLNVNELRERESHKRSFTMKPTSNKEAVLCMHQDSKPFGYGLCEDCYKDFINVSGGLVGGSNPPAFQRAEKERMEKAAREENEGGISSLNHDEQLYHLRIYLGCVAEKGEKDKDGAEEHADTSDESDNFSDISDDEVNGYINNEEETHYKTITWTEMNKDYLEEQAAKEAALKAASEALKASNSNCPEDARKAFEAAKADAAKSRKEKQQKKAEEAKNAAPPATAVEAVRRTLDKKRLSSVINYDVLESLFDTSAPEKSPKRSKTETDIEKKKEENKEMKSNEHENGENEDEDEEDEEEGNVESYDMKTDFQNGEKFYEEDEEEEEDGNDFGLY

SEQ ID NO: 990 - protein, 1321 aa, Arabidopsis thaliana
  Clone ID: AT_F26G16.C1.p9.tg
MDSGDIEEAGGNGEEEFRSGPRLGGSKYRPVVAHDRAVVEMSSIDPGSSSSTLKNIKVVAPGDVGAGVRGPEDGVNGHQKESKLELFGFDSLVNILGLKSMTGEQIQAPSSPRDGEDISITQGHPKPPALKMGTMMGVFVPCLQNILGIIYYIRFTWIVGMAGIGQGLVLVFLCGLCTFLTTISLSAIATNGAMKGGGPYYLIGRALGPEVGISIGLCFFLGNAVAGALYVLGAVETFLKAFPAAGIFRETITKVNGTAVSESIQSPNSHDLQVYGIVVTILLCFIVFGGVKMINRVAPAFLVPVLLSIFCIFIGIFLAKTDDPDNGITGLRLKSFKDNWGSAYQMTNDAGIPDPTGGTYWSFNELVGLFFPAVTGIMAGSNRSASLKDTQKSIPVGTLAATLTTTSLYLISVLFFGAVATRDKLLTDRLLTATIAWPFPAIVHVGIILSTLGAALQSLTGAPRLLAAIANDDILPILNYFKVADTSEPHIATLFTAFICIGCVVIGNLDLITPTVTMFYLLCYSGVNLSCFLLDLLDAPSWRPRWKYHHWSLSFVGASLCIVIMFLISWSFTVVAIALASLIYKYVGLKGKAGDWGDGFKSAYFQLALRSLRSLGANQVHPKNWYPIPLVFCRPWGQLPENVPCHPKLADFANCMKKKGRGMSIFVSILDGDYYECAEEAKEACKQLATYIEYKRCEGVAEIVVAPNMTEGFRGIIQTMGLGNLKPNIVVMRYPEIWRRENLTEIPSTFVGIINDCITANKAVVIIKGLDEWPNEYQRQYGTIDLYWIVRDGGLMLLLSQLLLTKESFESCKIQLFCIAEEDSDAEALKADVKKFLYDLRMHAEVIVVTMKSWDIRSEGNSQEDSLEAFDAAQRRISDYLGEIKRQGSNPLLANGKPMVVNEQQVEKFLYTMLKLNSTILSYSRMAAVVLVSLPPPPLNHPAYFYMEYMDLLVENVPRMLIVRGKFDFALLLIHFSSYFRVSVYELGSVYLQLCDMLYLTENRKYENLVDPSTFIPRFSNKLLKGAHNKQVVETATHIIASMKSNWMQTGRKPSGICGAALYTAALSHGIKCSKTDITNIVYICEATLTKRLIEFGNTEAASFTADELSKPEREREKEREEERELRTRNPNSYKKGLVLCGSDPPSFQRAEKERMEEKASTEENDKQQNSDESSTLSDLDDGELDCYFRNPKEVHLVEIIFDHENPGYDEKEAAALNACNNASNLFEASKAAAAKSRKDKRQQRAEEEKNAPPPATAMEAVDSMVKRKKFPDTNCDYLEELLDTSAQKASKRLKTETVMEKNKEEHEIVENEQDEEDYAA

SEQ ID NO: 991 - protein, 360 aa, Arabidopsis thaliana
  Clone ID: AT_F28O9.C1.p220.tg
MTMKWGHSCRRCKQINVVTDHVTRRTRCFGCGLEFKYRPIGDLSPVAENDTVRLPDPTNTLLSNTDLSIVTTEHKNGSFDDSLSLNLGNSSKPRLDPVSIATAKLMNGSSNDFLSLGTSQNSETITASSDEFLFSDLGHLQKFSFDPLSMASTKPNKALSIVSIEAISNGLKLPATIKGQANEIFKVVESYARGKERNVLFAACIYIACRDNDMTRTMREISRFANKASISDISETVGFIAEKLEINKNWYMSIETANFIKRFCSIFRLDKEAVEAALEAAESYDYMTNGRRAPVSVAAGIVYVIARLSYEKHLLKGLIEATGVAENTIKGTYGDLYPNLPTIVPTWFANANDLKNLGAP

SEQ ID NO: 992 - protein, 181 aa, Arabidopsis thaliana
  Clone ID: AT_T4F9.C1.p140.tg
KEDGICLECKRPTETVVNYKNGDTICIECGHVIENNIIDDLDGASTNPNLKSGHLPTIIFKLSGKSSSLASKLRRTQNEMIKNKQEEDVIKIAYAEIERMTEALGLTFGISNTACKILSKLDKKNLRGGKSLRGLCAASVSRACRQVNIPKTLKEISAVANVDMKEINKAVKLLGDSFGTI

SEQ ID NO: 993 - protein, 311 aa, Arabidopsis thaliana
  Clone ID: AT_F4P9.C1.p32.tg
MALEQLGLGVSAVDGGENSSAPSNDGGDDGVKTARLPRWTRQEILVLIQGKRVAENRVRRGRAAGMALGSGQMEPKWASVSSYCKRHGVNRGPVQCRKRWSNLAGDYKKIKEWESQIKEETESYWVMRNDVRREKKLPGFFDKEVYDIVDGGVIPPAVPVLSLGLAPASDEGLLSDLDRRESPEKLNSTPVAKSVTDKEKQEACVADQGRVKEKQPEAANVEGGSTSQEERKRKRTSFGEKEEEEEEGETKKMQNQLIEILERNGQLLAAQLEVQNLNLKLDREQRKDHGDSLVAVLNKLADAVAKIADKM

SEQ ID NO: 994 - protein, 385 aa, Arabidopsis thaliana
  Clone ID: AT_F7O12.C1.p4.tg
MEGNCSQGRFDSQVSSMRDLRPNAINQNQKQHHPNSRQDSGFNNTMDTRHNNVDRGKKSMSEDDELCLLSSDGQNKSKENSPWQRVKWMDKMVKLMITALSYIGEDSGSDKKFAVLQKKGKWRSVSKVMDERGYHVSPQQCEDKFNDLNKRYKKLNEMLGRGTSCEVVENPSLLDKIDYLNEKEKDEVRRIMSSKHLFYEEMCSYHNGNRLHLPHDPAVQRSLHLITLGSRDDHDNDEHGKHQNEDLDDDDDYEEDHDGALSDRPLKRLRQSQSHEDVGHPNKGYDVPCLPRSQADVNRGISLDSRKAAGLQRQQIESKSLELEGRKLQIQAEMMELERQQFKWEVFSKRREQKLAKMRMENERMKLENERMSLELKRIELGAKL

SEQ ID NO: 995 - protein, 443 aa, Arabidopsis thaliana
  Clone ID: AT_F16F4.C1.p10.tg
MDGNFPQGGVVRSGASSYGGFDLQGSMRVHHQDSMNQQHRHNPNSRPLHEGLPFTMVTGQTCDHHQNQNMSMSEQQKAEREKNSVSDDDEPSFTEEGGDGVHNEANRSTKGSPWQRVKWTDKMVKLLITAVSYIGDDSSIDSSSRRKFAVLQKKGKWKSVSKVMAERGYHVSPQQCEDKFNDLNKRYKKLNDMLGRGTSCQVVENPALLDSIGYLNDKEKDDVRKIMSSKHLFYEEMCSYHNGNRLHLPHDLALQRSLQLALRSRDDHDNDDSRKHQMEDLDDEDHDGDGDEHDEYEEQHYAYGDCRVNHYGGGGGPLKKIRPSLSHEDGDHPSHVNSLECNKVSLPQIPFSQADVNQGGAESGRAGSVQKQWMESRTLQLEEQKLQIQVELLELEKQRFRWQRFSKKRDQELERMRMENERMKLENDRMGLELKQRELGVEL

SEQ ID NO: 996 - protein, 418 aa, Arabidopsis thaliana
  Clone ID: AT_T22K18.C1.p13.tg
MLSLEMPQNPPNPQNSIQFQHPHPYTTSGDQQTQPPIKSLYPYASKPKQMSPISGGGCDDEDRGSGSGSGCNPEDSAGTDGKRKLSQWHRMKWTDTMVRLLIMAVFYIGDEAGLNDPVDAKKKTGGGGGGGGGGGMLQKKGKWKSVSRAMVEKGFSVSPQQCEDKFNDLNKRYKRVNDILGKGIACRVVENQGLLESMDHLTPKLKDEVKKLLNSKHLFFREMCAYHNSCGHLGGHDQQPPQQNPISIPIPSQQQNCFHAAEAGKMARIAERVEVEEEVESDMAEDSESEMEESEEEETRKKRRISTAVKRLREEAASVVEDVGKSVWEKKEWIRRKMLEIEEKKIGYEWEGVEMEKQRVKWMRYRSKKEREMEKAKLDNQRRRLETERMILMLRRSEIELNELQSSGTRVDPSSAKG

SEQ ID NO: 997 - protein, 520 aa, Arabidopsis thaliana
  Clone ID: AT_T22K18.C1.p15.tg
MASCDDDFSLLGDDQSNPNQHHHHHQVLHHTPYAPRRFNPKPSNQILLPHHQRNGDEDDENDVVVEASSAFHGHGVNPFTADENSNPYDDNNAAVDEDEDEDLGANRSRIGGVRVEKRQSQEELSDGGTTNGGEITPYGSFKRPRTSSSSAGEYRKDREEWSDAAIACLLDAYSDKFTQLNRGNLRGRDWEEVASSVSERCEKLSKSVEQCKNKIDNLKKRYKLERHRMSSGGTAASHWPWFKKMEDIVGNSLALKGASDEDRSGSSMGNTVKPARRYPLVTYNPGVQINNVKSKATSNPRWRRVVLKISGAALACTGPNNIDPKVINLIAREVAMACRLGVEVAIVVGSRNFFCGSTWVTATGLDRTTAYHISMMASVMNSALLQSSLEKIGVQARLQTAISVQGVGEPYNRQRATRHLDKGRVVIFGGIGATLGNPLLSSDASAALRAIDINAEAVVKGTNVDGVYDCHSQDSNVTFEHISFQDLASRGLTSMDTMALNFCEENSIPGRDSSSLSYHV

SEQ ID NO: 998 - protein, 383 aa, Arabidopsis thaliana
  Clone ID: AT_F15I1.C1.p30.tg
MEDDDEIQSIPSPGDSSLSPQAPPSPPILPTNDVTVAVVKKPQPGLSSQSPSMNALALVVHTPSVTGGGGSGNRNGRGGGGGSGGGGGGRDDCWSEEATKVLIEAWGDRFSEPGKGTLKQQHWKEVAEIVNKSRQCKYPKTDIQCKNRIDTVKKKYKQEKAKIASGDGPSKWVFFKKLESLIGGTTTFIASSKASEKAPMGGALGNSRSSMFKRQTKGNQIVQQQQEKRGSDSMRWHFRKRSASETESESDPEPEASPEESAESLPPLQPIQPLSFHMPKRLKVDKSGGGGSGVGDVARAILGFTEAYEKAETAKLKLMAELEKERMKFAKEMELQRMQFLKTQLEITQNNQEEEERSRQRGERRIVDDDDDRNGKNNGNVSS

SEQ ID NO: 999 - protein, 382 aa, Arabidopsis thaliana
  Clone ID: AT_T19E23.C1.p14.tg
MADQSGGLVMMREYRKGNWTLNETMVLIEAKRMDDERRMRRSIGLPPPEQQQDIRSNKPAELRWKWIEDYCWRKGCMRSQNQCNDKWDNLMRDYKKVREYERRRVESSITAGESSSSSAPAGETASYWKMEKSERKERSLPSNMLPQTYQALFEVVESKTLPSSTAVTAVTAAVAAAAAAISSGNGSGGGQIQKVIQQGLGFVVPKVHQIIQQQPVLLPLQPPPPPPPSQPLPRPLLLPPPPPPSFHAQPILPTDSSTDSDTSEYSDTSPAKRRRTMPTTTTAGPSGGGVDVEEVGRSKRDEETTVAAALSRSVSVIANAIRESEERQDRRHKEVMNVQERRLKIEESNVEMNREGMNGLVEAINKLASSIFALASSSRHNN

SEQ ID NO: 1000 - protein, 398 aa, Arabidopsis thaliana
  Clone ID: AT_MNJ7.C1.p25.tg
MELLAGDCRKRVGDDFEEDINPFDGSDGGCGWMYGTRQMGSNGNDDALATLADLASPPQKLKPIRCGVKLPSSSEDRHPLDILAGTLDRLPEMGFGCFEAPLGSKIADVEESGQLTRGFSKEEDDSLPPLQMEFQARNRISWDGLSLSSSVDSSDSDSSPDVRKTVTGKRKRETRVKLEHFLEKLVGSMMKRQEKMHNQLINVMEKMEVERIRREEAWRQQETERMTQNEEARKQEMARNLSLISFIRSVTGDEIEIPKQCEFPQPLQQILPEQCKDEKCESAQREREIKFRYSSGSGSSGRRWPQEEVQALISSRSDVEEKTGINKGAIWDEISARMKERGYERSAKKCKEKWENMNKYYRRVTEGGQKQPEHSKTRSYFEKLGNFYKTISSGEREK

SEQ ID NO: 1001 - protein, 413 aa, Arabidopsis thaliana
  Clone ID: AT_F13B4.C1.p9.tg
MFISDKSRPTDFYKDDHHNSSTTSTTRDMMIDVLTTTNESVDLQSHHHHNHHNHHLHQSQPQQQILLGESSGEDHEVKAPKKRAETWVQDETRSLIMFRRGMDGLFNTSKSNKHLWEQISSKMREKGFDRSPTMCTDKWRNLLKEFKKAKHHDRGNGSAKMSYYKEIEDILRERSKKVTPPQYNKSPNTPPTSAKVDSFMQFTDKGFDDTSISFGSVEANGRPALNLERRLDHDGHPLAITTAVDAVAANGVTPWNWRETPGNGDDSHGQPFGGRVITVKFGDYTRRIGVDGSAEAIKEVIRSAFGLRTRRAFWLEDEDQIIRCLDRDMPLGNYLLRLDDVCKTHLAGLAIRVCHYDESNQLPVHSEEKIFYTEEDYREFLARQGWSSLQVDGFRNIENMDDLQPGAVYRGVR

SEQ ID NO: 1002 - protein, 575 aa, Arabidopsis thaliana
  Clone ID: AT_F7O12.C1.p6.tg
MSGNSEGLLESSGGGVGGSVEEEKDMKMEETGEGAGSGGNRWPRPETLALLRIRSEMDKAFRDSTLKAPLWEEISRKMMELGYKRSSKKCKEKFENVYKYHKRTKEGRTGKSEGKTYRFFEELEAFETLSSYQPEPESQPAKSSAVITNAPATSSLIPWISSSNPSTEKSSSPLKHHHQVSVQPITTNPTFLAKQPSSTTPFPFYSSNNTTTVSQPPISNDLMNNVSSLNLFSSSTSSSTASDEEEDHHQVKSSRKKRKYWKGLFTKLTKELMEKQEKMQKRFLETLEYREKERISREEAWRVQEIGRINREHETLIHERSNAAAKDAAIISFLHKISGGQPQQPQQHNHKPSQRKQYQSDHSITFESKEPRAVLLDTTIKMGNYDNNHSVSPSSSRWPKTEVEALIRIRKNLEANYQENGTKGPLWEEISAGMRRLGYNRSAKRCKEKWENINKYFKKVKESNKKRPLDSKTCPYFHQLEALYNERNKSGAMPLPLPLMVTPQRQLLLSQETQTEFETDQREKVGDKEDEEEGESEEDEYDEEEEGEGDNETSEFEIVLNKTSSPMDINNNLFT

SEQ ID NO: 1003 - protein, 330 aa, Arabidopsis thaliana
  Clone ID: AT_MLE2.C1.p6.tg
MEIMRPGVSENTLKGKIRITTRCMWLDKGRLLDALHKAAHAALSSCPVTCPLSHMERTVSEVLRKIVRKYSGKRPEVIAIATENPMAVRADEVSARLSGDPSVGSGVAALRKVVEGNDKRSRAKKAPSQEASPKEVDRTLEDDIIDSARLLAEEETAASTYTEEVDTPVGSSSEESDDFWKSFINPSSSPSPSETENMNKVADTEPKAEGKENSRDDDELADASDSETKSSPKRVRKNKWKPEEIKKVIRMRGELHSRFQVVKGRMALWEEISSNLSAEGINRSPGQCKSLWASLIQKYEESKADERSKTSWPHFEDMNNILSELGTPAS

SEQ ID NO: 1004 - protein, 669 aa, Arabidopsis thaliana
  Clone ID: AT_T9L6.C1.p14.tg
MEQGGGGGGNEVVEEASPISSRPPANNLEELMRFSAAADDGGLGGGGGGGGGGSASSSSGNRWPREETLALLRIRSDMDSTFRDATLKAPLWEHVSRKLLELGYKRSSKKCKEKFENVQKYYKRTKETRGGRHDGKAYKFFSQLEALNTTPPSSSLDVTPLSVANPILMPSSSSSPFPVFSQPQPQTQTQPPQTHNVSFTPTPPPLPLPSMGPIFTGVTFSSHSSSTASGMGSDDDDDDMDVDQANIAGSSSRKRKRGNRGGGGKMMELFEGLVRQVMQKQAAMQRSFLEALEKREQERLDREEAWKRQEMARLAREHEVMSQERAASASRDAAIISLIQKITGHTIQLPPSLSSQPPPPYQPPPAVTKRVAEPPLSTAQSQSQQPIMAIPQQQILPPPPPSHPHAHQPEQKQQQQPQQEMVMSSEQSSLPSSSRWPKAEILALINLRSGMEPRYQDNVPKGLLWEEISTSMKRMGYNRNAKRCKEKWENINKYYKKVKESNKKRPQDAKTCPYFHRLDLLYRNKVLGSGGGSSTSGLPQDQKQSPVTAMKPPQEGLVNVQQTHGSASTEEEEPIEESPQGTEKPEDLVMRELIQQQQQLQQQESMIGEYEKIEESHNYNNMEEEEDQEMDEEELDEDEKSAAFEIAFQSPANRGGNGHTEPPFLTMVQ

SEQ ID NO: 1005 - protein, 496 aa, Arabidopsis thaliana
  Clone ID: AT_T22K18.C1.p19.tg
MEDHQNHPQYGIEQPSSQFSSDLFGFNLVSAPDQHHRLHFTDHEISLLPRGIQGLTVAGNNSNTITTIQSGGCVGGFSGFTDGGGTGRWPRQETLMLLEVRSRLDHKFKEANQKGPLWDEVSRSHFLTLIFSSFIFPKSPFLEHGYTRSGKKCREKFENLYKYYKKTKEGKSGRRQDGKNYRFFRQLEAIYGESKDSVSCYNNTQFIMTNALHSNFRASNIHNIVPHHQNPLMTNTNTQSQSLSISNNFNSSSDLDLTSSSEGNETTKREGMHWKEKIKEFIGVHMERLIEKQDFWLEKLMKIVEDKEHQRMLREEEWRRIEAERIDKERSFWTKERERIEARDVAVINALQYLTGRALIRPDSSSPTERINGNGSDKMMADNEFADEGNKGKMDKKQMNKKRKEKWSSHGGNHPRTKENMMIYNNQETKINDFCRDDDQCHHEGYSPSNSKNAGTPSCSNAMAASTKCFPLLEGEGDQNLWEGYGLKQRKENNHQ

SEQ ID NO: 1006 - protein, 603 aa, Arabidopsis thaliana
  Clone ID: AT_F7O12.C1.p5.tg
MMQLGGGTPTTTAAATTVTTATAPPPQSNNNDSAATEAAAAAVGAFEVSEEMHDRGFGGNRWPRQETLALLKIRSDMGIAFRDASVKGPLWEEVSRKMAEHGYIRNAKKCKEKFENVYKYHKRTKEGRTGKSEGKTYRFFDQLEALESQSTTSLHHHQQQTPLRPQQNNNNNNNNNNNSSIFSTPPPVTTVMPTLPSSSIPPYTQQINVPSFPNISGDFLSDNSTSSSSSYSTSSDMEMGGGTATTRKKRKRKWKVFFERLMKQVVDKQEELQRKFLEAVEKREHERLVREESWRVQEIARINREHEILAQERSMSAAKDAAVMAFLQKLSEKQPNQPQPQPQPQQVRPSMQLNNNNQQQPPQRSPPPQPPAPLPQPIQAVVSTLDTTKTDNGGDQNMTPAASASSSRWPKVEIEALIKLRTNLDSKYQENGPKGPLWEEISAGMRRLGFNRNSKRCKEKWENINKYFKKVKESNKKRPEDSKTCPYFHQLDALYRERNKFHSNNNIAASSSSSGLVKPDNSVPLMVQPEQQWPPAVTTATTTPAAAQPDQQSQPSEQNFDDEEGTDEEYDDEDEEEENEEEEGGEFELVPSNNNNNKTTNNL

SEQ ID NO: 1007 - protein, 546 aa, Arabidopsis thaliana
  Clone ID: AT_F19K23.C1.p22.tg
MDRGWSGLTLDSSSLDLLNPNRISHKNHRRFSNPLAMSRIDEEDDQKTRISTNGSEFRFPVSLSGIRDREDEDFSSGVAGDNDREVPGEVDFFSDKKSRVCREDDEGFRVKKEEQDDRTDVNCGRVIIWFTFEISNKNTKFCFIFFFLIKTGLNLRTTGNTKSDESMIDDGESSEMEDKRAKNEVSLLVKLQDELKKMTMDNQKLRELLTQVSNSYTSLQMHLVSLMQQQQQQNNKVIEAAEKPEETIVPRQFIDLGPTRAVGEAEDVSNSSSEDRTRSGGSSAAERRSNGKRLGREESPETESNKIQKVNSTTPTTFDQTAEATMRKARVSVRARSEAPMVQRCAEDRSILITTYEGNHNHPLPPAAVAMASTTTAAANMLLSGSMSSHDGMMNPTNLLARAVLPCSTSMATISASAPFPTVTLDLTHSPPPPNGSNPSSSAATNNNHNSLMQRPQQQQQQMTNLPPGMLPHVIGQALYNQSKFSGLQFSGGSPSTAAFSQSHAVADTITALTADPNFTAALAAVISSMINGTNHHDGEGNNKNQ

SEQ ID NO: 1008 - protein, 182 aa, Arabidopsis thaliana
  Clone ID: AT_F1M23.C1.p8.tg
MKRLCCWVELRLQVMKKLKLKIEGCSFDDMYFVLQIRNHGEIITCTSRGDILSRKRKTLTTSLIPLLVITVCALRCIEVVEKVKVHPLWQATPMVQRSVEDQSVLVATYEGEHNHPMPSQMDSNNGLNRYISHGGSASTPVAANKRSSLTEPTDRPLIVYSMKKRREARATEMADEEHVSGS

SEQ ID NO: 1009 - protein, 651 aa, Arabidopsis thaliana
  Clone ID: AT_MXK3.C1.p3.tg
MNISQNPSPNFTYFSDENFINPFMDNNDFSNLMFFDIDEGGNNGLIEEEISSPTSIVSSETFTGESGGSGSATTLSKKESTNRGSKESDQTKETGHRVAFRTRSKIDVMDDGFKWRKYGKKSVKNNINKRLRLYREGNVKKATCKKSLCDSSVTCKRQRDLFEEEDEPYLIDLGGGEIFLNKFDSVAKMKFWRERERENKEQILAPLCGQVRVLVVGDSGVGKTSLVHLINKGSSIVRPPQTIGCTVGVKHITYGSPASSSSSIQGPGGLPVPYIVVGNKADIAAKEGTKGSSGNLVDAARHWVEKQGLLPSSSEDLPLFESFPGNGGLIAAAKETRYDKEALNKFFRMLIRRRYFSDELPAASPWSISPVPTSSSQRLDEITSDDDQFYKRTSFHGDPYKYNNTIPPLPAQRNLTPPPTLYPQQPVSTPDNYTIPRYSLSSVQETTNNGSARLLQSAEKNPNSVSLSRRAKTLNPGNYLDFCFQFRFCSEIVQGEKFNLKGKINFVCNAQCKIQVLKKRKMVEVWWSLIGAAVPALIAGQAWRIKKRHGEEERIKSARGREKSSDEIFVCERVCTSKRMLKKVGAFSKDPIPDTCVTVCGVSELDACSDACARTVCVNQHQVANWNDICLRRCQSECLKLSSSSSSSRYS

SEQ ID NO: 1010 - protein, 313 aa, Arabidopsis thaliana
  Clone ID: AT_T22B4.C1.p50.tg
MEMMNWERRSLLNELIHGLKAAKQLQGSSSPSLSASSSYLTTEIKENLLHNIVSSFKKAILMLNGSTTQHNPTIELAPDPLAHPGKVPGSPASITGNPRSEEFFNVRSKEFNLSSKKRKMLPKWTEQVRISPERGLEGPHDDIFSWRKYGQKDILGAKFPRSYYRCTFRNTQYCWATKQVQRSDGDPTIFEVTYRGTHTCSQGIPLPEKRETKPKHTVAVNYQNLRASLTVRTGGLGSEAFSFPVTSPLYTYESINGGGTFYHHVGSSGPSDFTGLISTNTSTGSSPIFDVNFQFDPTAEINTGFPTFFHNSI

SEQ ID NO: 1011 - protein, 489 aa, Arabidopsis thaliana
  Clone ID: AT_T15B16.C1.p12.tg
MEEHIQDRREIAFLHSGEFLHGDSDSKDHQPNESPVERHHESSIKEVDFFAAKSQPFDLGHVRTTTIVGSSGFNDGLGLVNSCHGTSSNDGDDKTKTQISRLKLELERLHEENHKLKHLLDEVSESYNDLQRRVLLARQTQVEGLHHKQHEDVPQAGSSQALENRRPKDMNHETPATTLKRRSPDDVDGRDMHRGSPKTPRIDQNKSTNHEEQQNPHDQLPYRKARVSVRARSDATTVNDGCQWRKYGQKMAKGNPCPRAYYRCTMAVGCPVRKQVQRCAEDTTILTTTYEGNHNHPLPPSATAMAATTSAAAAMLLSGSSSSNLHQTLSSPSATSSSSFYHNFPYTSTIATLSASAPFPTITLDLTNPPRPLQPPPQFLSQYGPAAFLPNANQIRSMNNNNQQLLIPNLFGPQAPPREMVDSVRAAIAMDPNFTAALAAAISNIIGGGNNDNNNNTDINDNKVDAKSGGSSNGDSPQLPQSCTTFSTN

SEQ ID NO: 1012 - protein, 624 aa, Arabidopsis thaliana
  Clone ID: AT_F28M20.C1.p10.tg
MGSFQIFVFQKKEVSVLASTHLKRKWLEQDESASELREELNRVNSENKKLTEMLARVCESYNELHNHLEKLQSRQSPEIEQTDIPIKKRKQDPDEFLGFPIGLSSGKTENSSSNEDHHHHHQQHEQKNQLLSCKRPVTDSFNKAKVSTVYVPTETSDTSLRQMTKQSVTLQTVKDGFQWRKYGQKVTRDNPSPRAYFRCSFAPSCPVKKKVQRSAEDPSLLVATYEGTHNHLGPNASEGDATSQGGSSTVTLDLVNGCHRLALEKNERDNTMQEVLIQQMASSLTKDSKFTAALAAAISGRRFVGRWLSGLRSSKGKRDAGEEQEDDTRRYQLAPIRCSTSLNQLVMQDNKQNCRLNKSKEPETNTFESQSRESPLEVGIGSFLLYLVVASKTELDKMTNLRMQMEMFLLNAKEQLQKKDTPMSSNEASGFQFSPQEFSNLASSIFQESSSSVLQEEYTEFEVSEPEDYRRGTDCNSKLQAEVGRLPLGEKAEDRQTKHQIQRQCKLKDNEVTKSHIPEMVVSDERYGVCPYELDKKLHELLETRQQEELVKLETALNRVERRLQEKETEVSWWKDAARLLAQRVPESSRSGLEWCNPDSSTCSERSVPRSYEACSIHRTSFSR

SEQ ID NO: 1013 - protein, 571 aa, Arabidopsis thaliana
  Clone ID: AT_T15N24.C1.p90.tg
MNPQANDRKEFQGDCSATGDLTAKHDSAGGNGGGGARYKLMSPAKLPISRSTDITIPPGLSPTSFLESPVFISNIKKTVFFKTSCLLIDQPEPSPTTGSLFKPRPVHISASSSSYTGRGFHQNTFTEQKSSEFEFRPPASNMVYAELGKIRSEPPVHFQGQGHGSSHSPSSISDAAGSSSELSRPTPPCQMTPTSSDIPAGSDQEESIQTSQNDSRGSTPSILADDGYNWRKYGQKHVKGSEFPRSYYKCTHPNCEVKKLFERSHDGQITDIIYKGTHDHPKPQPGRRNSGGMAAQEERLDKYPSSTGRDEKGSGVYNLSNPNEQTGNPEVPPISASDDGGEAAASNRNKDEPDDDDPFSKRRRMEGAMEITPLVKPIREPRVVVQTLSEVDILDDGYRWRKYGQKVVRGNPNPRSYYKCTAHGCPVRKHVERASHDPKAVITTYEGKHDHDVPTSKSSSNHEIQPRFRPDETDTISLNLGVGISSDGPNHASNEHQHQNQQLVNQTHPNGVNFRFVHASPMSSYYASLNSGMNQYGQRETKNETQNGDISSLNNSSYPYPPNMGRVQSGP

SEQ ID NO: 1014 - protein, 330 aa, Arabidopsis thaliana
  Clone ID: AT_F7O18.C1.p30.tg
MEEVEAANRSAIESCHGVLNLLSQRTSDPKSLTVETGEVVSKFKRVASLLTRGLGHGKFRSTNKFRSSFPQHIFLESPICCGNDLSGDYTQVLAPEPLQMVPASAVYNEMEPKHQLGHPSLMLSHKMCVDKSFLELKPPPFRAPYQLIHNHQQIAYSRSNSGVNLKFDGSGSSCYTPSVSNGSRSFVSSLSMDASVTDYDRNSFHLTGLSRGSDQQHTRKMCSGSLKCGSRSKCHCSKKRKLRVKRSIKVPAISNKIADIPPDEYSWRKYGQKPIKGSPHPRGYYKCSSVRGCPARKHVERCIDETSMLIVTYEGEHNHSRILSSQSAHT

SEQ ID NO: 1015 - protein, 309 aa, Arabidopsis thaliana
  Clone ID: AT_T28J14.C1.p40.tg
MGSFDRQRAVPKFKTATPSPLPLSPSPYFTMPPGLTPADFLDSPLLFTSSNILPSPTTGTFPAQSLNYNNNGLLIDKNEIKYEDTTPPLFLPSMVTQPLPQLDLFKSEIMSSNKTSDDGYNWRKYGQKQVKGSENPRSYFKCTYPNCLTKKKVETSLVKGQMIEIVYKGSHNHPKPQSTKRSSSTAIAAHQNSSNGDGKDIGEDETEAKRWKREENVKEPRVVVQTTSDIDILDDGYRWRKYGQKVVKGNPNPRSYYKCTFTGCFVRKHVERAFQDPKSVITTYEGKHKHQIPTPRRGPVLRLLGKTET

SEQ ID NO: 1016 - protein, 235 aa, Arabidopsis thaliana
  Clone ID: AT_T21F11.C1.p8.tg
MSLEIDAKAVSALLLGQGCANNLKTLLKNHETGSVSTEPLINSILDSFSFALSSQNIPRHVSQRSSKKKMCGIQGMEDSPTPAHIDGFIWRKYGQKTIKTSPHQRWYYRCAYAKDQNCDATKRVQKIQDNPPVYRNTYVGQHACEAPAYAVNNGGTYGSKMIKFDYVIPESVMPQPLSIDSQEITMEDKDTDDHILNYINEHLMEDEAYDVFPDVLGERCCFGLEPFPGLNINKS

SEQ ID NO: 1017 - protein, 1372 aa, Arabidopsis thaliana
  Clone ID: AT_K21C13.C1.p24.tg
MTESEQIVYISCIEEVRYSFVSHLSKALQRKGVNDVFIDSDDSLSNESQSMVERARVSVMILPGNRTVSLDKLVKVLDCQKNKDQVVVPVLYGVRSSETEWLSALDSKGFSSVHHSRKECSDSQLVKETVRDVYEKLFYMERIGIYSKLLEIEKMINKQPLDIRCVGIWGMPGIGKTTLAKAVFDQMSGEFDAHCFIEDYTKAIQEKGVYCLLEEQFLKENAGASGTVTKLSLLRDRLNNKRVLVVLDDVRSPLVVESFLGGFDWFGPKSLIIITSKDKSVFRLCRVNQIYEVQGLNEKEALQLFSLCASIDDMAEQNLHEVSMKVIKYANGHPLALNLYGRELMGKKRPPEMEIAFLKLKECPPAIFVDAIKSSYDTLNDREKNIFLDIACFFQGENVDYVMQLLEGCGFFPHVGIDVLVEKSLVTISENRVRMHNLIQDVGRQIINRETRQTKRRSRLWEPCSIKYLLEDKEQNENEEQKTTFERAQVPEEIEGMFLDTSNLSFDIKHVAFDNMLNLRLFKIYSSNPEVHHVNNFLKGSLSSLPNVLRLLHWENYPLQFLPQNFDPIHLVEINMPYSQLKKLWGGTKDLEMLKTIRLCHSQQLVDIDDLLKAQNLEVVDLQGCTRLQSFPATGQLLHLRVVNLSGCTEIKSFPEIPPNIETLNLQGTGIIELPLSIVKPNYRELLNLLAEIPGLSGVSNLEQSDLKPLTSLMKISTSYQNPGKLSCLELNDCSRLRSLPNMVNLELLKALDLSGCSELETIQGFPRNLKELYLVGTAVRQVPQLPQSLEFFNAHGCVSLKSIRLDFKKLPVHYTFSNCFDLSPQVVNDFLVQAMANVIAKHIPRERHVTGFSQKTVQRSSRDSQQELNKTLAFSFCAPSHANQNSKLDLQPGSSSMTRLDPSWRNTLVGFAMLVQVAFSEGYCDDTDFGISCVCKWKNKEGHSHRREINLHCWALGKAVERDHTFVFFDVNMRPDTDEGNDPDIWADLVVFEFFPVNKQRKPLNDSCTVTRCGVRLITAVNCNTSIENISPVLSLDPMEVSGNEDEEVLRVRYAGLQEIYKALFLYIAGLFNDEDVGLVAPLIANIIDMDVSYGLKVLAYRSLIRVSSNGEIVMHYLLRQMGKEILHTESKKTDKLVDNIQSSMIATKEIEITRSKSRRKNNKEKRVVCVVDRGSRSSDLWVWRKYGQKPIKSSPYPRSYYRCASSKGCFARKQVERSRTDPNVSVITYISEHNHPFPTLRNTLAGSTRSSSSKCSDVTTSASSTVSQDKEGPDKSHLPSSPASPPYAAMVVKEEDMEQWDNMEFDVDVEEDTFIPELFPEDTFADMDKLEENSQTMFLSRRSSGGNMEAQGKNSSDDREVNLPSKILNR

SEQ ID NO: 1018 - protein, 324 aa, Arabidopsis thaliana
  Clone ID: AT_F3L17.C1.p120.tg
MAVDLMRFPKIDDQTAIQEAASQGLQSMEHLIRVLSNRPEQQHNVDCSEITDFTVSKFKTVISLLNRTGHARFRRGPVHSTSSAASQKLQSQIVKNTQPEAPIVRTTTNHPQIVPPPSSVTLDFSKPSIFGTKAKSAELEFSKENFSVSLNSSFMSSAITGDGSVSNGKIFLASAPLQPVNSSGKPPLAGHPYRKRCLEHEHSESFSGKVSGSAYGKCHCKKRKNRMKRTVRVPAISAKIADIPPDEYSWRKYGQKPIKGSPHPRGYYKCSTFRGCPARKHVERALDDPAMLIVTYEGEHRHNQSAMQENISSSGINDLVFASA

SEQ ID NO: 1019 - protein, 353 aa, Arabidopsis thaliana
  Clone ID: AT_T22A6.C1.p70.tg
MTVELMMSSYSGGGGGGDGFPAIAAAAKMEDTALREAASAGIHGVEEFLKLIGQSQQPTEKSQTEITAVTDVAVNSFKKVISLLGRSRTGHARFRRAPASTQTPFKQTPVVEEEVEVEEKKPETSSVLTKQKTEQYHGGGSAFRVYCPTPIHRRPPLSHNNNNNQNQTKNGSSSSSPPMLANGAPSTINFAPSPPVSATNSFMSSHRCDTDSTHMSSGFEFTNPSQLSGSRGKPPLSSASLKRRCNSSPSSRCHCSKKRKSRVKRVIRVPAVSSKMADIPSDEFSWRKYGQKPIKGSPHPRGYYKCSSVRGCPARKHVERALDDAMMLIVTYEGDHNHALVLETTTMNHDKTL

SEQ ID NO: 1020 - protein, 471 aa, Arabidopsis thaliana
  Clone ID: AT_F6A14.C1.p5.tg
MDEAKEENRRLKSSLSKIKKDFDILQTQYNQLMAKHNEPTKFQSKGHHQDKGEDEDREKVNEREELVSLSLGRRLNSEVPSGSNKEEKNKDVEEAEGDRNYDDNEKSSIQGLSMGIEYKALSNPNEKLEIDHNQETMSLEISNNNKIRSQNSFGFKNDGDDHEDEDEILPQNLVKKTRVSMNDGCQWRKYGQKIAKGNPCPRAYYRCTIAASCPVRKQVQRCSEDMSILISTYEGTHNHPLPMSATAMASATSAAASMLLSGASSSSSAAADLHGLNFSLSGNNITPKPKTHFLQSPSSSGHPTVTLDLTTSSSSQQPFLSMLNRFSSPPSNVSRSNSYPSTNLNFSNNTNTLMNWGGGGNPSDQYRAAYGNINTHQQSPYHKIIQTRTAGSSFDPFGRSSSSHSPQINLDHIGIKNIISHQVPSLPAETIKAITTDPSFQSALATALSSIMGGDLKIDHNVTRNEAEKSP

SEQ ID NO: 1021 - protein, 485 aa, Arabidopsis thaliana
  Clone ID: AT_F20N2.C1.p13.tg
MSDFDENFIEMTSYWAPPSSPSPRTILAMLEQTDNGLNPISEIFPQESLPRDHTDQSGQRSGLRERLAARVGFNLPTLNTEENMSPLDAFFRSSNVPNSPVVAISPGFSPSALLHTPNMVSDSSQIIPPSSATNYGPLEMVETSGEDNAAMMMFNNDLPYQPYNVDLPSLEVFDDIATEESFYIPSYEPHVDPIGTPLVTSFESELVDDAHTDIISIEDSESEDGNKDDDDEDFQYEDEDEDQYDQDQDVDEDEEEEKDEDNVALDDPQPPPPKRRRYEVSNMIGATRTSKTQRIILQMESDEDNPNDGYRWRKYGQKVVKGNPNPRSYFKCTNIECRVKKHVERGADNIKLVVTTYDGIHNHPSPPARRSNSSSRNRSAGATIPQNQNDRTSRLGRAPPTPTPPTPPPSSYTPEEMRPFSSLATEIDLTEVYMTGISMLPNIPVYENSGFMYQNDEPTMNAMPDGSDVYDGIMERLYFKFGVDM

SEQ ID NO: 1022 - protein, 255 aa, Arabidopsis thaliana
  Clone ID: AT_T20L15.C1.p170.tg
MEKLLHGHGCANQLLIMDQTESDSSMEREDLAKSVLHCFSDALSILIDTNDHQDDQSNNSSPQDSSPVLESSRKPLHKRGRKTSMAESSDYHRHESSTPIYHDGFLWRKYGQKQIKESEYQRSYYKCAYTKDQNCEAKKQVQKIQHNPPLYSTTYFGQHICQLHQAYATFPIDTSDFEEHEGSHMIRFGHPNISFSSSTSNLRQHQNHQDRIKDEYMKPVIAEDWSPSQWMSSEVALAVEAFEFNPFWTSHDLSS

SEQ ID NO: 1023 - protein, 514 aa, Arabidopsis thaliana
  Clone ID: AT_F7A19.C1.p5.tg
MSEKEEAPSTSKSTGAPSRPTLSLPPRPFSEMFFNGGVGFSPGPMTLVSNMFPDSDEFRSFSQLLAGAMSSPATAAAAAAAATASDYQRLGEGTNSSSGDVDPRFKQNRPTGLMISQSQSPSMFTVPPGLSPAMLLDSPSFLGLFSPVQGSYGMTHQQALAQVTAQAVQANANMQPQTEYPPPSQVQSFSSGQAQIPTSAPLPAQRETSDVTIIEHRSQQPLNVDKPADDGYNWRKYGQKQVKGSEFPRSYYKCTNPGCPVKKKVERSLDGQVTEIIYKGQHNHEPPQNTKRGNKDNTANINGSSINNNRGSSELGASQFQTNSSNKTKREQHEAVSQATTTEHLSEASDGEEVGNGETDVREKDENEPDPKRRSTEVRISEPAPAASHRTVTEPRIIVQTTSEVDLLDDGYRWRKYGQKVVKGNPYPRSYYKCTTPGCGVRKHVERAATDPKAVVTTYEGKHNHDLPAAKSSSHAAAAAQLRPDNRPGGLANLNQQQQQQPVARLRLKEEQTT

SEQ ID NO: 1024 - protein, 241 aa, Arabidopsis thaliana
  Clone ID: AT_T12I7.C1.p5.tg
MFSNIDHKAVAALLHGQGCANILKTVLDNCKVSSVSTEPLINTILDSFSLALSSVNSPNRQPHHESSSRDMAGLVPQRSSKKKICGVKGLEIYRDDSPNPRLDDGFTWRKYGQKTIKTSLYQRCYYRCAYAKDQNCYATKRVQMIQDSPPVYRTTYLGQHTCKAFGVHDNTYGSEMINFDQVVSESVMRQLATIGEQAVLMEDEANHIMNQEYDINDYLVDDEVFWGNEFPLFSSEDLMLF

SEQ ID NO: 1025 - protein, 249 aa, Arabidopsis thaliana
  Clone ID: AT_T12I7.C1.p1.tg
MFSNIDQTAVAALLRGQGCANSLKRLLENHKLSSDSTEPLIYTILNSFSLALSFVDPPSLLPHNESSLQNMTSHVLQRSSKKKYYGAEDLEYYRDESPTPRPDDGFTWRKYGQKTIKTSPYQRCYYRCTYAKDQNCNARKRVQMIQDNPPVYRTTYLGKHVCKAVAVHDDTYGSEMIKFDQVVSESVMPQLATIDEQAITMEDEAIDHIMNQECDINDFSVDDDPFWASQFPPFSSEDIMFFDNIANLD

SEQ ID NO: 1026 - protein, 179 aa, Arabidopsis thaliana
  Clone ID: AT_MBK23.C1.p9.tg
MDREDINPMLSRLDVENNNTFSSFVDKTLMMMPPSTFSGEVEPSSSSSWYPESFHVHAPPLPPENDQIGEKGKELKEKRSRKVPRIAFHTRSDDDVLDDGYRWRKYGQKSVKHNAHPRSYYRCTYHTCNVKKQVQRLAKDPNVVVTTYEGVHNHPCEKLMETLNPLLRQLQFLSSFSNL

SEQ ID NO: 1027 - protein, 487 aa, Arabidopsis thaliana
  Clone ID: AT_F1O13.C1.p1.tg
MAEVGKVLASDMELDHSNETKAVDDVVATTDKAEVIPVAVTRTETVVESLESTDCKELEKLVPHTVASQSEVDVASPVSEKAPKVSESSGALSLQSGSEGNSPFIREKVMEDGYNWRKYGQKLVKGNEFVRSYYRCTHPNCKAKKQLERSAGGQVVDTVYFGEHDHPKPLAGAVPINQDKRSDVFTAVSKGEQRIDIVSLIYKLCIVSYDIMFVEKTSGSSVQTLRQTEPPKIHGGLHVSVIPPADDVKTDISQSSRITGDNTHKDYNSPTAKRRKKGGNIELSPVERSTNDSRIVVHTQTLFDIVNDGYRWRKYGQKSVKGSPYPRSYYRCSSPGCPVKKHVERSSHDTKLLITTYEGKHDHDMPPGRVVTHNNMLDSEVDDKEGDANKTPQSSTLQSITKDQHVEDHLRKKTKTNGFEKSLDQGPVLDEKLKEEIKERSDANKDHAANHAKPEAKSDDKTTVCQEKAVGTLESEEQKPKTEPAQS

SEQ ID NO: 1028 - protein, 249 aa, Arabidopsis thaliana
  Clone ID: AT_F28G11.C1.p3.tg
MVSNIDHKAMEALLRGQGCANNLKILLENGEISSVSTEPLIHTILDSFSLALSFMDSPNHPPYHESSSHNMASHMSRRSSKQKLCVAEGLVNYNHDSRTMCPNDGFTWRKYGQKTIKASAHKRCYYRCTYAKDQNCNATKRVQKIKDNPPVYRTTYLGKHVCKAFAVHDDTYSSTMIRFDQVVPEPIMPQLTTIDHQVITVEENSAEHIMNQECDINDYLVDDDPFWASQFPPFPSSDTMFLENISAFD

SEQ ID NO: 1029 - protein, 387 aa, Arabidopsis thaliana
  Clone ID: AT_T17F3.C1.p16.tg
MIKEETVSYFQTFDGVMAESDKEEELDATKAKVEKVREENEKLKLLLSTILNNYNSLQMQVSKVLGQQQGASSMELDHIDRQDENNDYDVDISLRLGRSEQKISKKEENKVDKISTKNVEESKDKRSALGFGFQIQSYEASKLDDLCRQVKLANAENKCVSSRKDVKSVRNENHQDVLEEHEQTGLKKTRVCVKASCEDPSINDGCQWRKYGQKTAKTNPLPRAYYRCSMSSNCPVRKQVQRCGEEETSAFMTTYEGNHDHPLPMEASHMAAGTSAAASLLQSGSSSSSSSTSASLSYFFPFHHFSISTTNSHPTVTLDLTRPNYPNQLPDDYPLSSSSFSLNFSSPDPPPPSSHDHTLNFSGLRTQAPLSTDSLLARYRTRLSGQQ

SEQ ID NO: 1030 - protein, 568 aa, Arabidopsis thaliana
  Clone ID: AT_M3E9.C1.p130.tg
MAGIDNKAAVMGEWFDCSTTNHRKRSKAELGREFSLNYIKNEDSLQTTFQESSRGALRERIAARSGFNAPWLNTEDILQSKSLTISSPGLSPATLLESPVFLSNPLLSPTTGKLSSVPSDKAKAELFDDITTSLAFQTISGSGLDPTNIALEPDDSQDYEERQLGGLGDSMACCAPADDGYNWRKYGQKLVKGSEYPRSYYKCTHPNCEAKKKVERSREGHIIEIIYTGDHIHSKPPPNRRSGIGSSGTGQDMQIDATEYEGFAGTNENIEWTSPVSAELEYGSHSGSMQVQNGTHQFGYGDAAADALYRDENEDDRTSHMSVSLTYDGEVEESESKRRKLEAYATETSGSTRASREPRVVVQTTSDIDILDDGYRWRKYGQKVVKGNPNPRSYYKCTANGCTVTKHVERASDDFKSVLTTYIGKHTHVVPAARNSSHVGAGSSGTLQGSLATQTHNHNVHYPMPHSRSEGLATANSSLFDFQSHLRHPTGFSVYIGQSELSDLSMPGLTIGQEKLTSLQAPDIGDPTGLMLQLAAQPKVEPVSPQQGLDLSASSLICREMLSRLRQI

SEQ ID NO: 1031 - protein, 304 aa, Arabidopsis thaliana
  Clone ID: AT_F9D16.C1.p20.tg
MDEGDLEAIVRGYSGSGDAFSGESSGTFSPSFCLPMETSSFYEPEMETSGLDELGELYKPFYPFSTQTILTSSVSLPEDSKPFRDDKKQRSHGCLLSNGSRADHIRISESKSKKSKKNQQKRVVEQVKEENLLSDAWAWRKYGQKPIKGSPYPRSYYRCSSSKGCLARKQVERNPQNPEKFTITYTNEHNHELPTRRNSLAGSTRAKTSQPKPTLTKKSEKEVVSSPTSNPMIPSADESSVAVQEMSVAETSTHQAAGAIEGRRLSNGLPSDLMSGSGTFPSFTGDFDELLNSQEFFSGYLWNY

SEQ ID NO: 1032 - protein, 782 aa, Arabidopsis thaliana
  Clone ID: AT_F6I18.C1.p160.tg
MGPLEALKKMKNTNNFVFSIEIFCYFRAESYHTLKYVYVFPLSVTILEERKTNSTFLAVVSSIKQNPRDTEKEDKRESSMEEDTGIDEAKTYTVEKSEKVEPEKDGLSQFRDEEKSLGADMEDLHDETVRETLGKDQVQGVRENSSVEPNVEDVLEVNETDSVKETVVSAIVPVDEVEENRQVETSPSLAASSDSLTVTPCLSLDPATASTAQDLPLVSVPTKQEQRSDSPVVNRLSVTPVPRTPARDGYNWRKYGQKQVKSPKGSRSYYRCTYTECCAKKIECSNDSGNVVEIVNKGLHTHEPPRKTSFSPREIRVTTAIRPVSEDDTVVEELSIVPSGSDPSASTKEYICESQTLVDRKRHCENEAVEEPEPKRRQSSDSVSKPGKKNKFVVHAAGDVGICGDGYRWRKYGQKMVKGNPHPRNYYRCTSAGCPVRKHIETAVENTKAVIITYKGVHNHDMPVPKKRHGPPSSMLVAAAAPTSMRTRTDDQVNIPTSSQCSVGRESEKQSKEALDVGGEKCVRALRWRVFDAFTRSISSFHGIEFSGTSISHGTVIPNRSLTRNLPWYSHWYRSQDRCFSSNTKDTDEDEESSEGEDDDEEEGEDFEDSADMEVEREYSPAEKVEEAEEIGYKVMGPLKPSERLFKPYEPVFAIVQIGSHQFKVSNGDSIFTEKLKFCDINDKLELTKVLLLGSASQTIIGRPILPDATVHAVVEEHALDEKVLIFKKKRRKNYRRTRGHRQELTKLRITDIQGIEKPEPKIVHKPSKEAVTEQTKAELVA

SEQ ID NO: 1033 - protein, 1895 aa, Arabidopsis thaliana
  Clone ID: AT_F16J13.C1.p90.tg
MSEKEELPLTLTSIGAATATSDYHQRVGSSGEGISSSSSDVDPRFMQNSPTGLMISQSSSMCTVPPGMAATPPISSGSGLSQQLNNSSSSKLCQVEGCQKGARDASGRCISHGGGRRCQKPDCQKGAEGKTVYCKAHGGGRRCEYLGCTKGAEGSTDFCIAHGGGRRCNHEDCTRSAWGRTEFCVKHGGGARCKTYGCGKSASGPLPFCRAHGGGKKCSHEDCTGFARGRSGLCLMHGGGKRCQRENCTKSAEGLSGLCISHGGGRRCQSIGCTKGAKGSKMFCKACITKRPLTIDGGGNMGGVTTGDALNYLKAVKDKFEDSEKYDTFLEVLNDCKHQGVDTSGVIARLKDLFKGHDDLLLGFNTYLSKEYQITILPEDDFPIDFLDKVEGPYEMTYQQAQTVQANANMQPQTEYPSSSAVQSFSSGQPQIPTSAPDSSLLAKSNTSGITIIEHMSQQPLNVDKQVNDGYNWQKYGQKKVKGSKFPLSYYKCTYLGCPSKRKVERSLDGQVAEIVYKDRHNHEPPNQGKDGSTTYLSGSSTHINCMSSELTASQFSSNKTKIEQQEAASLATTIEYMSEASDNEEDSNGETSEGEKDEDEPEPKRRITEVQVSELADASDRTVREPRVIFQTTSEVDNLDDGYRWRKYGQKVVKGNPYPRFSSSKDYDVVIRYGRADISNEDFISHLRASLCRRGISVYEKFNEVDALPKCRVLIIVLTSTYVPSNLLNILEHQHTEDRVVYPIFYRLSPYDFVCNSKNYERFYLQDEPKKWQAALKEITQMPGYTLTDKSESELIDEIVRDALKVLCSADKVNMIGMDMQVEEILSLLCIESLDVRSIGIWGTVGIGKTTIAEEIFRKISVQYETCVVLKDLHKEVEVKGHDAVRENFLSEVLEVEPHVIRISDIKTSFLRSRLQRKRILVILDDVNDYRDVDTFLGTLNYFGPGSRIIMTSRNRRVFVLCKIDHVYEVKPLDIPKSLLLLDRGTCQIVLSPEVYKTLSLELVKFSNGNPQVLQFLSSIDREWNKLSQEVKTTSPIYIPGIFEKSCCGLDDNERGIFLDIACFFNRIDKDNVAMLLDGCGFSAHVGFRGLVDKSLLTISQHNLVDMLSFIQATGREIVRQESADRPGDRSRLWNADYIRHVFINDTGTSAIEGIFLDMLNLKFDANPNVFEKMCNLRLLKLYCSKAEEKHGVSFPQGLEYLPSKLRLLHWEYYPLSSLPKSFNPENLVELNLPSSCAKKLWKGKKARFCTTNSSLEKLKKMRLSYSDQLTKIPRLSSATNLEHIDLEGCNSLLSLSQSISYLKKLVFLNLKGCSKLENIPSMVDLESLEVLNLSGCSKLGNFPEISPNVKELYMGGTMIQEIPSSIKNLVLLEKLDLENSRHLKNLPTSIYKLKHLETLNLSGCISLERFPDSSRRMKCLRFLDLSRTDIKELPSSISYLTALDELLFVDSRRNSPVVTNPNANSTELMPSESSKLEILGTPADNEVVVGGTVEKTRGIERTPTILVKSREYLIPDDVVAVGGDIKGLRPPVLQLQPAMKLSHIPRGSTWDFVTHFAPPETVAPPSSSSEAREEEVETEETGAMFIPLGDKETCSFTVNKGDSSRTISNTSPIYASEGSFITCWQKGQLLGRGSLGSVYEGISADGDFFAFKEVSLLDQGSQAHEWIQQVEGGIALLSQLQHQNIVRYRGTTKDESNLYIFLELVTQGSLRKLYQRNQLGDSVVSLYTRQILDGLKYLHDKGFIHRNIKCANVLVDANGTVKLADFGLAKVMSLWRTPYWNWMAPEVILNPKDYDGYGTPADIWSLGCTVLEMLTGQIPYSDLEIGTALYNIGTGKLPKIPDILSLDARDFILTCLKVNPEERPTAAELLNHPFVNMPLPSSGSGSVSSLLRG

SEQ ID NO: 1034 - protein, 324 aa, Arabidopsis thaliana
  Clone ID: AT_F9D16.C1.p280.tg
MEGRDMLSWEQKTLLSELINGFDAAKKLQARLREAPSPSSSFSSPATAVAETNEILVKQIVSSYERSLLLLNWSSSPSVQLIPTPVTVVPVANPGSVPESPASINGSPRSEEFADGGGSSESHHRQDYIFNSKKRKMLPKWSEKVRISPERGLEGPQDDVFSWRKYGQKDILGAKFPRSYYRCTHRSTQNCWATKQVQRSDGDATVFEVTYRGTHTCSQAITRTPPLASPEKRQDTRVKPAITQKPKDILESLKSNLTVRTDGLDDGKDVFSFPDTPPFYNYGTINGEFGHVESSPIFDVVDWFNPTVEIDTTFPAFLHESIYY

SEQ ID NO: 1035 - protein, 274 aa, Arabidopsis thaliana
  Clone ID: AT_MNL12.C1.p11.tg
MEEEGYQWARRCGNNAVEDPFVYEPPLFFLPQDQHHMHGLMPNEDFIANKFVTSTLYSGPRIQDIANALALVEPLTHPVREISKSTVPLLERSTLSKVDRYTLKVKNNSNGMCDDGYKWRKYGQKSIKNSPNPRSYYKCTNPICNAKKQVERSIDESNTYIITYEGFHFHYTYPFFLPDKTRQWPNKKTKIHKHNAQDMNKKSQTQEESKEAQLGELTNQNHPVNKAQENTPANLEEGLFFPVDQCRPQQGLLEDVVAPAMKNIPTRDSVLTAS

SEQ ID NO: 1036 - protein, 161 aa, Arabidopsis thaliana
  Clone ID: AT_K9E15.C1.p3.tg
MGFDICYIDVGCRKKKHSESRVKKVVSIPAIDEGDLWTWRKYGQKDILGSRFPRGYYRCAYKFTHGCKATKQVQRSETDSNIVFQNKDEPNQPHLPSSSTPPGNAAVLFKMTDMEEFQDNMEVDNDVVDTRTLALFPEFQHQPEEEYPWSTFFDDYNFCFY

SEQ ID NO: 1037 - protein, 287 aa, Arabidopsis thaliana
  Clone ID: AT_F23O10.C1.p11.tg
MNDPDNPDLSNDDSAWRELTLTAQDSDFFDRDTSNILSDFGWNLHHSSDHPHSLRFDSDLTQTTGVKPTTVTSSCSSSAAVSVAVTSTNNNPSATSSSSEDPAENSTASAEKTPPPETPVKEKKKAQKRIRQPRFAFMTKSDVDNLEDGYRWRKYGQKAVKNSPFPRSYYRCTNSRCTVKKRVERSSDDPSIVITTYEGQHCHQTIGFPRGGILTAHDPHSFTSHHHLPPPLPNPYYYQELLHQLHRDNNAPSPRLPRPTTEDTPAVSTPSEEGLLGDIVPQTMRNP

SEQ ID NO: 1038 - protein, 548 aa, Arabidopsis thaliana [sequence omitted]

SEQ ID NO: 1039 - protein, 380 aa, Arabidopsis thaliana
  Clone ID: AT_T6B20.C1.p6.tg
MEEIEGTNRAAVESCHRVLNLLHRSQQQDHVGFEKNLVSETREAVIRFKRVGSLLSSSVGHARFRRAKKLQSHVSQSLLLDPCQQRTTEVPSSSSQKTPVLRSGFQELSLRQPSDSLTLGTRSFSLNSNAKAPLLQLNQQTMPPSNYPTLFPVQQQQQQQQQQQQQEQQQQQQQQQQQFHERLQAHHLHQQQQLQKHQAELMLRKCNGGISLSFDNSSCTPTMSSTRSFVSSLSIDGSVANIEGKNSFHFGVPSSTDQNSLHSKRKCPLKGDEHGSLKCGSSSRCHCAKKRKHRVRRSIRVPAISNKVADIPPDDYSWRKYGQKPIKGSPYPRGYYKCSSMRGCPARKHVERCLEDPAMLIVTYEAEHNHPKLPSQAITT

SEQ ID NO: 1040 - protein, 346 aa, Arabidopsis thaliana
  Clone ID: AT_T7D17.C1.p7.tg
MDSNSNNTKSIKRKVVDQLVEGYEFATQLQLLLSHQHSNQYHIDETRLVSGSGSVSGGPDPVDELMSKILGSFHKTISVLDSFDPVAVSVPIAVEGSWNASCGDDSATPVSCNGGDSGESKKKRLGVGKGKRGCYTRKTRSHTRIVEAKSSEDRYAWRKYGQKEILNTTFPRSYFRCTHKPTQGCKATKQVQKQDQDSEMFQITYIGYHTCTANDQTHAKTEPFDQEIIMDSEKTLAASTAQNHVNAMVQEQENNTSSVTAIDAGMVKEEQNNNGDQSKDYYEGSSTGEDLSLVWQETMMFDDHQNHYYCGETSTTSHQFGFIDNDDQFSSFFDSYCADYERTSAM

SEQ ID NO: 1041 - protein, 252 aa, Arabidopsis thaliana
  Clone ID: AT_F28N24.C1.p5.tg
MARSYNDHESSQETGPESPNSSTFNGMKALISSHSPKRRRSVEKRVVNVPMKEMEGSRHKGDTTPPSDSWAWRKYGQKPIKGSPYPRGYYRCSSTKGCPARKQVERSRDDPTMILITYTSEHNHPWPLTSSTRNGPKPKPEPKPEPEPEVEPEAEEEDNKFMVLGRGIETTPSCVDEFAWFTEMETTSSTILESPIFSSEKKTAVSGADDVAVFFPMGEEDESLFADLGELPECSVVFRHRSSVVGSQVEIF

SEQ ID NO: 1042 - protein, 294 aa, Arabidopsis thaliana
  Clone ID: AT_T5P19.C1.p50.tg
MDTNKAKKLKVMNQLVEGHDLTTQLQQLLSQPGSGLEDLVAKILVCFNNTISVLDTFEPISSSSSLAAVEGSQNASCDNDGKFEDSGDSRKRLGPVKGKRGCYKRKKRSETCTIESTILEDAFSWRKYGQKEILNAKFPRSYFRCTHKYTQGCKATKQVQKVELEPKMFSITYIGNHTCNTNAETPKSKTCDHHDEIFMDSEDHKSPSLSTSMKEEDNPHRHHGSSTENDLSLVWPEMVFEEDYHHQASYVNGKTSTSIDVLGSQDLMVFGGGGDFEFSENEHFSIFSSCSNLS

SEQ ID NO: 1043 - protein, 294 aa, Arabidopsis thaliana
  Clone ID: AT_T12C14.C1.p40.tg
MENVGVGMPFYDLGQTRVYPLLSDFHDLSAERYPVGFMDLLGVHRHTPTHTPLMHFPTTPNSSSSEAVNGDDEEEEDGEEQQHKTKKRFKFTKMSRKQTKKKVPKVSFITRSEVLHLDDGYKWRKYGQKPVKDSPFPRNYYRCTTTWCDVKKRVERSFSDPSSVITTYEGQHTHPRPLLIMPKEGSSPSNGSASRAHIGLPTLPPQLLDYNNQQQQAPSSFGTEYINRQEKGINHDDDDDHVVKKSRTRDLLDGAGLVKDHGLLQDVVPSHIIKEEILTSHIIKGDDVQDDTCI

SEQ ID NO: 1044 - protein, 330 aa, Arabidopsis thaliana
  Clone ID: AT_F4I4.C1.p30.tg
MEEVEAANKAAVESCHGVLNLLSQQTNDSKSIMVETREAVCKFKRVSSLLSRGLGQRKIKKLNNNNYKFSSSLLPQHMFLESPVCSNNAISGCIPILAPKPLQIVPAGPPPLMLFNQNMCLDKSFLELKPPSSRAVDPKPYQFIHTHQQGVYSRSKSGLNLKFDGSIGASCYSPSISNGSRSFVSSLSMDGSVTDYDRNSFHLIGLPQGSDHISQHSRRTSCSGSLKCGSKSKCHCSKKRKLRVKRSIKVPAISNKIADIPPDEYSWRKYGQKPIKGSPHPRGYYKCSSVRGCPARKHVERCVEETSMLIVTYEGEHNHSRILSSQSAHT

SEQ ID NO: 1045 - protein, 458 aa, Arabidopsis thaliana
  Clone ID: AT_F1N20.C1.p170.tg
MVTYFCVDFFSEKRDRVSRENINDDDDEGNKVLIKMEGSRVEENDRSRDVNIGLNLLTANTGSDESTVDDGLSMDMEDKRAKIEAQESKAEGRKRQELQIMVPRQFMDLGPSSGAAEHGAEVSSEERTTVRSGSPPSLLESSNPRENGKRLLGREESSEESESNAWGNPNKVPKHNPSSSNSNGNRNGNVIDQSAAEATMRKARVSVRARSEAAMISDGCQWRKYGQKMAKGNPCPRAYYRCTMAGGCPVRKQVQRCAEDRSILITTYEGNHNHPLPPAATAMASTTTAAASMLLSGSMSSQDGLMNPTNLLARAILPCSSSMATISASAPFPTITLDLTNSPNGNNPNMTTNNPLMQFAQRPGFNPAVLPQVVGQAMYNNQQQSKFSGLQLPAQPLQIAATSSVAESVSAASAAIASDPNFAAALAAAITSIMNGSSHQNNNTNNNNVATSNNDSRQ

SEQ ID NO: 1046 - protein, 528 aa, Arabidopsis thaliana
  Clone ID: AT_T26N6.C1.p6.tg
MFRFPVSLGGGPRENLKPSDEQHQRAVVNEVDFFRSAEKRDRVSREEQNIIADETHRVHVKRENSRVDDHDDRSTDHINIGLNLLTANTGSDESMVDDGLSVDMEEKRTKCENAQLREELKKASEDNQRLKQMLSQTTNNFNSLQMQLVAVMRQQEDHHHLATTENNDNVKNRHEVPEMVPRQFIDLGPHSDEVSSEERTTVRSGSPPSLLEKSSSRQNGKRVLVREESPETESNGWRNPNKVPKHHASSSICGGNGSENASSKVIEQAAAEATMRKARVSVRARSEAPMLSDGCQWRKYGQKMAKGNPCPRAYYRCTMAVGCPVRKQVQRCAEDRTILITTYEGNHNHPLPPAAMNMASTTTAAASMLLSGSTMSNQDGLMNPTNLLARTILPCSSSMATISASAPFPTITLDLTESPNGNNPTNNPLMQFSQRSGLVELNQSVLPHMMGQALYYNQQSKFSGLHMPSQPLNAGESVSAATAAIASNPNFAAALAAAITSIINGSNNQQNGNNNNSNVTTSNVDNRQ

SEQ ID NO: 1047 - protein, 161 aa, Arabidopsis thaliana
  Clone ID: AT_T19G15.C1.p20.tg
MNDADTNLGSSFSDDTHSVFEFPELDLSDEWMDDDLVSAVSGMNQSYGYQTSDVAGALFSGSSSCFSHPESPSTKTYVAATATASAGRVAFKTRSEVEVLDDGFKWRKYGKKMVKNSPHPRNYYKCSVDGCPVKKRVERDRDDPSFVITTYEGSHNHSSMN

SEQ ID NO: 1048 - protein, 399 aa, Arabidopsis thaliana
  Clone ID: AT_K6M13.C1.p6.tg
MEKKKEEDHHHQQQQQQQKEIKNTETKIEQEQEQEQKQEISQASSSSNMANLVTSSDHHPLELAGNLSSIFDTSSLPFPYSYFEDHSSNNPNSFLDLLRQDHQFASSSNSSSFSFDAFPLPNNNNNTSFFTDLPLPQAESSEVVNTTPTSPNSTSVSSSSNEAANDNNSGKEVTVKDQEEGDQQQEQKGTKPQLKAKKKNQKKAREARFAFLTKSDIDNLDDGYRWRKYGQKAVKNSPYPRSYYRCTTVGCGVKKRVERSSDDPSIVMTTYEGQHTHPFPMTPRGHIGMLTSPILDHGATTASSSSFSIPQPRYLLTQHHQPYNMYNNNSLSMINRRSSDGTFVNPGPSSSFPGFGYDMSQASTSTSSSIRDHGLLQDILPSQIRSDTINTQTNEENKK

SEQ ID NO: 1049 - protein, 282 aa, Arabidopsis thaliana
  Clone ID: AT_F1N18.C1.p10.tg
MDDHVEHNYNTSLEEVHFKSLSDCLQSSLVMDYNSLEKVFKFSPYSSPFQSVSPSVNNPYLNLTSNSPVVSSSSNEGEPKENTNDKSDQMEDNEGDLHGVGESSKQLTKQGKKKGEKKEREVRVAFMTKSEIDHLEDGYRWRKYGQKAVKNSPYPRSYYRCTTQKCNVKKRVERSFQDPSIVITTYEGKHNHPIPSTLRGTVAAEHLLVHRGGGGSLLHSFPRHHQDFLMMKHSPANYQSVGSLSYEHGHGTSSYNFNNNQPVVDYGLLQDIVPSMFSKNES

SEQ ID NO: 1050 - protein, 287 aa, Arabidopsis thaliana
  Clone ID: AT_MQJ16.C1.p11.tg
MNSPHEKAVQAIRYGHSCAMRLKRRLNHPMADGGPLSSYDLAKSIVESFSNAISILSAKPETEDDQFSDLSSRDSSPPPQGSPSKKRKIDSTNSSENWRDDSPDPIYYDGYLWRKYGQKSIKKSNHQRSYYRCSYNKDHNCEARKHEQKIKDNPPVYRTTYFGHHTCKTEHNLDAIFIAGQDPLDDFKSTQMIRFGKDQDQEKESRSNGFSLSVKHEEDIIKEQAIDQYREITSNDQDCQDVIEEYLSSPSGSYPPSSSSGSESADFNSDLLFDNPDSWDRYDQFYF

SEQ ID NO: 1051 - protein, 374 aa, Arabidopsis thaliana
  Clone ID: AT_T22E19.C1.p22.tg
MGFDFSTSKSKAKRQKRIEVRFASPLMGIDLSLKLEAEEKKKEIEGSKHSRENKEDEEHDASGDEDEQMVKEDEDDSSSLGLRTREEENEREELLQLQIQMESVKEENTRLRKLVEQTLEDYRHLEMKFPVIDKTKKMDLEMFLGVQGKRCVDITSKARKRGAERSPSMEREIGLSLSLEKKQKQEESKEAVQSHHQRYNSSSLDMNMPRIISSSQGNRKARVSVRARCETATMNDGCQWRKYGQKTAKGNPCPRAYYRCTVAPGCPVRKQVQRCLEDMSILITTYEGTHNHPLPVGATAMASTASTSPFLLLDSSDNLSHPSYYQTPQAIDSSLITYPQNSSYNNRTIRSLNFDGPSRGDHVSSSQNRLNWMM

SEQ ID NO: 1052 - protein, 327 aa, Arabidopsis thaliana
  Clone ID: AT_T9A21.C1.p10.tg
MSNETRDLYNYQYPSSFSLHEMMNLPTSNPSSYGNLPSQNGFNPSTYSFTDCLQSSPAAYESLLQKTFGLSPSSSEVFNSSIDQEPNRDVTNDVINGGACNETETRVSPSNSSSSEADHPGEDSGKSRRKRELVGEEDQISKKVGKTKKTEVKKQREPRVSFMTKSEVDHLEDGYRWRKYGQKAVKNSPYPRIIANGNENRSYYRCTTQKCNVKKRVERSFQDPTVVITTYEGQHNHPIPTNLRGSSAAAAMFSADLMTPRSFAHDMFRTAAYTNGGSVAAALDYGYGQSGYGSVNSNPSSHQVYHQGGEYELLREIFPSIFFKQEP

SEQ ID NO: 1053 - protein, 303 aa, Arabidopsis thaliana
  Clone ID: AT_MLE8.C1.p3.tg
MEKNHSSGEWEKMKNEINELMIEGRDYAHQFGSASSQETREHLAKKILQSYHKSLTIMNYSGELDQVSQGGGSPKSDDSDQEPLVIKSSKKSMPRWSSKVRIAPGAGVDRTLDDGFSWRKYGQKDILGAKFPRGYYRCTYRKSQGCEATKQVQRSDENQMLLEISYRGIHSCSQAANVGTTMPIQNLEPNQTQEHGNLDMVKESVDNYNHQAHLHHNLHYPLSSTPNLENNNAYMLQMRDQNIEYFGSTSFSSDLGTSINYNFPASGSASHSASNSPSTVPLESPFESYDPNHPYGGFGGFYS

SEQ ID NO: 1054 - protein, 326 aa, Arabidopsis thaliana
  Clone ID: AT_MPL12.C1.p15.tg
MSHEIKDLNNYHYTSSYNHYNINNQNMINLPYVSGPSAYNANMISSSQVGFDLPSKNLSPQGAFELGFELSPSSSDFFNPSLDQENGLYNAYNYNSSQKSHEVVGDGCATIKSEVRVSASPSSSEADHHPGEDSGKIRKKREVRDGGEDDQRSQKVVKTKKKEEKKKEPRVSFMTKTEVDHLEDGYRWRKYGQKAVKNSPYPRSYYRCTTQKCNVKKRVERSYQDPTVVITTYESQHNHPIPTNRRTAMFSGTTASDYNPSSSPIFSDLIINTPRSFSNDDLFRVPYASVNVNPSYHQQQHGFHQQESEFELLKEMFPSVFFKQEP

SEQ ID NO: 1055 - protein, 302 aa, Arabidopsis thaliana
  Clone ID: AT_F23A5.C1.p14.tg
MDQYSSSLVDTSLDLTIGVTRMRVEEDPPTSALVEELNRVSAENKKLSEMLTLMCDNYNVLRKQLMEYVNKSNITERDQISPPKKRKSPAREDAFSCAVIGGVSESSSTDQDEYLCKKQREETVVKEKVSRVYYKTEASDTTLVVKDGYQWRKYGQKVTRDNPSPRAYFKCACAPSCSVKKKVQRSVEDQSVLVATYEGEHNHPMPSQIDSNNGLNRHISHGGSASTPVAANRRSSLTVPVTTVDMIESKKVTSPTSRIDFPQVQKLLVEQMASSLTKDPNFTAALAAAVTGKLYQQNHTEK

SEQ ID NO: 1056 - protein, 421 aa, Arabidopsis thaliana
  Clone ID: AT_T5I8.C1.p10.tg
MENFQGDLTDVVRGIGGHVLSPETPPSNIWPLPLSHPTPSPSDLNINPFGDPFVSMDDPLLQELNSITNSGYFSTVGDNNNNIHNNNGFLVPKVFEEDHIKSQCSIFPRIRISHSNIIHDSSPCNSPAMSAHVVAAAAAASPRGIINVDTNSPRNCLLVDGTTFSSQIQISSPRNLGLKRRKSQAKKVVCIPAPAAMNSRSSGEVVPSDLWAWRKYGQKPIKGSPFPRGYYRCSSSKGCSARKQVERSRTDPNMLVITYTSEHNHPWPIQRNALAGSTRSSTSSSSNPNPSKPSTANVNSSSIGSQNTIYLPSSTTPPPTLSSSAIKDERGDDMELENVDDDDDNQIAPYRPELHDHQHQPDDFFADLEELEGDSLSMLLSHGCGGDGKDKTTASDGISNFFGWSGDNNYNNYDDQDSRSL

SEQ ID NO: 1057 - protein, 461 aa, Arabidopsis thaliana
  Clone ID: AT_T4P13.C1.p24.tg
MAVEDDVSLIRTTTLVAPTRPTITVPHRPPAIETAAYFFGGGDGLSLSPGPLSFVSSLFVDNFPDVLTPDNQRTTSFTQLLNGTMSVSPGGGGRSTAGMFAGGGPMFTIPSGFSPSSLLTSPMFFPPQSSAHTGFIQPRQQSQPQPQRPDTFPHHMPPSTSVAVHGRQSLDVSQVDQRARNHYNNPGNNNNNRSYNVVNVDKPADDGYNWRKYGQKPIKGCEYPRSYYKCTHVNCPVKKKVERSSDGQITQIIYKGQHDHERPQNRRGGGGRDSTEVGGAGQMMESSDDSGYRKDHDDDDDDDEDDEDLPASKIRRIDGVSTTHRTVTEPKIIVQTKSEVDLLDDGYRWRKYGQKVVKGNPHPRSYYKCTTPNCTVRKHVERASTDAKAVITTYEGKHNHDVPAARNGTAAATAAAVGPSDHHRMRSMSGNNMQQHMSFGNNNNTGQSPVLLRLKEEKITI

SEQ ID NO: 1058 - protein, 362 aa, Arabidopsis thaliana
  Clone ID: AT_F6A4.C1.p140.tg
MASKLCDSCKSATAALYCRPDAAFLCLSCDSKVHAANKLASRHARVWMCEVCEQAPAHVTCKADAAALCVTCDRDIHSANPLARRHERVPVTPFYDSVSSDGSVKHTAVNFLDDCYFSDIDGNGSREEEEEEAASWLLLPNPKTTTTATAGIVAVTSAEEVPGDSPEMNTGQQYLFSDPDPYLDLDYGNVDPKVESLEQNSSGTDGVVPVENRTVRIPTVNENCFEMDFTGGSKGFTYGGGYNCISHSVSSSSMEVGVVPDGGSVADVSYPYGGPATSGADPGTQRAVPLTSAEREARVMRYREKRKNRKFEKTIRYASRKAYAEMRPRIKGRFAKRTDTNESNDVVGHGGIFSGFGLVPTF

SEQ ID NO: 1059 - protein, 392 aa, Arabidopsis thaliana
  Clone ID: AT_F2P9.C1.p26.tg
MVVDVESRTASVTGEKMAARGCDACMKRSRASWYCPADDAFLCQSCDASIHSANHLAKRHERVRLQSSSPTETADKTTSVWYEGFRRKARTPRSKSCAFEKLLQIESNDPLVPELGGDEDDGFFSFSSVEETEESLNCCVPVFDPFSDMLIDDINGFCLVPDEVNNTTTNGELGEVEKAIMDDEGFMGFVPLDMDLEDLTMDVESLLEEEQLCLGFKEPNDVGVIKEENKVGFEINCKDLKRVKDEDEEEEEAKCENGGSKDSDREASNDKDRKTSLFLRLDYGAVISAWDNHGSPWKTGIKPECMLGGNTCLPHVVGGYEKLMSSDGSVTRQQGRDGGGSDGEREARVLRYKEKRRTRLFSKKIRYEVRKLNAEQRPRIKGRFVKRTSLLT

SEQ ID NO: 1060 - protein, 416 aa, Arabidopsis thaliana
  Clone ID: AT_F2J7.C1.p10.tg
MKSLANAVGAKTARACDSCVKRRARWYCAADDAFLCQSCDSLVHSANPLARRHERVRLKTASPAVVKHSNHSSASPPHEVATWHHGFTRKARTPRGSGKKNNSSIFHDLVPDISIEDQTDNYELEEQLICQVPVLDPLVSEQFLNDVVEPKIEFPMIRSGLMIEEEEDNAESCLNGFFPTDMELEEFAADVETLLGRGLDTESYAMEELGLSNSEMFKIEKDEIEEEVEEIKAMSMDIFDDDRKDVDGTVPFELSFDYESSHKTSEEEVMKNVESSGECVVKVKEEEHKNVLMLRLNYDSVISTWGGQGPPWSSGEPPERDMDISGWPAFSMVENGGESTHQKQYVGGCLPSSGFGDGGREARVSRYREKRRTRLFSKKIRYEVRKLNAEKRPRMKGRFVKRASLAAAASPLGVNY

SEQ ID NO: 1061 - protein, 319 aa, Arabidopsis thaliana
  Clone ID: AT_T30F21.C1.p24.tg
MKIQCNVCEAAEATVLCCADEAALCWACDEKIHAANKLAGKHQRVPLSASASSIPKCDICQEASGFFFCLQDRALLCRKCDVAIHTVNPHVSAHQRFLLTGIKVGLESIDTGPSTKSSPTNDDKTMETKPFVQSIPEPQKMAFDHHHHQQQQEQQEGVIPGTKVNDQTSTKLPLVSSGSTTGSIPQWQIEEIFGLTDFDQSYEYMENNGSSKTDVLKMKLLDSACLGKKLEKADTSRRGDSDSSSMMRSAEEDGEDNNNCLGGETSWAVPQIQSPPTASGLNWPKHFHHHSVFVPDITSSTPYTGSSPNQRVGKRRRRF

SEQ ID NO: 1062 - protein, 372 aa, Arabidopsis thaliana
  Clone ID: AT_MLP3.C1.p10.tg
MGYMCDFCGEQRSMVYCRSDAACLCLSCDRSVHSANALSKRHSRTLVCERCNAQPATVRCVEERVSLCQNCDWSGHNNSNNNNSSSSSTSPQQHKRQTISCYSGCPSSSELASIWSFCLDLAGQSICEQELGMMNIDDDGPTDKKTCNEDKKDVLVGSSSIPETSSVPQGKSSSAKDVGMCEDDFYGNLGMDEVDMALENYEELFGTAFNPSEELFGHGGIDSLFHKHQTAPEGGNSVQPAGSNDSFMSSKTEPIICFASKPAHSNISFSGVTGESSAGDFQECGASSSIQLSGEPPWYPPTLQDNNACSHSVTRNNAVMRYKEKKKARKFDKRVRYASRKARADVRRRVKGRFVKAGEAYDYDPLTPTRSY

SEQ ID NO: 1063 - protein, 433 aa, Arabidopsis thaliana
  Clone ID: AT_F13K9.C1.p15.tg
MSSSERVPCDFCGERTAVLFCRADTAKLCLPCDQQVHTANLLSRKHVRSQICDNCGNEPVSVRCFTDNLILCQECDWDVHGSCSVSDAHVRSAVEGFSGCPSALELAALWGLDLEQGRKDEENQVPMMAMMMDNFGMQLDSWVLGSNELIVPSDTTFKKRGSCGSSCGRYKQVLCKQLEELLKSGVVGGDGDDGDRDRDCDREGACDGDGDGEAGEGLMVPEMSERLKWSRDVEEINGGGGGGVNQQWNATTTNPSGGQSSQIWDFNLGQSRGPEDTSRVEAAYVGKGAASSFTINNFVDHMNETCSTNVKGVKEIKKDDYKRSTSGQVQPTKSESNNRPITFGSEKGSNSSSDLHFTEHIAGTSCKTTRLVATKADLERLAQNRGDAMQRYKEKRKTRRYDKTIRYESRKARADTRLRVRGRFVKASEAPYP

SEQ ID NO: 1064 - protein, 229 aa, Arabidopsis thaliana
  Clone ID: AT_F24B18.C1.p9.tg
MGKKKCELCCGVARMYCESDQASLCWDCDGKVHGANFLVAKHMRCLLCSACQSHTPWKASGLNLGPTVSICESCLARKKNNNSSLAGRDQNLNQEEEIIGCNDGAESYDEESDEDEEEEEVENQVVPAAVEQELPVVSSSSSVSSGEGDQVVKRTRLDLDLNLSDEMIKKSETILFEMQEENQSRPLKRLSRDEGLSRSTVVMNSSIVKLHGGRRKAEGCDTSSSSSFY

SEQ ID NO: 1065 - protein, 137 aa, Arabidopsis thaliana
  Clone ID: AT_K9D7.C1.p4.tg
MECERSSSSTSSETGAVRHRRTSSSSVSTVTRRMYECTFCKRGFTNAQALGGHMNIHRRDRLNKAKVQNDADVALSQTHRCFHVASDLGGYEQVDSVVLRTTTSNYIQHLRIGSMATRRENVVVEGNEIDLELRLGL

SEQ ID NO: 1066 - protein, 381 aa, Arabidopsis thaliana
  Clone ID: AT_F17F8.C1.p14.tg
MGKKKKRATEKVWCYYCDREFDDEKILVQHQKAKHFKCHVCHKKLSTASGMVIHVLQVHKENVTKVPNAKDGRDSTDIEIYGMQGIPPHVLTAHYGEEEDEPPAKVAKVEIPSAPLGGVVPRPYGMVYPPQQVPGAVPARPMYYPGPPMRHPAPVWQMPPPRPQQWYPQNPALSVPPAAHLGYRPQPLFPVQNMGMTPTPTSAPAIQPSPVTGVTPPGIPTSSPAMPVPQPLFPVVNNSIPSQAPPFSAPLPVGGAQQPSHADALGSADAYPPNNSIPGSIPSGTNAHSYASGPNTSGPSIGPPPVIANKAPSNQPNEVYLVWDDEAMSMEERRMSLPKYKVHDETSQLAIVGSEKHSMNSINAAIDRRISESRLAGRMAF

SEQ ID NO: 1067 - protein, 278 aa, Arabidopsis thaliana
  Clone ID: AT_F14I23.C1.p40.tg
MSSSMSSAGSSTPKSKKLKGIVVDMEKSKEKATRNTILKLGSPQEVTSERRIENSSFGSSAVRRGREIMKFYPSKSNKIYTCHFCKKGFSTSQALGGHQNAHKQEREWDKKRKEMEAEYPGLSFLNPFLDKPHILLGGYSQDALSNENHLGITLDPFKRLIYPSFNAGMNMAVVPRVTPTRFFTGNTSTNGSTSRVPDPLPSYNNLYPSNSRNVLPFPPPQTTKLSSNFVSQGNVLSEENFISKIGTNNIVEIDDDDDDIQPEEEKTKSGRIDLSLSL

SEQ ID NO: 1068 - protein, 332 aa, Arabidopsis thaliana
  Clone ID: AT_F11O6.C1.p15.tg
MESPPLYEISSSSSSEKPRHHFQSLDLFPNLNQNSCINNTLIEPLPLIDRINLNSNLDLNPNPLYAEEGEQEEEEEEEEDREVDVDLHIGLPGFGKPSNDAKQLKKRNGKEIATYDAGKGIENELSGKAYWIPAPEQILIGFTHFSCHVCFKTFNRYNNLQMHMWGHGSQYRKGPESLKGTQPRAMLGIPCYCCVEGCRNHIDHPRSKPLKDFRTLQTHYKRKHGHKPFSCRLCVGSSFYLSIVFEIGVWDINNLTLVDNDAAKKQLEFLMGGFKLLCQSEVQFLEMLTSMEETLKRMVCAVERIESRSISDDGRQLDLRIFTKGNPKSGLR

SEQ ID NO: 1069 - protein, 302 aa, Arabidopsis thaliana
  Clone ID: AT_T6J4.C1.p5.tg
MYNNNQYSFSGDEDSVVLSLGPPGQQYPSHNKPTSTKPSSDHEFNHPLTNPNGVTVALHIGPPSSDKETLSGGNNQEGLTARQGQYWIPSLSQILVGPTQFSCSVCNKTFNRFNNMQMHMWGHGSQYRKGPESLRGTKSSSSILRLPCYCCAEGCKNNIDHPRSKPLKDFRTLQTHYKRKHGAKPFRCRKKCEKTFAVRGDWRTHEKNCGKLWFCVCGSDFKHKRSLKDHVRAFGDGHAAHTVSDRVVGIGDADEDDEEEEEEEEDDVEEEDAHEENVRGEKNYGIRYDHFRRYGQISDDNY

SEQ ID NO: 1070 - protein, 427 aa, Arabidopsis thaliana
  Clone ID: AT_MUA22.C1.p14.tg
MSFVKKLEFKNIVVLTNEVVVNLSSEDIKEKENGVSYTWAFFGPNKISYSPGRIQLINRSGGNVQLDTCFMFVRPMATGMAVDTVGELGFPYWNPIRRRFPPDSPFFASGNVERELLAKQVTLDFTEDEINHLHKFVEIETRRISCPIVGCPERLKSLDHFEDHYNARHTASCSVCSRVYPTSRLLSIHISEAHDSFFQAKVSRGYDMYECLVEGCGLKFKTYKARHRHLIDKHKFPTTFEFFKKTQLSKKRREKLQRQHVSKLKHEEDKEAASSDAMEVEDKGSLDGLVSALSSLTTSDTTPSNVSFGRRHGRGLTFVPRIPINSKVAAAVDGDGWILPSPRSSNALELHVFLTTLHLPLQPLDEDSYVWKLVAQAVIYAIWKQRNNFIHNQQSIPAAWVFKTIDREMRSLTPSMRGGTGRSSETL

SEQ ID NO: 1071 - protein, 393 aa, Arabidopsis thaliana
  Clone ID: AT_F1O19.C1.p5.tg
MATETSSLKLFGINLLETTSVQNQSSEPRPGSGSGSESRKYECQYCCREFANSQALGGHQNAHKKERQLLKRAQMLATRGLPRHHNFHPHTNPLLSAFAPLPHLLSQPHPPPHMMLSPSSSSSKWLYGEHMSSQNAVGYFHGGRGLYGGGMESMAGEVKTHGGSLPEMRRFAGDSDRSSGIKLENDTQQKLKLLVDNGDYGFERGSRYGEYARLRESKLRMKRDFEKILKEEQVRFGFTREEEIRVLPEKKTRFGFNPNQRKTSSSSSSSLAQSVPDFSSMIRKENRRPPVNSNLLPRRTELTPPSMKSRNAAVFAGSVIRGSVSASAGEKKGIGMMRKSYAAVDDLKKISMAAASAINGGGGKRRSIGGGGGRKSLGGGGGGRTILGYRQIY

SEQ ID NO: 1072 - protein, 161 aa, Arabidopsis thaliana
  Clone ID: AT_MAC12.C1.p2.tg
MAEPPPSYLHFVGPAKTRSSSKRHSFSSSAHPASHRLFPCQYCPRKFYTSQALGGHQNAHKRERAAARRNLGVLANSPPILDDNNTFLRPYPCFYQNPFQGSTSGNEPLQEQPTMMTMDGYDPFHPYPYVYPFALSGNNNDGGNGVMEEDEPLDLDLSLRL

SEQ ID NO: 1073 - protein, 260 aa, Arabidopsis thaliana
  Clone ID: AT_F15E12.C1.p19.tg
MRPILDLEIEASSGSSSSQVASNLSPVGEDYKPISLNLSLSFNNNNNNNLDLESSSLTLPLSSTSESSNPEQQQQQQPSVSKRVFSCNYCQRKFYSSQALGGHQNAHKRERTLAKRAMRMGLAGVFPGRGSSSNYAAAATAAALSCLPLHGSGNGNMTSFRTLGIRAHSSAHDVSMTRQTPETLIRNIARFNQGYFGNCIPFYVEDDEAEMLWPGSFRQATNAVAVEAGNDNLGERKMDFLDVKQAMDMESSLPDLTLKL

SEQ ID NO: 1074 - protein, 419 aa, Arabidopsis thaliana
  Clone ID: AT_T2E6.C1.p3.tg
MAPLPFIPEQTRSQTRLSSDTKKKNRNKKTSQPPPQTQKIKQKTVPSTSSSSSWSQIKNLLSCKQIEGPRVHEPSKITSSSCGSSLCKFSDVIYGNARVIHRSDHSPESSNLGQDTRLLTRKPISTRGSSSSVRSNGCGAYTSYSTSKAMHFRNLSGCYECHMIVDPSRYPIAPRICACPQCGEVFPKLESLEHHQAVRHAVSELGPEDSGRNIVDIIFKSSWLRKDSPIYKIERILKVHNTQRTIQRFEDCRDAVKSHAHASTRKEARSAADGNELLRFHCTTVSCSLGSRGSTSICSAIPGCRVCTIIRHGFHAKTVRVGNGEGKEEIKGVRTTASSGRAHDALRCFDQRRAMLVCRVIAGRVRRVQSDVPEDESGSGSYDSVAGAAGVYTNLDDLVVYNPKAILPCFVVIYKVSEP

SEQ ID NO: 1075 - protein, 172 aa, Arabidopsis thaliana
  Clone ID: AT_K14B15.C1.p2.tg
MNHRDKQIDSGSGSGENRRTYDCDICKRGFTNPQALGGHNNIHRRERERYPSSSSSSHSFPFSLPLPSQSPSSSTNFTNPPPYFPTIESYLHQGSQPPINPSHNTQYFGSSSSSRGGGRFAQGASHDLNLSLGLGSMNEDDDTHRSPPETGGSQPQDGDLDLDLRLGGHRHH

SEQ ID NO: 1076 - protein, 201 aa, Arabidopsis thaliana
  Clone ID: AT_MUG13.C1.p2.tg
MLSSDSNYASDISDDASATGSIENPIYKCKYCPRKFDKTQALGGHQNAHRKEREVEKQQKAFLAHLNRPEPDLYAYSYSYHHSFPNQYALPPGFEQPQYKVDRSYKMSMVYNQYVGSSSSSFAGLQSDPSQGMNQDWTFTGIPFLPQSQPQPLSSPICLDLCLGIGSSQTQPQPQEPNDATEEMDAEKENDGSSLSLSLKL

SEQ ID NO: 1077 - protein, 462 aa, Arabidopsis thaliana
  Clone ID: AT_F10A5.C1.p26.tg
MALLTFLPENAEAPQKHKPTSSKRKKRDNPTDQTQTQKHKPQKPKKAVPPKQPSSWDQIKNLLTCKQIEGSRVHDPSKNSQSGPSMTTNLSPSKLGSSCSSICSFRDVAHGNTRVVHRADHSPDVGNSATPNSETRLLTRKPGQHGSSSSRSLTSGSTRSNASGSYTSSSTTSFRAMQFRKLSGCYECHMIVDPSRYPISPRVCACSQCGEVFPKLESLELHQAVRHAVSELGPEDSGRNIVEIIFKSSWLKKDSPICQIERILKVHNTQRTIQRFEDCRDAVKARALQATRKDARCAADGNELLRFHCTTLTCSLGARGSSSLCSNLPVCGVCTVIRHGFQGKSGGGGANVANAGVRTTASSGRADDLLRCSDDARRVMLVCRVIAGRVKRVDLPAADASATAEKKSTVEDNSVVGVSSSGGTFDSVAVNAGVYSNLEELVVYNPRAILPCFVVIYKVLES

SEQ ID NO: 1078 - protein, 275 aa, Arabidopsis thaliana
  Clone ID: AT_F8D20.C1.p210.tg
MSNPEKSKIAEEENENFDESDYLWSDEEGDIREIVLGLPALRLSESLNVDESIRNEAVSAAKLIVAAAKEATGNTEQSASGTGDVSGTPEIIKVGKPRVLLEALAEASGCTPIGVTTTEGEVVKKPRKKGSTQLTHLPQGPPMCNVCGKGFASWKAVFGHLRQHKDRGYLGFLPPPTFNAAEEGFGGVATASTGGAVATAISVGEVPTASSAGGLATASSDGEGLVSSIGRARIDLNADPVEEEDKVIGVGSKRKFDLNRSPPPDGDEENDDKVE

SEQ ID NO: 1079 - protein, 558 aa, Arabidopsis thaliana
  Clone ID: AT_M7J2.C1.p20.tg
ELVKQDGNDSLDMLIRRAVGKDPFLSFPRPENTPVQLFQLLHTLERPGWPLLTPLKIQMQKCEKCSREFCSPVNFRRHNRMHRRQRKPEKVVFKCYQDFGKERDALGAFWNKVSATDAKEILSVKSMMLEDIPGASVESGLMSLIEKPGYTALPQYYLRAGSGLLDLLQARPPRLPISSQELFSILDDASEKTFLSSEAAPMQKYIFDGEIGKTVLEAKNVVACASFLLEQRLVKAWLADKDAEALRCQNLLVEEEEAARRRKAELLERKKRKKLRQKEQREKDQKKDAKEDESTTSEEQQYPAEPSSPLSVASDSEAQTPDSLPIDDSSSLEEPQVLETNNGRNSETQVPMVDGLDNGQNMERRSGRRQMQRSQQGMPNGFHADHAPNLGGMRKNGTNRDARANTTKVWSRKSDNPKLISQHAAVTQQDQTKSSEFIVGSLSVSIRNSGEHNQTKCSEGERRTKTVEVKPASEQSTVKIWRPVSSQGRKTSTVNGNTDKEDKRSNPTTPEVKNAHHISLQFNNHEAKAFLAKSKPSFTLSFYLNLPIVYILEVVYSI

SEQ ID NO: 1080 - protein, 173 aa, Arabidopsis thaliana
  Clone ID: AT_K24G6.C1.p23.tg
MEDHYHQVEVEGEEEIKPSKEANKTDENTSSLRIFPCLFCSRKFHSSQALGGHQNAHKKERTAARRAKRAYDFVNNNDFLHTLPVFLSSPSQHHLTILGYPASASVACFPTVHPDHPIFKSSGSHVVLATSHQGRDCKGGYCCQQRVDILDHHYNVVNSDKGKDQCLDLSLHL

SEQ ID NO: 1081 - protein, 271 aa, Arabidopsis thaliana
  Clone ID: AT_F8D20.C1.p120.tg
MSNPNPEKTKVDVTEEEKEESDEQWSDEETNMREIVLGLPALNISSRIFGESSSVVEEDAEKARLNEQAVLAAGLILAAAEEAVMKGMNEGSGSGGKKKSRPRISTQTDDEGDGLGEGEAKKPKKKAKELTHPPKGPPVCHICGRGFGSWKAVFGHMRAHRDRNYQGFLPPPTFSAGAERFVIPGLRSAFTIATVGGGSSGGVAVGGRSSGDFSGSGGGDAPGSEGGRGSGIDLNVEPVEQVEEATESGCIAKFDLNKSPPKDEEEEDKPK

SEQ ID NO: 1082 - protein, 373 aa, Arabidopsis thaliana
  Clone ID: AT_T27A16.C1.p24.tg
MAARKLGSLLRQYFFSLCFLFLGCFFFPKDADYKQKRRKKKLRRVSSSSGSSLSSSWTYLKRVFLSTTRISKSRNQTHPNVTLTSARSSQNSLVTLVQPDTTNQPDPETRIHQQTEFEISSSDEIFPCNSCGEIFPKINLLENHIAIKHAVSELIAGESSTNIVKIIFKSGWPEQGNYKSPVINRILKIHNSSKILTRFEEYREFVKAKAARSNGGGRRWDDERCVADGNELLRFYCSTFMCDLGQNGKSNLCGHQYCSICGIIGSGFSPKLDGIATLATGWRGHVAVPEEVEEEFGFMNVKRAMLVCRVVAGRVGCDLIDDDDVDKSDGGGYDSLVGQSGNKSGALLRIDDDELLVFNPRAVLPCFVIVYTV

SEQ ID NO: 1083 - protein, 267 aa, Arabidopsis thaliana
  Clone ID: AT_T7I23.C1.p3.tg
MEERHKCKLCWKSFANGRALGGHMRSHMLIHPLPSQPESYSSSMADPGFVLQDRESETESSKKPSRKRSRLNRRSISSLRHQQSNEEGKSETARAADIKIGVQELSESCTEQEPMSSVSDAATTEEDVALSLMLLSRDKWEKEEEESDEERWKKKRNKWFECETCEKVFKSYQALGGHRASHKKKIAETDQLGSDELKKKKKKSTSSHHECPICAKVFTSGQALGGHKRSHASANNEFTRRSGIIISLIDLNLPAPSEEEEMASSVF

SEQ ID NO: 1084 - protein, 402 aa, Arabidopsis thaliana
  Clone ID: AT_T20K14.C1.p90.tg
MEDEHQDLHKPINGALRDLKITRSQKETEKSTNQQQDVTCYYGLRENSKKKTQESPEPMKKILFRCEECGKGFRYEKYFKNHRSMMHLSPNEKVCEESLMTLSRSLGFVKKKKRSRLGRSGKTLFTTFLEPSSIFDATDEELEVADCLILLSKSAPKVVDELKSLSEAVRVTPETPESSYDLGCLLNKKPRKGGELESGVLSNEQRLMEEGFSSYGTSKEPASFLRDENRLDQQKRRKDGEFESGLLSNEQRLLEEEITTPVTFKGPASSLRHKCALDRNGGEFGPEFLSNEQTLMEETWKEPVSFLEDKHEFDQRKMREAGDFESRFYRIELGVGAMECTSSDTDMLTQSDKKNVEHRCRLCNKIFSSYQALGGHQTFHRMSKCKNKKNGIEESVEPRMTL

SEQ ID NO: 1085 - protein, 413 aa, Arabidopsis thaliana
  Clone ID: AT_F28P5.C1.p6.tg
MAEEAKVDVKTSAKKDIRNYLCQYCGISRSKNYLITKHIQSHHQMELEEERDDEACEVDEESSSNHTCQECGAEFKKPAHLKQHMQSHSLEVGRPPEKLQQVSLDHAKCLRSDRSFTCYVDDCAASYRRKDHLNRHLLTHKGKLFKCPKENCKSEFSVQGNVGRHVKKYHSNDNRDKDNTGLGDGDKDNTCKGDDDKEKSGSGGCEKENEGNGGSGKDNNGNGDSQPAECSTGQKQVVCKEIGCGKAFKYPSQLQKHQDSHVKLDSVEAFCSEPGCMKYFTNEECLKSHIRSCHQHINCEICGSKHLKKNIKRHLRTHDEDSSPGEIKCEVEGCSSTFSKASNLQKHMKAVHDDIRPFVCGFPGCGMRFAYKHVRNKHENSGGGLKRKQVTAEMLVRKRVMPPRFDAEEHETC

SEQ ID NO: 1086 - protein, 353 aa, Arabidopsis thaliana
  Clone ID: AT_T4P13.C1.p29.tg
MEEQQEFEKPIFEFRPKKLRTSRVSRNLMKKTGFRESMNHYEELSCNYGLRENPKKTQKSLLDHRFCTRRRRNKKILIRCKECGKGFLYEKCLFNHLQVTHSEESTRRSLFCRFSIVQRRKRSKRVSRYKKILPRFSVSSSSCTMFPVSVDDGGLLEVAESLILLSMSGGKFVNGLEHFGKALGSTQRKFEDGLLRNEQRLVGEALDSNPEKKLVGISRASVGTSKELSGYLANKKGREDDELGQQKQAGARILREETDNEQKLVRQETAFEDSVSGFEMNIEHRCGLCHKVFSTYQTLGGHQTFHRMRNKSKSQTKRCREESIEAEAGINNGSVTLTISAEFAEGCLGQYML

SEQ ID NO: 1087 - protein, 337 aa, Arabidopsis thaliana
  Clone ID: AT_F11M15.C1.p8.tg
MSNPACSNLFNNGCDHNSFNYSTSLSYIYNSHGSYYYSNTTNPNYINHTHTTSTSPNSPPLREALPLLSLSPIRHQEQQDQHYFMDTHQISSSNFLDDPLVTVDLHLGLPNYGVGESIRSNIAPDATTDEQDQDHDRGVEVTVESHLDDDDDHHGDLHRGHHYWIPTPSQILIGPTQFTCPLCFKTFNRYNNMQMHMWGHGSQYRKGPESLRGTQPTGMLRLPCFCCAPGCKNNIDHPRAKPLKDFRTLQTHYKRKHGSKPFACRMCGKAFAVKGDWRTHEKNCGKLWYCSCGSDFKHKRSLKDHVKAFGNGHVPCGIDSFGGDHEDYYDAASDIEQ

SEQ ID NO: 1088 - protein, 439 aa, Arabidopsis thaliana
  Clone ID: AT_T7N22.C1.p5.tg
MEENMSNLTSASGDQASVSSGNRTETSGSNINQHHQEQCFVPQSSLKRKRNQPGNPDPEAEVMALSPKTLMATNRFICEVCNKGFQRDQNLQLHKRGHNLPWKLKQRSNKDVVRKKVYVCPEPGCVHHHPSRALGDLTGIKKHFFRKHGEKKWKCEKCSKKYAVQSDWKAHAKTCGTKEYKCDCGTLFSRRDSFITHRAFCDALAEESARAMPNPIMIQASNSPHHHHHQTQQNIGFSSSSQNIISNSNLHGPMKQEESQHHYQNIPPWLISSNPNPNGNNGNLFPPVASSVNTGRSSFPHPSPAMSATALLQKAAQMGSTKSTTPEEEERSSRSSYNNLITTTMAAMMTSPPEPGFGFQDYYMMNHQHHGGGEAFNGGFVPGEEKNDVVDDGGGETRDFLGLRSLMSHNEILSFANNLGNCLNTSATEQQQQQHSHQD

SEQ ID NO: 1089 - protein, 506 aa, Arabidopsis thaliana
  Clone ID: AT_F21M11.C1.p23.tg
MTTEDQTISSSGGYVQSSSTTDHVDHHHHDQHESLNPPLVKKKRNLPGNPDPEAEVIALSPKTLMATNRFLCEICGKGFQRDQNLQLHRRGHNLPWKLKQRTSKEVRKRVYVCPEKSCVHHHPTRALGDLTGIKKHFCRKHGEKKWKCEKCAKRYAVQSDWKAHSKTCGTREYRCDCGTIFSRRDSFITHRAFCDALAEETARLNAASHLKSFAATAGSNLNYHYLMGTLIPSPSLPQPPSFPFGPPQPQHHHHHQFPITTNNFDHQDVMKPASTLSLWSGGNINHHQQVTIEDRMAPQPHSPQEDYNWVFGNANNHGELITTSDSLITHDNNINIVQSKENANGATSLSVPSLFSSVDQITQDANAASVAVANMSATALLQKAAQMGATSSTSPTTTITTDQSAYLQSFASKSNQIVEDGGSDRFFASFGSNSVELMSNNNNGLHEIGNPRNGVTVVSGMGELQNYPWKRRRVDIGNAGGGGQTRDFLGVGVQTICHSSSINGWI

SEQ ID NO: 1090 - protein, 362 aa, Arabidopsis thaliana
  Clone ID: AT_F4F7.C1.p10.tg
MELTQPIRENGDPQGHQLTDPDAEVVSLSPRTLLESDRYVCEICNQGFQRDQNLQMHRRRHKVPWKLLKRDKKDEEVRKRVYVCPEPTCLHHDPCHALGDLVGIKKHFRRKHSVHKQWVCERCSKGYAVQSDYKAHLKTCGSRGHSCDCGRVFSRVESFIEHQDTCTIRQPQPTNHRHLQQHTMGLDAPSRTTSTASFGPLLHGLPLLRPPRPSNQHSPAFAYPFNASSAPFESLELQLSIGMARTSAQARHNEKRETSLTKERANEEARKAEETRQEAKRQIEMAEKDFEKAKRIREEAKTELEKAHVVREEAIKRINATMMEITCHSCKQLFQLPVTADESTSSLVMSYVSSATTEGECE

SEQ ID NO: 1091 - protein, 337 aa, Arabidopsis thaliana
  Clone ID: AT_T23G18.C1.p15.tg
MNSYETKGLSFESPSFIEWLKPQSSTTSSKSVLYRGKTRDAISRSNHHQSQMNMLERSLFLYQPQEPLNTSIQCLPLLNKLMENNSQASDIKEENKDDVVTLQIGFPKYHRGSSEDGSDITFDHQKKPIKREIIEDGVVMMKKRRKMKFDEEIIDSDVEVCGKRFWIPSPAQIHVGPMQFACSICSKTFNRYNNMQMHMWGHGSEFRKGADSLKGTIQPAAILRLPCYCCAEGCKNNINHPRSKPLKDFRTLQTHYKRKHGSKPFSCGKCGKALAVKGDWRTHEKNCGKLWYCTCGSDFKHKRSLKDHIRSFGSGHSPHPSLLFDGFEEDTECVTTE

SEQ ID NO: 1092 - protein, 466 aa, Arabidopsis thaliana
  Clone ID: AT_MLN1.C1.p8.tg
MTSEVLQTISSGSGFAQPQSSSTLDHDESLINPPLVKKKRNLPGNPDPEAEVIALSPTTLMATNRFLCEVCGKGFQRDQNLQLHRRGHNLPWKLKQRTSKEVRKRVYVCPEKTCVHHHSSRALGDLTGIKKHFCRKHGEKKWTCEKCAKRYAVQSDWKAHSKTCGTREYRCDCGTIFSRRDSFITHRAFCDALAEETAKINAVSHLNGLAAAGAPGSVNLNYQYLMGTFIPPLQPFVPQPQTNPNHHHQHFQPPTSSSLSLWMGQDIAPPQPQPDYDWVFGNAKAASACIDNNNTHDEQITQNANASLTTTTTLSAPSLFSSDQPQNANANSNVNMSATALLQKAAEIGATSTTTAATNDPSTFLQSFPLKSTDQTTSYDSGEKFFALFGSNNNIGLMSRSHDHQEIENARNDVTVASALDELQNYPWKRRRVDGGGEVGGGGQTRDFLGVGVQTLCHPSSINGWI

SEQ ID NO: 1093 - protein, 493 aa, Arabidopsis thaliana
  Clone ID: AT_K24C1.C1.p1.tg
MDQLRGYKTNCGFSLGKPRFGSIKVKIPRIKPEIEEDQVEEDDEAKNIGLEEEENDHEAKSMDLEQGDVEEEEGEEKKHICCECGKRFVSGKALGGHKRIHVLETRKFSMMRPKMVSGMVGRSERGDLEVACCVCYKKFTSMKALYGHMRFHPDRGWKGVLPPPPLLPHPLGNSSSSTLDHDDEFISSDYDDDDDFDDDDDDDDDENSELWDSNLELENVVESIKGWSTKGKRGRRGDLKFDEADLKDPPLEDVKDIDDANGLLFLATTAEAAANLNVAETSASRSVEEKYLEMVKKRKKKQKRLSEMEKESSTSTHHDHQLDQVVVVAAEEGGGAGAREKHVCVTCNKSFSSYQALGGHRASHNKVKILENHQARANAEASLLGTEAIITGLASAQGTNTSLSSSHNGDHVCNICHKSFSTGQALGGHKRCHWTAPVSTVAPTTVPTAAPTVPATASSSQVTETVQEVKKLKRRVLEFDLNELPPNEEEERV

SEQ ID NO: 1094 - protein, 398 aa, Arabidopsis thaliana
  Clone ID: AT_F13M14.C1.p25.tg
MEAAAEAVSAAREQSLILKGKRTKRQRPQSPIPFSIIPPMSSHEPDAEEESTSLVSKEKSLNDEINNNNIKNNNNTLINGVTSSSSASSSSNNNATLKATADEEDQDMANCLILLAQGHSLPHLQPQPHPQQQTRQLMMSYQDSGNNNNNAYRSSSRRFLETSSSNGTTTNGGGGRAGYYVYQCKTCDRTFPSFQALGGHRASHKKPKAAMGLHSNHDHKKSNYDDAVSLHLNNVLTTTPNNNSNHRSLVVYGKGSNNKVHECGICGAEFTSGQALGGHMRRHRGAVVAAAAASTATVSVAAIPATANTALSLSPMSFDQMSEGPIQAPVKRARSAVVSLDLDLNLPAPEDENRVNGLSFASKQEHEQEHEQTQQKKQREEQKSLVLSSAPTLVDCHY

SEQ ID NO: 1095 - protein, 304 aa, Arabidopsis thaliana
  Clone ID: AT_mci2.C1.p20.tg
MYSLLKKTKICQVCKKSFSNGKALGGHMRAHTLKFFPGSSSSTGSITPSLRSCNNLGASFRRPNETVLARFVHTSEVVGGPKPDLNKEAEQRTTVKKKIVVDLEEENSIESESDITIEESALCLLQMKDDNMSEYLQNLKSIDSLVSTRKRKDTENYIEIDSDENHEDSDDEYVVEDEDEDNEDDDVKSLTSDVENLIGDSDEDDDDYGDENAYYGGKRKRGKKQSKYTCDTCGKVLRSYQALGGHRTSHKYKRLKISDKNYFGEDGPIVRRQYECQICNRMFASGQALGGHKKIHYMFLAPAK

SEQ ID NO: 1096 - protein, 324 aa, Arabidopsis thaliana
  Clone ID: AT_T7I23.C1.p23.tg
MHVTRNVGKSQKLHHVSLKQVLSYLEPHEQEDTKPVTSTKNKGFLLFNSHQNTLNTHMHGAMNSPCIDFVMFSRGQHDEDNMSRRPPWKRERSMSTQHHHLNLSPNEDEELANCLVLLSNSGDAHGGDQHKQHGHGKGKTVKKQKTAQVFQCKACKKVFTSHQALGGHRASHKKVKGCFASQDKEEEEEEEYKEDDDDNDEDEDEEEDEEDKSTAHIARKRSNAHECTICHRVFSSGQALGGHKRCHWLTPSNYLRMTSLHDHHHSVGRPQPLDQPSLDLNLACQEYSVDPTAMSVGMIERDGGGNNHNATSSSWLKLASGDWS

SEQ ID NO: 1097 - protein, 235 aa, Arabidopsis thaliana
  Clone ID: AT_MRN17.C1.p12.tg
MVLEFSRQETDPGHDFVQESTNLFGVQERGQISFPDQNLDWYNTETINPKKDKHRSKPSSGSYDILELDVADLLAKYTHYCQICGKGFKRDANLRMHMRAHGDEYKTREALISPTSQDKKGGYSLKKHYYSCPQHGCRWNQRHEKFQPLKSVICAKNHYKRSHCPKMYMCRRCSVKHFSVLSDLRTHEKHCGDIKWVCSCGTKFSRKDKLMSHVSLFLGHVPAHGSSKPPTITLK

SEQ ID NO: 1098 - protein, 650 aa, Arabidopsis thaliana
  Clone ID: AT_MUO10.C1.p4.tg
MDLDGVELLLDLREMVSQSGFEKSTTCSGVIALRSNLQSKSSHKCKICGKSFECYQALGGHQRIHRPIKEKLSKQEFSEVYPRKSKLQKRPESSSSCYECKVCGKIFGCYRGLGGHTKLHRSTKRELASTQDENSLLDSSEAKKIVSQPSSFKVSQEEKFLHCVELKQDFSEPLSHSGALPSTLRSKLQTKTQWKSSCHCKICGKSFVCSQGLGNHKRVHREISGKLACKRKYTEDYNPFSDSLKAKKIVKKPSSFEVSQEEKILHCVELKQDFGELLAHSGFDKSISCSKSIKVKKVARKNEKTEDSTSLFGVFVGEMSQRLHGCKTCGRKFGTLKGVYGHQRMHSGNHNRIEDENGLERIWGLKKKSRVCSVSAFDRFKGSSFMAEIEKHEVIEAALNLVMLCQGVYDFASISNLPLGDGFMDLELKPCPLRRKLQKKSRSSYKCSICEKSFVCSQALGSHQRLHRWKLVPKPEYIEDDSSLLDSSEAKKIVSKPSSFEHAQEEKILQCVEPKLEFHEQLAHSGFDKFDTCSKIRFSALPSPPEAKKIVSQPPSFEVSVDEKILYRAEPKLNFSEPLAHSCFDNSSSYRSIICGKSFVCSQALGGHQTLHRSIKGQLAGTEDGNSLSVTDSEASKIVAQPSSYKSQGI

SEQ ID NO: 1099 - protein, 501 aa, Arabidopsis thaliana
  Clone ID: AT_F15A17.C1.p180.tg
MQMIPGDPFSISSSMGGFVHQETHLHHLQQQIPDLNPNSNPNPNAKPNSSSAKKKRNQPGTPDADVIALSPTTLMATNRFVCEICNKGFQRDQNLQLHRRGHNLPWKLKQRSKQEVIKKKVYICPIKTCVHHDASRALGDLTGIKKHYSRKHGEKKWKCEKCSKKYAVQSDWKAHAKTCGTREYKCDCGTLFSRKDSFITHRAFCDALTEEGARMSSLSNNNPVISTTNLNFGNESNVMNNPNLPHGFVHRGVHHPDINAAISQFGLGFGHDLSAMHAQGLSEMVQMASTGNHHLFPSSSSSLPDFSGHHQFQIPMTSTNPSLTLSSSSTSQQTSASLQHQTLKDSSFSPLFSSSSENKQNKPLSPMSATALLQKAAQMGSTRSNSSTAPSFFAGPTMTSSSATASPPPRSSSPMMIQQQLNNFNTNVLRENHNRAPPPLSGVSTSSVDNNPFQSNRSGLNPAQQMGLTRDFLGVSNEHHPHQTGRRPFLPQELARFAPLG

SEQ ID NO: 1100 - protein, 348 aa, Arabidopsis thaliana
  Clone ID: AT_MOE17.C1.p17.tg
MADPDCIFRNGYVDYYNYSFNYATSLSRIYNSHDSFYYPHQTTNPNINENPNLTSPDSPPLREALPLLSLSPIHKHQEPTANHHEYYFMETTETSSNSNFLDQCQDSYRHDVTVDLHLGLPNLGDGGSSSSDVVLDSTDHQEGHHDHHQDQGLEVTMASDHDDEHGGLQRGNHLHHFWIPTPSQILMGPTQFSCPLCFKTFNRYNNMQMHMWGHGSQYRKGPESLRGTQPTAMLKLPCYCCAPGCKNNIDHPRARPLKDFRTLQTHYKRKHGVRPFACRRCGKAFAVKGDWRTHEKNCGKLWYCSCGSDFKHKRSLKDHVKAFGNGHVPCCGIDHEEEEAASDVEQQE

SEQ ID NO: 1101 - protein, 684 aa, Arabidopsis thaliana
  Clone ID: AT_K23L20.C1.p2.tg
MASRDGNKKKKNLKVFVRDRYNSFRVLPIDDSGSNEDGKRKEVIECSSRSPVFETGESLQIPSSYPLETNSNPFYIPGQPETSSRNGVSMGASSLVQIWEARSQQSSSSLSQSLLDSRTSSESSLSDFLNDEARKSNESSGEEIDWFPQSDMNNVSNSYENDGEGRCFLELASCSTPRIRGRQASEDVCKMILRDRENELELLGGRYAVSKFSPRGCGRLQYMLMIRSLERCIVIQERYRSKSDVNRFSRGSRVKSVLQETMEKSNTRENQAAADKPEIANKPVFNDAASNENGSKKPEIERKATEEGEGLRKVTVKEGEETNKFSSSFVEKVYLWDSKERANRRRTMGKAKDEGKDARRVIDVKTEGRNEERRKKEEGKSMEIEEYRSNPQEVTSVVCLDREKDEETARQVFRESGKEEKSSQNDEETSKAEKQQAAETLFLILESPIFLNAWDENETENEENEDCNREIMYYDWISDISRPRSYWEDLKKQRVLEVMNNISEKGDMWNLIKWRTVSSFLEGDFREKIDKIMISCVQKRSEIGSNLVEEEEGNEETLVECSERYQGNVEENETKKLILEPETETQMICDLKQQIKQLQRDILELQSLVKSCVDFQKSLEFESLSDSLERNCSICFEMPIDSLLYRCGHMCTCLKCAHELQWSNMKCPICMAPIVDVVRAFLDS

SEQ ID NO: 1102 - protein, 226 aa, Arabidopsis thaliana
  Clone ID: AT_T6G15.C1.p40.tg
MSLESDIKESKRVVEPFDDDDCAVCLEPLANDADERTVVKLRCSHKFHLDCVGSSFNIKNKMECPCCRQIEKGKWLFAEPVDQLEEDDMSPLDMLTNMVSPSFLHIDDGIFTNIASVLFPNALNQISNNANVSSNPLGEPRNTLLDTRMQRQVDEHVASTVDSERRLPDMLFELHDRTGGSGPSGYGRERSGGEGGENSCGGEAVAEEDQVGEAAEGAEMMDNLNF

SEQ ID NO: 1103 - protein, 711 aa, Arabidopsis thaliana
  Clone ID: AT_T32F12.C1.p29.tg
MGCTVREKHVRPNRKTRSVKPEFDPCCLLDRTALSKSIVESSLKHLVYHPGLLDSCPESNPSGSFEDNNGWGYCTEEQLEDILLKHLEYLYNEAISKLVGSGYDEDVALRAVLSNGYCYGGMDVMTNILHNSLAYLKSNTGEGSNVNNEDQSETVFTDLRQLEEYSLAGMVYLLQQVKPNLSKGDAMWCLLMSELHVGRPSTMDIPSSGKGDSSNVGVGGASSTVNGVGGAIAPALCRFHGGWGFGNGKGPKFSGNGFSLHSEELTLQREIDCPRRFNLSPSMKSLLRENVAAFAAGYRASMEQKKQVQMQSETSGTSLSCTAAATHSEKCEQPHVFGSEECFSSVLEKFRDLNLDDNVDSAPEELKDDALIGLLQQVQDLKKQLKERKDWAQKKAMQAAQKVSDELSELKSLRSEREEIQRVKKGKQTREDSTLKKLSEMENALRKASGQVDKANAVVRALENESAEIRAEMEASKLSASESLTACMEASKKEKKCLKKLLAWEKQKMKLQDEITAEKEKIKALNRALAQITQEEKEYEAKWRQEQKAKEQVLAQVEEEQRSKEAIEASNKRKVESLRLKIEIDFQRHKDDLQRLEQELSRLNKASSTDSSLQSNNTSHTKVKSDKSKGETMSKLLEELNRLDGSYEKEANYDRECLICMKDEVSVVFLPCAHQVVCASCSDSFMGSGKATCPCCRAPVQQRIRVFGASS

SEQ ID NO: 1104 - protein, 401 aa, Arabidopsis thaliana
  Clone ID: AT_T8K14.C1.p20.tg
MTMGNFLKRFGSGKSRSSRNMTLGTTSSQSHEPSPSDPSLSLADNTNATKKKYALIPDRFSSLDQVSKALREAGLESSNLILGVDFTKSNEWTGKTSFDGKCLHALGETSNPYEKAIFVIGQTLAPFDEDNLIPCFGFGDSTTHDEEVFGFHSDNSPCHGFEEVLACYKRIAPNLRLSGPTSYGPLIDAAVDIVEKNNGQFHVLVIVADGQVTRGTDMAEGELSQQEKTTIDAIVNASSYALSIVLVGVGDGPWEDMRKFDDKIPKREFDNFQFVNFTEIMTRNSPESAKETAFALAALMEIPFQYQAAIELRLLGKQTGLAKTIVPRPPPIPYTPPTNAELPSTASPASPEQTQSCPICLTNRKDVAFSCGHMTCGDCGSKISNCPICRVRITNRLKLYT

SEQ ID NO: 1105 - protein, 408 aa, Arabidopsis thaliana
  Clone ID: AT_MPN9.C1.p15.tg
MENDNGPHVGNVVVTAEQATKINETDGRLPENRQTGVVSDTGSGSERGEQGVGESAVAVAVPVEESGSISVGELPAPRSSSARVPFTNLSQIDADLALARTLQEQERAYMMLTMNSEISDYGSWETGSYVYDEDEFDDPENEDEDDDEDEYETDDDPQEDGLDVNVHANEDDQEDDGNSDIEEVAYTDDEAYARALQEAEERDMAARLSALSGLANRVVEDLEDESHTSQWPKDKVVTLNPPLSSYTSYMAPSTYYPSVVALDAWDEMDPDELSYEELLALGDIVGTESRGLSADTIASLPSKRYKEGDNQNGTNESCVICRLDYEDDEDLILLPCKHSYHSECINNWLKINKEEYLEYGESSHQLPSQLGRRTFVNIHKFQLRPLDKADEAKEERFRKNHKLRTSKP

SEQ ID NO: 1106 - protein, 785 aa, Arabidopsis thaliana
  Clone ID: AT_F19I3.C1.p15.tg
MHKQDNNDDESDANRCFCSGKTVGFDLAFPVTERSHRHVTDMLNIGANLYFSERSTITNKRLKNIIDIAFSINSLGKQYSTQTITIVHMQYRSFLRRKPRRLLIATMFCGTSMFWSNELNRKLNKDMVAVVSRCPTCATMQDHQIEDRNQRHNDDVVFKKNLKAQVKTAPPAISDESSENRVDSLIGNKRKKNNKSRPGSPEKPRTRKGNNFSDNLGGASSLVQIWEARLNRSNGGNSAIHSQSIEISSEASVQEIHLLAPSIDGESESENESKSPDQTVEIESGTLNSVSDIIRRLSNEQKLTASNNGGAVDMPIVKTPTLEKSSFQVVTCSPRIRGRQAYSDLLVHLERERHRELESLLGRNAVSRFPQRGRLQSMLRLRSLKRGLAIQDRHRGTTKSDLNRFQPSSTILHLREKLREKAANAAAEAGLKKGQQSTVETESMQSKETSGILHSPSTERLSPQKRNIEEAILRKNETETKMSYLQLKKAIVAEVLERESDNTSPLTSVTPQEPRILRNEEAGKLESGTEGTQETPFLETQEMSFQSGWEEQEEYEDEQSYYGDMSYDWFTEISRPRTYWEDLRKSRYLEVMNTKSDKDDICRLLERRTVSGFLQSGLREKIDKLIMSRVQIHPAHRIEEATKEEEKYDIGEEKDEDRDDLSQSSSQIFAPSPAGSWSSLDTGVTSTPTHNLHSTLQLEMSELRDSVKTCLDVNASLQKSVHLENPFKRKCCVCNETQVETLLYRCGHMCTCLRCANELQYNGGKCPICHAKILDVVRVFVDSRT

SEQ ID NO: 1107 - protein, 267 aa, Arabidopsis thaliana
  Clone ID: AT_T1A4.C1.p30.tg
MEASPNDRLHFGKMGFGCKHYKRRCQIRAPCCNEVFDCRHCHNESTSTLRNIYDRHDLVRQDVKQVICSVCDTEQPAAQVCSNCGVNMGEYFCSICIFYDDDTEKQQFHCDDCGICRVGGRENFFHCKKCGSCYAVGLRNNHRCVENSMRHHCPICYEYLFDSLKDTNVMKCGHTMHVECYNEMIKRDKFCCPICSRSVIDMSKTWQRLDEEIEATAMPSDYRDKKVWILCNDCNDTTEVHFHIIGQKCGHCRSYNTRAIAPPVLPQ

SEQ ID NO: 1108 - protein, 221 aa, Arabidopsis thaliana
  Clone ID: AT_F6N18.C1.p18.tg
MVHTGLRLFSGEDQAQKISHLSEDVFAAHINRQSEELDEFLHAQAEELRRTLAEKRKMHYKALLGAVEESLVRKLREKEVEIERATRRHNELVARDSQLRAEVQVWQERAKAHEDAAASLQSQLQQAVNQCAGGCVSAQDSRAAEEGLLCTTISGVDDAESVYVDPERVKRPNCKACREREATVVVLPCRHLSICPGCDRTALACPLCLTLRNSSVEAIFC

SEQ ID NO: 1109 - protein, 546 aa, Arabidopsis thaliana
  Clone ID: AT_K9E15.C1.p7.tg
MGSGRSKSCLGSSAMAREASDVAQPPPSSSSGGGRRRRSKSLFCGLHSSCLASSSTSHYSDDDNDEQVCNGWMRKSHGSVTRRRMESRRDASDCYDKELKDDKKSENERHCDELELDDECGVEEEEEEASVSNVQMRNVSGSIQESSTPGRVFSHFKFIPGNISSRLSRASSSRSFNTTYPVSSSHREDGVTSPSESAIRLNDRVESPRIPVIDNVVRDIDAMRFGEDGSLRSPRVVNGMDSTYAGLLDRRHVVREPSIERNVRFSRTLSVGRLRDRVLRRSSLSDFAFRPSPHQGEEDTDLFSAETAAAEDAPVTSTSILNRSASSIRRTLFGIQDHETPAALVREGRYQGLLEHRSDFLERRRRIRSQVRALQRLGSRFENVAVHHDRSCVLSGQDQAGRCTCRAVTNRGSTTATTDETNARASISRIVLLAEALFEVLDEIHQQSVVLSSQQPSVSSIGSVPAPNDVVDLLPIKLYTKSQSEDPSQCYICLVEYEEADSIRTLPCHHEFHKTCVDKWLKEIHRLSDDVFMAKQSMSAVSRRYL

SEQ ID NO: 1110 - protein, 343 aa, Arabidopsis thaliana
  Clone ID: AT_F7D8.C1.p33.tg
MPAALLAAFDNRSWIPVTNIFLRLCKGSGFSSLKNGESSFSSTVFQALLRDACINDGELLSTFLNRLFNTLSWTITEFSVSVREMQEKYQVMEFQQRKCCVIFELSSNLARVLEFCTYAMPQAFLAGTDTNLRRLTELILFILNHMTSAVDDEFFDLSVRSLRRQGQPSEKVSRGILLAPLVGIILNLLEASEDSKPKQQHDVIGLFASMDCPDTVYYGFQYLLEYNWDGCVSGDDAYVKKLGQLENFLSHLINRASSQEPERKEESFNKDTTDIEDNTCCICYAGEANAMIAPCSHRSCYGCITRHLLNCQRCFFCNATVIDVIRDKEEEEEEDDDGHKRST

SEQ ID NO: 1111 - protein, 739 aa, Arabidopsis thaliana
  Clone ID: AT_T17H7.C1.p18.tg
MVSSPQRFGLILRDRNQNAGVFQKNLKSPVKEVLKSHVSDENLVDSWIETHNNKNNRVLESPLESKRNDNLVASSLVQIWEARLNRSNGGNSPSSSQSTASSSSRSDSGVSVQDSGLSESSSIDGDSEIADRTVEIESRSHGLVSDSGESKWGRVADLIRRLSNEDKKRTAGDNGSGGGGGLEIIRTPRPYCTSSSSEKSNFPVVSFSPKIRGRQAFTDFLMQMERDRHRELDSLFERNAVSRFTQRGRLQSMLRLRNLNRCLVIQDRNRSNAKTTGLNRIESGSAVLHLRFSIFDWQRREKFHANVVNSAAATDKRKNHQRSTEMNNKSVEETEGTTTTSTRLKDGGVTLEAFFAERLRPRNRKIEEATLCKEEESVSGTVDSQKNCLQLQETREVEETCNDGKSEKKEEENTSPSEYLSRESRLRQNQDENNVGKYMQETRETEGLVHESNEMDQCLDQQETSYLNRWGEQEEYADEQSYYGEYNDDWLSEIARPRSYWEELRKSRYLEVMNTRSEKDDICRLLERRTVTDFLDSGLREKIDNLMMSRVQTHSDKHSKKWELQQEEEEEVNFEIDEEIKEEPLRGGEEQDDRDDLSQSSSSHISASSPAGSWSSQDTDVTSTPALVVQNPQSPEMELISGMRSQIQQLQQEMSVLRDSVKTCLDANASLQHKAHQENPMKRKCCVCDETQVEAVLYRCGHMCMCLKCANELHWSGGKCPICRAQIVDVVRVIYDTRN

SEQ ID NO: 1112 - protein, 263 aa, Arabidopsis thaliana
  Clone ID: AT_MMF24.C1.p2.tg
MLSIPDTRMWNLASSYLTGNIGPKNDIRRPVHAHAECSDDDVSSVGSKDEGLECPICWESFNIVENVPYVLWCGHTMCKNCILGLQWAIVKLPTHPVQLPLFISCPWCNLLSFRLVFRGTLRFPHKNYFVLWMVERMNGERRNSPGGAQTDGNNDHTRETPSPCLHNRHHRSQPEPSRSVNDHRIPRDNIQTSLRKSLVFFVQLTAKFPLVVIFLLIILYAIPTSAAILAMYILVTLLLALPSFLILYFAYPCLDWLVREIVT

SEQ ID NO: 1113 - protein, 362 aa, Arabidopsis thaliana
  Clone ID: AT_F27O10.C1.p9.tg
MARTIKYRLLIEFHRVNKQVERIYSKSSGSSNVNEGKRFAFDLNVEPVDETLDLNVEPVDEENRDALNPVDEENHDSMNHVAKQNHDSSNHVDQEIRDSQNLIDEENHDSPKDSDYLGDLDLCSICRGALVNENDVQRTLVTLKCVHKFHLDCIGSAYNAKGFMECPNCRNIEPGHWQFSDGTHFNPNGMIANNEEEEEDNDPGSFSQMIVKSEVCPFGCLGQRYPFDPLGRSDISMINAPMNLSCPSTSTVQLNPSDVWESTQPFLSSRHHLMVEDEIYRMIYGDRIEMGERSGNHRGRESNGNGDNGGSSTFGGNGNGNGINATVLCSSRTGSSNYFSTSQVKVTIQRLENVHGLIGISS

SEQ ID NO: 1114 - protein, 503 aa, Arabidopsis thaliana
  Clone ID: AT_F9K21.C1.p140.tg
MYDLKPSPFHMNRLYFKGFVSEETKGFGVAICDQEDKLLYHIKGSRHHDSAITVLEAELTALKRGLIEAVGLGINHISFYCDHDQIFELVMGISVPEQDNIALLMDDVQRIRKQFTSSIPVLMTRNQAKFAYKLAMETIVSEISIDMAPSQRKTCGICFNDDFKAEHMFSVDLCGHQFCVECMTQYIKVRLLEESEMRCPHYQCESKLTVVRCANLLTPELREMWEHRSQKESVVVADKAYCQIECAWLLCQMEFRDGALDVVSLIASAAKFRGITTCRASNTRDADISFATHVEMNGSKEVAFISERRCLWSMALLQGFSERGTTGFAVAICDQENKLLYHTKGSLHHDSTITILEAELTSLKQGLTEAVRLGITYIKIYCDHTKLFDLVMGTSALEDNIALLMDDVHRIRKQLKSSNPILETRTQISMLINLQWKPTELNGVIKRAPSRYIPFAPKPPLKRPPSREKHARQRLVKTIHSPRIISGKIGSFMGLSEMIKENL

SEQ ID NO: 1115 - protein, 455 aa, Arabidopsis thaliana
  Clone ID: AT_F6F9.C1.p16.tg
MGSVCCVAAKDRNVPSGAIDNSVCSPSWSFRRDNRRRVADEIKDSSNHNVGSRGIDIDKLSLGLERGPPSSETGGLATLGSQKSADSEMGTASMVTAPLAGTSLAIRSPSDVSLASPVRVEVKNIVDSSDIVSSVLPNPSSSTSVSDLPSAHTHSLPPRSTPSRRARGSPGQQLFRQVSDSQTLGLKSPNNYSTSEGRSSFVLSTCSNDTATGSHFASSEGGWSINAFCELVAQSQRERWSFDNEHLGSGRRRLSGCSSSRFSCSPSVDQQTCGRCSKLLTERSPVARFDLPIPAVLACGHVYHAACLETMTNETEKYDPTCPICTETQVTKLSRKALKAEAELKATSYKRCKNRVVDSYVRSECEDLMFQNLGKREGKGLKMDPSSNTKGSTSKSFMKWHFGSVSTKWSKARDSTSKKSFWSRHSNKRLSHSFSSVEVKYPYETQYVHFPSKQS

SEQ ID NO: 1116 - protein, 270 aa, Arabidopsis thaliana
  Clone ID: AT_F23O10.C1.p9.tg
MWGFASNVIGSMGLKKSPKDSAQASSQCSDDEVSNISRDEEGLECPICWESFNIVENVPYVLWCGHTLCQNCVFGLQSAVLRLSSQDIRIPFFVSCPWCQLLSFRIVYKGNLKFPRKNFFLLWMVESLNGDRTSHGDRTSHGSLVTDNQQSAPTPRCSMSLGNHSSNNNLVARPLLRNQSTDLLPHHDHSNQPSRQLFSFHKSLDFFISFTSKFPFVIIFLLIVFFAIPGSLIILALYFLLTILFAVPAGLVLYFAYPILERLVNEITSS

SEQ ID NO: 1117 - protein, 409 aa, Arabidopsis thaliana
  Clone ID: AT_F3K23.C1.p26.tg
MVVPNTSAVENFQRNNVRYSPNWSFRWDNRGGRVAGEETSVSLLSDRISRNDVSDVKSETALVSSQGSPLDNFQTQSWQKSPASDQSFSRIASIDSVSEQITQKTNDSTDPTYYPSPAKLSLSLASQPSSFSVSPLSSQSHLPMPPASSSQLKLTPPPRLSKQVSYGQIFGFTSPSRSSATEERLGNESQSDGWSMQAFSEMMAYSRRESCSYDNECFGLRRDKIDNLGSRKSNDQQNCGACSRSLSEKSLLSSQKIFATNELSVAAILACGHVYHSECLEQMTPEIDKFDPSCPICTLGEKKTFKLSEKALKADLEMKARHNKRLRNRVVDSDEFVKFNNNHEAAVGYKGKTPKLISSSSLRSYSPKPFLARHFSFGSRSNSVKSPKEIHSPSSLRKKGFFWTKSSKI

SEQ ID NO: 1118 - protein, 339 aa, Arabidopsis thaliana
  Clone ID: AT_T30E16.C1.p12.tg
MIHLAGFTCCLGGVALYLLTRSTGRWMGFGYVFDIIRFYSEQLVEVESKVVPLIIAVSGDVGSETPIKCEHSYVLGVFLKRTAEQQVLRRNWRFSWVRNSTLMQPMTKEVPWYLDDGTGRVNVDVSQGELGLALTVGSDVFEKAEPVSLVQGALGYLKGFKILGVRHVERVVPIGTPLTVVGEAVRDGMGNVRIQKPEQGPFYVTYIPLDQLISKLGDLSRRFKYASMGLTVLGVILISKPVIEYILKRIEDTLERRRRQFALKRVVDAAARRAKPVTGGGTSRDGDTPDLCVVCLDQKYNTAFVECGHMCCCTPCSLQLRTCPLCRERIQQVLKIYRH

SEQ ID NO: 1119 - protein, 300 aa, Arabidopsis thaliana
  Clone ID: AT_MQD22.C1.p19.tg
MAVQAHHHPSTLFFLNNGQEGNDQPHKSQFHSINAGVDTRKRAREVSSVIDLDITAAPMNPPPQTPPQVIGRRQNPNVVSTGLRLSREQSQNQEQRFLSFPITGDVAGEIKSQTDELNRFLQIQGEQLKRMLAENSERNYRELLRTTEESVRRRLREKEAEIEKATRRHVELEARATQIETEARAWQMRAAAREAEATSLQAQLHQAVVVAHGGGVITTVEPQSGSVDGVDEAEDAESAYVDPDRVEMIGPGCRICRRRSATVLALPCRHLVMCTECDGSVRICPLCLSTKNSSVEVFYS

SEQ ID NO: 1120 - protein, 455 aa, Arabidopsis thaliana
  Clone ID: AT_F1B16.C1.p13.tg
MGSVCCVAVKDRKVPPSGGPASSSVHRNSACSPQWSFRRDNRRRVADEIEGSPYYSPYVASRGISMDKMSLGSERGTLSEGGTPPDGHLGTPASQKSATPEMSTNSMVPPSSGSSLASSDLIEVKNLVDSPGIVPSAQSKPLFSTPSLPNPVSDLSSAHTRLLPPKSTPSRRARRSPGHQLFRQVSDSQILGLKSPINNYSISEGRSSFVLSTCSNDFATGSQYASSEGGWSMNTFSELVAYSQRDRWSFDSEHLGSGRRKLSGGSSRFSFSPSVVDQQVCGACSKLLTERSSIATFELPIAAVLACGHVYHAECLETMTTDIEKYDPACPICTIGEKRVAKITRKALKAEAEAKAKQYKRCKNRVVDSYGESECDEFVFQKMGKREGKALKLEASCSSKSSSNKSFLKWHFASISSKWNKPSSKDSALKKGFWSRHRNNRSSSSIEGLNQTSPL

SEQ ID NO: 1121 - protein, 161 aa, Arabidopsis thaliana
  Clone ID: AT_MTI20.C1.p6.tg
MDSKAKDDEKTLNMDSKAKYGKEALDMLLKLQQRVDEIHSELQSSGASATTSSDIQNIYNEIQQLLQMITKKTPQDPSKVSSHIRDDLDMVFVLEEVGHSCDLCQRDLAKDPERPNASLSGLQEACVLSCGHVYHFKCLRGTTLDIDNHSKDPSCIFCISC

SEQ ID NO: 1122 - protein, 1873 aa, Arabidopsis thaliana
  Clone ID: AT_MCK7.C1.p28.tg
MGKPKGDAARSKARPSSSSLAASLLPSGSAAAVGFGGYVGSSRFQTSLSNEDSASFLDLDSEVAQHLQRLSRKDPTTKIKALASLSELVKQKQGKELLPIIPQWTFEYKKLILDYSRDVRRATHDVMTNVVTGAGRDIAPHLKSIMGPWWFSQFDLASEVSQAAKSSFQVGSSFGNSVFLVEAAFPAQEKRLHALNLCSAEIFAYLEENLKLTPQNLSDKSLASDELEEMYQQMISSSLVGLATLLDILLREPDNTGSANINSESKLASKARAVATSSAEKMFSSHKCFLNFLKSESPSIRSATYSLLSSFIKNVPEVFGEGDVRSLAPALLGVFRENNPTCHSSMWEAVLLFSKKFPQSWVYLNVHKSVLNHLWQFLRNGCYGSPQVSYPALILFLEVMPAQSVESDKFFVNFFKNLLAGRSMCESSSTDQLSLLRATTECFLWGLRNASRYCDVPNSIHDLQVDLIDKVLVKILWADFTELSKGSIPPNQRKSAENLGMGNSVSYLQELGRCILEILSGINLLEQNLLSFFCKAVQESFLNMLQQGDLEIVAGSMRKMIDFLLLLERYSVLEGESWPLHQFMGPLLSKAFPWIRSSELLDGVKLLSVSVSVFGPRKVVPVLIDDIETSTLLSVEKEKNMSPEKLIKVFQEIFIPWCMDGYDSSTAARQDLLFSLLDDECFTQQWSDVISYVFNQQHQGFNNLAAMKMLLEKARDEITKRSSGQELNQRIGSRPEHWHHTLIESTAISLVHSSSATTTSAVQFLCSVLGGSTQDSSISFVSRSSLVLIYRGILEKLLSFIKQSPLCSVNDTCSSLIVEAIAFDSSSSVDVIVVAKFAAEVIDGSFFSLKSLSQDATLLTTVLSSIFIIDLENRMTSLVDNTLSESKEKRKDRNFVCDYVHAVCSKMDNQFWKSINYDVRKSSASTLAQFLRSVVLLEDDLQPFELTLLCASRMTEVLEYLSLDQSDEENICGLLLLESDAWPIWVSPSSSASIDTHGMPVQLCELRKSKSQRYVSFIDSLIMKLGIHRFIVGHKDHGFASQAWLSVEILCTWEWPGGKVQTSFLPNLVSFCKDEPSSGGLLNSIFDILLNGALVHVKDEEEGLGNMWVDFNNNIVDVVEPFLRALVSFLHILFKEDLWGEEEAMAAFKMITDKLFIGEETSKNCLRIIPYIMSIIISPLRTKVKSGGSGKDTLLPLEVLLRNWLERSLSFPPLVLWQSGEDIQDWFQLVISCYPVSDKAEEAKELQRHLSTEERTLLLDLFRKQKQDPGASTVVTQLPAVQILLARLIMIAVSYCGNDFNEDDWDFVFSNLKRLIQSAVVVMEETSENVNDFISGVSSMEKEKENDTLEGLGHIVFISDPSINSAQNALSAFSLLNALVNHKSVEGEDNLKSLADETWDPVKDRILEGVLRLFFCTGLTEAIAASYSPEAASIVASFRVDHLQFWELVAHLVVDSSPRARDRAVRAVEFWGLSRGSISSLYAIMFSSNPIPSLQLAAYTVLSTEPISRLAIVADLNAPLNDESLNDQDSSNAGLPSEDKLLLRDEVSCMVEKLDHELLDTDLTAPERVQTFLAWSLLLSNVNSLPSLTQGRERLVQYIEKTANPLILDSLFQHIPLELYMGQSLKKKDGDIPSELSVVASAATRAIITGSSLSTVESLWPIETGKMASLAGAIYGLMLRVLPAYVREWFSEMRDRSASSLIEAFTRTWCSPSLIKNELSQIKKADFNDESFSVSISKAANEVVATYTKDETGMDLVIRLPVSYPLKPVDVNCAKSIGISEAKQRKWLMSMQMFVRHQNGALAEAIRIWKRNSDKEFEGVEDCPICYSVIHIGNHSLPRRACVTCKYKFHKACLDKWFYTSNKKLCPLCQSPC

SEQ ID NO: 1123 - protein, 191 aa, Arabidopsis thaliana
  Clone ID: AT_F7K15.C1.p30.tg
MEEEGTLIQGDGSYGLYIREQSTSSIPLVLVTENQNKSFYKLAMEAGVPEISIHMPAICRICFDEDVKAEQMYSVALCGHQFCVDCVKQHIESRLLEGCVPRCPHDQCEYKLTFRSCANLLTPKTKSDSSIYLLLKTLKLGDVVSNAVNPFASTAKFHGIVTCHAVITRGVAIRFATHVVPNGSKEVALTA

SEQ ID NO: 1124 - protein, 57 aa, Arabidopsis thaliana
  Clone ID: AT_F10A16.C1.p17.tg
MAFDGCCPDCKLPGDDCPLIWGACNHAFHLHCILKWVNSQTSQAHCPMCRREWQFKE

SEQ ID NO: 1125 - protein, 506 aa, Arabidopsis thaliana
  Clone ID: AT_T24P15.C1.p7.tg
MFILRVHSVDSERPISVEEEESGFTYASKRAQPPLKLIQPSLKLTDRKGLIHLYRKSSHSSLPNPSSRSTTLFIVAVPNYLSSLDFIRFCDSRISQVSDILFIRNDGMEDRYSVLITFSDQSEADGFYNNLNGKKFAPSEAEVCHILYVMSVEHTEFDEVAAEAPTGFTELPTCPICLERLDPDTSGIVSTLCDHSFQCSCTSKWTYLSCQVCRLCQQQDEILNCSICGKTENVWACLVCGFVGCGRYKEGHSIRHWKETHHCYSLDLRTQQIWDYVGDSYVHRLNHSKIDGKSVEMSTSCLSHQGDCGLCECSEDTGISGAIFNSKVDSNMNLRSSVCLSGFIFVEQIVIEYNDLLASQLKGQRQYYESLIVEARSKQESSIAEAVEQIVVNTMQELQNKIEKCEEEKSGITEVNTKLIKEQDTWRKKAKEIEEREAALLGSKDEMITDLQEQIRDITVFIEAKKTLKKMSSDTDGIREGTVLPVPISPEPVSSVRRQKKSNRRK

SEQ ID NO: 1126 - protein, 429 aa, Arabidopsis thaliana
  Clone ID: AT_T22F8.C1.p40.tg
MGNACCVAARDKMVVPNSSAGENLQRSNIRHSPSWSFRWDNRGRVAGEETSLSWLSDGISRNDGSEIKFESAFVSSEGSPLDSFRTQTLQKSPASDLSFPRNSSMNTVFEQKENVSTESAAPSYLSPAQLSLSLASQPSSFPTSPLSSQSYLHPASSSTLKLTQHPRLSKQVSDGQIYGQNSLSRSSATEERQGTPTRYDSSQSGPSEGWSLQAFSEMMSSSRSNKALSYDNYDNDCFGLQRDKIDHHGNRMSKHQQHTCGACSRPLSEKSLWSSQKIFMTNELSVSAILACGHVYHGECLEQMTPEIDKFDPSCPICTMGEKKTAKLSEKALKVEMDLKARHNKRLRNRVLDSDFDCDDFVMFDHSHRTAAAASKSPRLVSSSSAKSYSAKPFLARHFSFGSRSNYKSPKENLPVKKKGFFWTKSSKI

SEQ ID NO: 1127 - protein, 247 aa, Arabidopsis thaliana
  Clone ID: AT_F14K14.C1.p7.tg
MVVRYLDWNRGLVVTADDEHQQSNRICGLQDIGGHVMKIPFVTFQIILFMRLEGTPASAKNIPILVLFVPLFLLQGAGVLFAMYRLVEKSVLLINSGSGSYGRYFTATSSAREFLGFFQHGARLLGWWSIDEGSREEQARLYSGEATGYNTFSPEVVKKMPKSDLVEEIWRLQAALSEQTDITSYSQQEYERLQNEKILCRVCFEDPINVVLLPCRHHVLCSTCCEKCKKCPICRVLIEERMPVYDV

SEQ ID NO: 1128 - protein, 304 aa, Arabidopsis thaliana
  Clone ID: AT_T16H5.C1.p60.tg
MAVQAHHMNIFSQFISPNRDCVKFQENMNHGEFEFTGGEVPLITGESFAVEPLAAKANFNKAESGLSYNFTVPPLSTKRQRDFQFSDSNAPVKRRSVAFDSSSPSLINVELVSQIQNQQQSEIDRFVAQQTEKLRIEIEARQQTQTRMLASAVQNVIAKKLKEKDDEIVRIRNLNWVLQERVKSLYVENQIWRDIAQTNEANANTLRTNLDQVLAQLETFPTASAVVEDDAESSCGSCCGDGGGEAVTAVGGGCKRCGEREASVLVLPCRHLCLCTVCGGSALLRTCPVCDMVMNASVHVNMSS

SEQ ID NO: 1129 - protein, 294 aa, Arabidopsis thaliana
  Clone ID: AT_K17O22.C1.p9.tg
MAVEARHMNLFSSQYITNRECVKSQTNMNNGQQIAGGGFPVTIGDRNLQYIDPINSFNKSESELTAISKRQRDSTFDSDALIASQKRRAIAFSPASLIDAELVSQIQQQNSEIDRFVAQQTETLRIELEARQRTQTRMLASAVQNAILKKLKAKDEEIIRMGKLNWVLQERVKNLYVENQIWRDLAQTNEATANNLRSNLEQVLAQVDDLDAFRRPLVEEADDAESSCGSCDGGDVTAVVNGGCKRCGELTASVLVLPCRHLCLCTVCGSSALLRTCPVCDMVMTASVHVNMSS

SEQ ID NO: 1130 - protein, 489 aa, Arabidopsis thaliana
  Clone ID: AT_F4P13.C1.p19.tg
MGGGNSKEESSSPSSSSWASHQSYPQYGPDSYNYPPPPTYAPAPSPAPAPAPVPAPSPASSYGPQYSQEGYASQPNNPPPPTYAPAPSPASSYGHQYSQEGYASAASQPNYPPPPSQSQVADRKKFDRRYSKISDNYSSLLQVSEALGRAGLESSNLIVGIDFTKSNEWTGAKSFNRKSLHHLSNTPNPYEQAITIIGRTLAAFDEDNLIPCYGFGDASTHDQDVFSFYPEGRFCNGFEEVLARYREIVPQLKLAGPTSFAPIIEMAMTVVEQSSGQYHVLVIIADGQVTRSVDTEHGRLSPQEQKTVDAIVKASTLPLSIVLVGVGDGPWDMMQEFDDNIPARAFDNFQFVNFTEIMSKNKDQSRKETEFALSALMEIPPQYKATIELNLLGVRNGNIPQRIPLPPPVQSGSSFSSSRIPNFEPSVPPYPFESKQMSSADDIQLCPICLSNPKNMAFGCGHQTCCECGPDLKVCPICRAPIQTRIKLY

SEQ ID NO: 1131 - protein, 273 aa, Arabidopsis thaliana
  Clone ID: AT_T22P22.C1.p10.tg
MESVGSNQISPYVSNRDQRHFLAQPVADRILRALRHRIRLLHRPNAGTFHVLGATCNVYTVTLMATPTCTCPDRKKPCKHILFVLIRVLGIPLDDKCLRQRRLRTCLLFHLFSAPTRPDCLASFRLQQRFLQLFPATTSQPGYTTNSSSSTSKMENEVDEEPATCPICLDDIIAIENVDGGNGGGKEKETAVVKCRVCKNKVHDECMLAWRKSRGRRPAICVVCRARWPANRSSKNPNVGDNNENCHGNCYLNLAPYVDEEVEDGVGTSQRPC

SEQ ID NO: 1132 - protein, 468 aa, Arabidopsis thaliana
  Clone ID: AT_F18O22.C1.p210.tg
MGTGNSKENWRQSSFRSTSASSASPSSSSWASQQSYPQYGAESYNYPPPPSYAQPPEYTQPPPPLYSTQPYSAPSYSAPPSQSYGSDNKKRLERKYSKISDDYSSLEQVTEALARAGLESSNLIVGIDFTKSNEWTGARSFNRKSLHFIGSSPNPYEQAITIIGRTLAAFDEDNLIPCYGFGDASTHDQDVFSFNSEDRFCNGFEEVLSRYKEIVPQLKLAGPTSFAPIIDMAMTIVEQSGGQYHVLVIIADGQVTRSVDTENGQLSPQEQKTVDAIVQASKLPLSIVLVGVGDGPWDMMREFDDNIPARAFDNFQFVNFTEIMAKNKAQSLKETEFALSALMEIPQQYKATIELNLLGRRNGYIPERFPLPPPMRGGSSSYNSPKPSRLPSFKPSVPPHPTEGYHVRSSPVPPPTSSASDNQLCPICLSNPKDMAFGCGHQTCCECGPDLQMCPICRAPIQTRIKLY

SEQ ID NO: 1133 - protein, 950 aa, Arabidopsis thaliana
  Clone ID: AT_T12C24.C1.p3.tg
MDQGRQVFSVDLLERYATKNRGMITCMAAGNDVIVLGTSKGWIIRYDFGVGSSNDIDLAVGRTGEQSIHKVFVDPGGSHCIATVTGVGGAETFYTHAKWLKPRVLSRLKGLLVNAVAWNRQQITEVSTKEIILGTQDGQLFEMAVDEKDKREKYIKFLFELEELPEAFKALQMETANISSGMRYYVMAVTPTRLYSFTGIGTLEQRRAVHFAWLSGTGIYHGGLNFGAQHSYPNGDENFVENKALLDYSKLSDGTEAVKPGSMALSEYHFLLLIGNKVKVVNRISEQIIEELQFDITSDSVSRGIIGLCSDASANVFYAYDQNSIFQVSVIDEGRDMWKVYLDLKVYAAALANCRDPLQRDQVYLVQAESAFTDKEYLRAASFYAKEALRTFLLHKLDNLSKDDKCQITMISTWATELYLDKINRLLLEDDTAIENRDSEYHSVIQEFRAFMSDCKDELDEATTVKILESYGRVEELVYFANLKEQYEIVVLHYIQYQFAPELIMLDAYETVESWMANKNLNPRRLITAMMRYSSGPHAKNETHEVIKYLEFCVHRLHNEDPGIHSLLLSLYAKQEDDGALLRFLQCKFGKGRENGPEFFYDPKYALRLCLKERRTRACVHIYSMMSMHEEAVALALQIDPELAMAEADKVEDDEDLRKKLWLMVAKHVVKQEKGAKRENIRKAIAFLKETDGLLKIEDILPFFPDFALIDDFKVSQRFLFSRHTRSGLGQTSCFCSLVIFFNTLLQEAICSSLEDYNKQIEQLKEEMNDATRGADNIRNDISALTQRYAVIDRDEECGVCKRKILMMSGDFRMAQGYSSAGPLAPFYVFPCGHSFHAQCLITHVTSCAHEEQAEHILDLQKQLTLLGSETRRDINGNRSDEPITSTTTADKLRSELDDAIASECPFCGELMINEITLPFIKPEDSQYSTSWDLRSETNLANQRTISLPV

SEQ ID NO: 1134 - protein, 433 aa, Arabidopsis thaliana
  Clone ID: AT_F12A21.C1.p7.tg
MGGSSSKESPRGGGSGRRYERSVSGSSSYSSAWDQSSYYQTPNHPSASPVSSYNSGRQTPKNLERKYSRIADNYRSIDEVTAALSHAGLESSNLIVGIDVTKSNEWTGARSFGRKSLHFIGTTPNPYQQAISIIGKTLSVFDEDNLIPCYGFGDATTHDQDVFSFNPNDTYCNGFEEVLMCYREIVPQLRLSGPTSFAPIIERAMTIVEESGGQYHVLLIIADGQVTRSVDTDNGGFSPQEQQTIDAIVRASEYPLSIVLVGVGDGPWDTMRQFDDNIPARAFDNFQFVNFTDIMSKNIDPARKEAEFALSALMEIPSQYKATLELGLLGQRTGHCPDRIALPPPTYATQSMRNSPRTSRSTSFQNKPYDNGVSSTPPSTTHNESQQQFCPVCLVSAKNMAFNCGHQTCAGCGEDLHVCPICRSSISVRIKLY

SEQ ID NO: 1135 - protein, 214 aa, Arabidopsis thaliana
  Clone ID: AT_MNJ8.C1.p10.tg
MNTNRSMKVKAKAIFRPQHKGFVNTIYANLYNETKEFLEDQNGAITLLRSYRGPHVSPIKLKPHCFSPLYISHLLQQSISHTRFCQDLGEKIAHNCAYLSGLPLIFEMFVVVELTQEVLITLPSASVAVPSKAASSDVLQRLVEEQKVESIDLEEEKKTCSICMENLNSESSSENIISCLHLFHQSCIFESESSVRGNIMKPCEALKIRLRYGF

SEQ ID NO: 1136 - protein, 932 aa, Arabidopsis thaliana
  Clone ID: AT_F5G3.C1.p7.tg
MYQLRKFDFFEEKYGGKIPEDVTGDIQCCSSGRGKVVIGSNDGSVSFLDRGVKFDSGFQAHSSSVLFLQHLKQRNFLVTVGEDEQISPQQSGMCLKVFDLDKVQEEGTSSSAPECIGILRIFTNQFPEAKITSFLVLEEVPPILLIAIGLDNGCIYCVKGDIARERITRFKLQVDGRSAITGLGFRMDGQALLLFAVTPESVNLFSMQAQPPKLQTLDHIGGSVNTVTMSDRSELIVGRPEAVYFYEVDGRGPCWAFEGEKKFMGWFRGYLLCVIDDSKTGNTVFNVYDLRNRLIAYSIVVDKVSNMLCEWGNIILIKADKSLLCITEKDMESKLDMLFKKNLYTVAINLVQSQHADAAATANVMRKYGDHLYGKQDFDEAMLQYINTIGYLEPSFVIQKFLDAQRIYNLTNYLEKLHEKGLASKDHTTLLLNCYTKLKDVEKLNTFIRKEDGIGELKFDVETAIRVCRAANYHEHAMYVAKKAGKHEWYLKILLEDLGNYDEALQYVSSLEPSQAGVTIEQYGKILIEHKPKETIDILMRLCTEQGIPNGVFLSMLPSPVDFITVFVQHPHSLMHFLERYAEIVQDSPAQAEINNTLLELYLSRDLNFPSISLSENGLDKDLIDHSVAAAVSKADPEKKTNADSKDAMEKDCTERQQKGLELLKMAWPSDLEQPLYDVDLAVILCEMNSFKDGLLYLYEKMKFYKEVIACYMQNHDHEGLIACCKRLGDSSKGGDPSLWADLLKYFGEIGEDCTKEVKEVLTYIERDDILPPIIVLQTLAKNPCLTLSVIKDYIARKLEQESKIIEEDRRAVEKYQETTKNMRKEIEDLRTNARIFQLSKCTACTFTLDIPAVHFMCMHSFHQRCLGDNEKECPECAPEYRSVMEMKRSLEQNSKDQDLFFQQVKGSKDGFSVIAEYFGKGIISKTRDATS

SEQ ID NO: 1137 - protein, 1859 aa, Arabidopsis thaliana
  Clone ID: AT_F15K9.C1.p1.tg
MSIVQKQEEMNGCGLNVDKVEAFTVSPQEKGRKNKRKLADPSQPNASSLTEFPPYELPSLKPQNHLSGNGSVGEVSNQLQVEVSESVEWDDPFACHLEELLSSNLLTLFLDTMKQLIDLGYTDDEVLKAVSRCRLYCGGNNLLSNIVNNTLSALKTGDEGAGSGDYVFEDLQQLVSYTLVEMISLIKEVRPSLSTVEAMWRLLMCDLNVLQAFEAEGDGLVSSSKLSDSESLGAESNPPKSSDPDNPKPPQSDPQSNRNEPLKFGNFPNTPNSKKTQSSGTTPGKEVCSGSTVSCQGMRSTSFTLVSDEKLVSCRKGRTKKEIAMLRQKSCVEKIRTYSKGSGYKAAKFASVGSFLLEKRVKSSSEFVPRNSSSKITAEIGVKVSLAEDSGCFVRKNSKLDSPVVVVDAKGYITALPARSVKSASKKKTGSESVTLIPSASEKKSDSSIPSTSEKKSGSESEEKASVSAKLAPDYYAGIPYDAALGIYVPRDKKDELILKLVPRVNDLQNELQVWTDWANQKVKEATGRLLKDQPELKALRKEREEAEQYKKEKQLLEENTRKRLSEMDFALKNATSQLEKAFNTAHRLELEQSILKKEMEAAKIKAVESAESFREAKERGERSLKDIHSWEGQKIMLQEELKGQREKVTVLQKEVTKAKNRQNQIEAALKQERTAKGKLSAQASLIRKETKELEALGKVEEERIKGKAETDVKYYIDNIKRLEREISELKLKSDYSRIIALKKGSSESKATKRESLGMPKVKRERECVMCLSEEMSVIFLPCAHQVLCFKCNQLHEKEGMMDCPSCRGTIHRRIQARFARSGVGEMKLQVRVVEARNLPAMDLNGFSDPYVRLQLGKQRSRTKVVKKNLNPKWTEDFSFGVDDLNDELVVSVLDEDKYFNDDFVGQVRVSVSLVFDAENQSLGTVWYPLNPKKKGSKKDCGEILLKICFSQKNSVLDLTSSGDQTSASRSPDLRLESPIDPSTCASPSRSDDASSIPQTTFAGRFTQIFQKNAITATPTQSSSRSIDASDLSEISKPVFSLELSEDESSSTSFEELLKAMESKDQGSEPPSNLSGGVVVDQLFMISPSDLNIVLFASDSSFYASLTELQGTTEVQIGPWKAENDGESVKRVVSYLKAATKLIKAVKGTEEQTYLKADGEVYAVLASVATPDVPFGGTFKVEVLYCISPGPELPSGEQCSRLVVSWRLNFLQSTMMRGLIENGARQGLKDNFEQYANLLAQSVKPVDSKDIGLNKEQALSSLQAEPQSDWKLAVQYFANFTVLSTFLIGIYVFVHIVFAIPSAIQGLEFNGLDLPDSIGEFVVSGVLVLQCERVLQLISRFMQARKQKGSDHGIKAHGDGWLLTVALIEGVDLAAVDPSGHCDPYIVFTSNGKTRTSSIKFQKSNPQWNEIFEFDAMADPPSVLNVEVFDFDGPFDEAVSLGHAEVNFVRSNISDLADVWVPLQGKLAQACQSKLHLRIFLDHTGGGDVVRDYLNKMEKEVGKKCCCAFLSAEWKFQINVRSPQTNSAFQKLFGLPQEEFLINDFTCHLKRKMPLQGRLFLSARIVGFYASIFGNKTKFFFLWEDIEEIQVLPPTLASMGSPIVVMTLRPNRGLDARIGAKTHDEEGRLKFHFHSFVSFNVAQKTIMALWKAKSLTPEQKVQAVEEESEQKLQSEESGLFLGVDDVRFSEVFSLTLPVPVSFFMELFGGGEVDRKAMERAGCQSYSCSPWESEKDDVYERQTYYRDKRISRYRGEVTSTQQKSLVPEKNGWLVEEVMTLHGVPLGDYFNLHLRYQMEESTSKPKTTYVRVYFGIEWLKSTRHQKRVTKNILVNLQDRLKMTFGFLEKEYSSRQQQQQVT

SEQ ID NO: 1138 - protein, 864 aa, Arabidopsis thaliana
  Clone ID: AT_T4I9.C1.p12.tg
MVEKQEEMNEFGAVNGGKVGTSSSVSPPQDKGRKNKRKLADPSPQNAASLTEFPRYELHSFKSQSPLCENDSNGQLKAEESDSVGWDDPFACHLEGLLSSNLLTLFRSAMNQIMDCGYSEDVVLKAISSSRFYCGGTDLVSNIVNDTLSFLKSGKKVAGSRDYVFEDLQQLVAYSLVEKISLVREVRPSLSTDEAMWRLLICDLNVLKAFEVDADGLEGSSVSNASKSSESPVAECNPPKSSDADNPKAPVSNTQSKQSEPVKFGNFANVNNSKNPHASGATPGKEVFSVSTASGEGTKSASLTSVSDEKLVSCRKGRTKKEMAMLRQKSCVEKIRTYSKGGGYKTAKFGGFLVEKRGKSASDLLSAQARNSSSKITTEVMKIPLAESSSTLSNSTKSDSPALDVKEHVTALPANNAPAPVASEKKSGSEPEEKPSVSTKPAPDYYAAIPYDATLGIYIPRNKRDELILKLVPRMKDLQKELQDWTDWANQKVKQATVRLLKDQPELKALRKEKEEAEEFRKEKQLLEENTIKRRSEMELALNNATNQLERTNNTIRRLELEQSLLKREREAANIRASESAESCREAKERVQRLLKNSQSWEGQKNLLQEELKSQRDKVAGLQQEVAKAKTRQNQIEVSSFVGKMPLHVLGLLVFGAVIYCMTTDHIISSTILFSAIIKMTNETKLQATWKQEKSATGKLTAQAAALKKERGKLEELGKAEEERIKTKAENDVKYYIENIKRLDTEISKLKLKSDSLKIAALKKGIDGNNDGNKSGMNHTTNTKANSMASAKVWENNQGAESKIKRERECVMCLSEEMSVIFLPCAHQVLCSKCNQLHEKEAMEDCPSCRAKIQRRIQARFARG

SEQ ID NO: 1139 - protein, 335 aa, Arabidopsis thaliana
  Clone ID: AT_MGH6.C1.p3.tg
MAVEAHHLNPLFSSNREMIHPVEASGVVYNTQMRYGTVPTFNPTVECQTSLFNPIYNISPVDRLVHQSMKPTIQSVDSSLTFNSDNNVDFLRPVSSRKRSREESVVLNPSAYMQIQKNPTDPLMFLGQDLSSNVQQHHFDIDRLISNHVERMRMEIEEKRKTQGRRIVEAVEQGLMKTLRAKDDEINHIGKLNLFLEEKVKSLCVENQIWRDVAQSNEATVNALRSNLQQVLAAVERNRWEEPPTVADDAQSCCGSNDEGDSEEERWKLAGEAQDTKKMCRVGMSMCRSCGKGEASVLLLPCRHMCLCSVCGSSLNTCPICKSPKTASLHVNLSS

SEQ ID NO: 1140 - protein, 381 aa, Arabidopsis thaliana
  Clone ID: AT_T9I22.C1.p13.tg
MELKNVKDAFDRVTKKQKLCYSKTHEVVDKMSQEIDKALKTIQEDNHESVVADLKKTFEEIAPINLLEASQKEINGVLTKYPKALDKTLNPDISTAYRNVKFDTHTVHQILAQFFYRQGMYDVGDCFISETGEVKPESSVTKAFMEMNMILEAMKERDLGPALKWVASNSDKLKEAKSDLELKLHSLHFLEIAKDKTSEEAINYARKHFATYSADSCCFPEIQKLMCSLLWIRNLNKSPYSEFLSPVLWTNAAKELTRQYCILLGESPESPLSVTVAAGSQVLPTFLKYLNVLPEKRKEWQTMEQLLVPVELSEEYRFYSVFVCPVSKEHSSEDNPPMRLACGHVLCKQSINRMSRNGSRSFKCPYCPTDIDASQCKQLYF

SEQ ID NO: 1141 - protein, 281 aa, Arabidopsis thaliana
  Clone ID: AT_K18L3.C1.p30.tg
MVGVLLSERNGSQKRHCSSISSDDGRKRVDKTRSAMLTDLDILDCPICYQALKIPVFQCGNGHLACSSCCPKLRNKCPACALPVGHIRCRAMERVLESVLVPCRYADLGCTKTIYYGRESTHEKICNFSPCSCPVQGCNYTGSYKDLYEHYDLTHSTGSTAYSFNGVSYIAAMMFISDKILIERVYEKKLLFVVQCFEEPCGVYVSVSCIAPSAPEVGEFSYGLLYTTWEGVTMTYQSPKVKKVLKVSSQRPKDSFMLIPHSLLCGPLLGMMLCINELKQM

SEQ ID NO: 1142 - protein, 375 aa, Arabidopsis thaliana
  Clone ID: AT_F22D16.C1.p14.tg
MKFCKKYEEYMQGQKEKKNLPGVGFKKLKKILKRCRRNHVPSRISFTDAINHNCSRECPVCDGTFFPELLKEMEDVVGWFNEHAQKLLELHLASGFTKCLTWLRGNSRKKDHHGLIQEGKDLVNYALINAVAIRKILKKYDKIHESRQGQAFKTQVQKMRIEILQSPWLCELMAFHINLKESKKESGATITSPPPPVHALFDGCALTFDDGKPLLSCELSDSVKVDIDLTCSICLVLFHSPLAGSTSKTKSLAMNIFKCNAINKSLTYGLQLIGEKQDTVFDPISLTCGHIYCYMCACSAASVNVVDGLKTAEATEKCPLCREDGVYKGAVHLDELNILLKRRDYWEERRKTERAERLQQAKEYWDYQCRSFTGI

SEQ ID NO: 1143 - protein, 313 aa, Arabidopsis thaliana
  Clone ID: AT_T12I7.C1.p7.tg
MSGEASTSRRKRQRVPSSVESVENGGGDAVARSGTLFELDLLDCPICCHALTSPIFQCDNGHIACSSCCTKLRNKCPSCALPIGNFRSRIMERVVEAVMVTCPNVKHGCTEKFSYGKELIHEKDCRFALCYCPAPNCNYSGVYKDLYSHFYVNHYDTWNQIGCGNFAGAWLRISEKILVLQYGQGPLIAVQCFKETQGMYVTVNCIAPCAPGVGELSFELSYKMPMGGNSTMMFKSEEMNRIQKVSFQTPEKDFMLVPYYFLGDFSTLKMEICIRKLKKDEEEADEDEESEEEEDDDDDDDDDDEEEDADEEE

SEQ ID NO: 1144 - protein, 889 aa, Arabidopsis thaliana
  Clone ID: AT_MQL5.C1.p29.tg
MAIYYKFKSARDYDTIAMDGPFISVGILKDKIFETKHLGTGKDLDIVVSNAQTNEEYLDEAMLIPKNTSVLIRRVPGRPRITVITTQEPRIQNKVEDVQAETTNFPVADPSAPEDEYDEFGTDLYSIPDTQDAQHIIPRPHLATADDKVDEESKIQALIDTPALDWQQQGQDTFGAGRGYGRGMPGRMNGRGFGMERKTPPPGYVCHRCNIPGHFIQHCPTNGDPNYDVKRVKPPTGIPKSMLMATPDGSYSLPSGAVAVLKPNEDAFEKEMEGLPSTTRSVGELPPELKCPLCKEVMKDAALTSKCCYKSFCDKCIRDHIISKSMCVCGRSDVLADDLLPNKTLRDTINRILEAGNDSTENVGSVGHIPDLESARCPPPKALSPTTSVASKGEKKPVLSNNNDASTLKAPMEVAEITSAPRASAEVNVEKPVDACESTQGSVIVKEATVSKLNTQAPKEEMQQQVAAGEPAGKKKKKKPRVPGNDMQWNPVPDLAGPDYMMQMGPGPQYFNGMQPGFNGVQPGFNGVQPGFNGFHPGFNGFGGPFPGAMPPFMGYGLNPMDMGFGGGMNMMHPDPFMAQGFGFPNIPPPHRDLAEMGNRMNLQRAMMGRDEAEARNAEMLRKRENERRPEGGKMFRDGENSRMMMNNGTSASASSINPNKSRQAPPPPIHDYDRRRRPEKRLSPEHPPTRKNISPSRDSKRKSERYPDERDRQRDRERSRHQDVDREHDRTRDRRDEDRSRDHRHHRGETERSQHHHRKRSEPPSSEPPVPATKAEIENNLKSSVFARISFPEEETSSGKRRKVPSSSSTSVTDPSASASAAAAVGTSVHRHSSRKEIEVADYESSDEDRHFKRKPSRYARSPPVVVSDVSEDKLRYSKRGKGERSRA

SEQ ID NO: 1145 - protein, 349 aa, Arabidopsis thaliana
  Clone ID: AT_K18L3.C1.p90.tg
MARFSVCGGDDGEGPSNNNHQSRKRQRLPSIDENEEDAETSDAGSSGEEDEDETQNQGMRPESEDRGSTSDDSDREVVIEERRFGKFVNSQSSSSSKDSPLSVTLLDPDVLDCPICCEPLKIPIFQCDNGHLACTLCCTKVRNRCPSCTLPIGYVRCRAMEKVIEASRVSCLNAKYGCKESTSYGNRFSHEQVCVFTPCSCPILDCHYTGYYKDLNNHVRAEHKDDLISFVWNTRLTISLDLNKKTTILQEENDGHVIVVQVFRALHAVYVSVSCIAPLTPGVGRLSCRLAKITVDSLLKQGFMVKNIQKVTNEHPEDGFMLIPSYLFSGNDNLNLQIWIGHGRIFVHS

SEQ ID NO: 1146 - protein, 1000 aa, Arabidopsis thaliana
  Clone ID: AT_T23G18.C1.p5.tg
MAAVPPENGVDGDDEREEEEEDEEEEEEEEEEENGDEAEEEPRLKYQRMGGNVPALLSNDAASCIAVAARMIALGTHDEFRAHTAPVNDINFDTEGEYIGSCSDDGSVVINSLFTDDEKMKFDYHRPMKAISLDPDYTKKQSKRFVAGGLAGHLYMNSKKWFGNKDQVCENVLHSGEGPIHSVKWRGSLIAWANDVGVKVYDTAKDQRVTFIEKPRGSPRPEALLPHLVWQDDTLLVIGWGTSVKIASIKSDQQQTGTFRQIQMSSLTQVDIVASFQTSYYISGIAPFGDSLVILAYIPIEGDGEKEFSSTTTLSRQGNAQRPEIRIVSWNNDELTMDALPVHGFEHYKAKDYSLAHAPFPGSSYAGGQWAAGDEPLYYIVSPKDVVIAKPRDAEDHINWLLQHGFHEKALAAVEASEGRTELIDKVGAGYLDHLIVERKYAEAASLCPKLLRGSASAWERWVFHFAQLRQLPVLVPYMPTDNPRLKDTVYEVALVALATNPSYHKELLSAVKSWPRSVYSALTVISAIEPQLNTSSMTDALKEVSIVCHALAELYVIDGQYQKAFSLYADLLKPEVFDFIEKYSLHEAIRGKVVQLMLLDCKRATVLFIQNRDLIPPSEVVPQLLKAGKNPQVLKAGKKCDSRYYLYLYLHALFEVSHDTGKDFHDMQVELYAEYDTKMLLPFLRSSQHYKLEKAYELCVKKDFLREQVFVLGRMGNAKQALAVIINKLGDIEEVIVTAVEFVSMQHDDDLWEELIKQCLNKPEMVKAVFVMQITTQTSLDSGKLVGLLLEHTVGNLDPLYIVNMVPNGLEIPRLRDRLVKIVTDYRTETSLRHGCNDILKTDIVNLLVKCFNEARRGVCLSHEDDDSRAKREDNNRSSFSQRMVVDKSLSIKMTEVKSKTRGDTRCCMCFDPVSIRGDTVVVFFCCHAYHETCLMDAAFSNNNHKTTKGSSGYEYSYDNGVDEEEEDEEEDEDGDGDRPGRSRLRCILCTTAAAASAR

SEQ ID NO: 1147 - protein, 340 aa, Arabidopsis thaliana
  Clone ID: AT_F8A5.C1.p13.tg
MLGGNNDNPVPQVLMNDSQFRYQSNTSLNQLHLLGTMRAGCTIDPVNYFANDNLAPMMRLNSTRGRETENNNIMQRQQKLQISLNYNYNNNNTVVQDEVPKQNLVSTGLRLSYDDDERNSSVTSANGSITTPVYQSLGDNIRLDLNRQNDELDQFIKFRADQMAKGVRDIKQRHVTSFVTALEKDVSKKLQEKDHEIESMNKKNRELVDKIKQVAVEAQNWHYKAKYNESVVNALKVNLQQVMSHGNDNNAVGGGVADHHQMKEGFGDSEIDDEAASYNYLNIPGMPSTGMRCKLCNVKNVSVLLVPCRHLSLCKDCDVFTGVCPVCQSLKTSSVQVFFF

SEQ ID NO: 1148 - protein, 366 aa, Arabidopsis thaliana
  Clone ID: AT_T12I7.C1.p6.tg
MVKGTNAEQALAREEASSSRPKRQRVPSIVEEEGENGGGDVVVRSGTLFELDLLDCPICCNALTIPIFQCDKGHIACSSCCTNVSNKCPYCSLAIGNYRSRIMERVVEAFIVRCPIVAGEASSSRQKRLRVPSIDEENGENGGRDVVVPSGTLSQLDLLDCPVCSKALKISIFQQSLFLAKRQNGCTETFSYGNELVHEKKCSFALCYCPAPNCNYAGVYKDLYSHYAANHKKLWTRFSCGYSMHVCMDFESKSLVLQQYSDGPLVVLQCFKEPPQGLFWTVNCIAPSAPGVGKFSYELSYSTAGNTLTFRSSEMNRIQKVSFQTPEKDFMFIPEYILCPMGLYKGTYICIRSLEEEEEEEEDNED

SEQ ID NO: 1149 - protein, 240 aa, Arabidopsis thaliana
  Clone ID: AT_F17K2.C1.p6.tg
MQSSSSSGGDDLEKQQQQQQKDKSPQKQSESANESNHLTIVVCNGDSSREELVGQIPPEKEVSLSRNGSSHEQCRVCLQDKEEVLIELGCQCRGGLAKAHRSCIDAWFRTKGSNQCEICQVVAVNVTPPETQPTTNYWVWRIDPSYRQEERERGCFSPLWVAFSILIGGLMLDVLISITLGVSALPVNIIIGVIVVLGLGTALRLTLEFCYEWSLRRAVHRAVQRAEANNFSNIAYPPAL

SEQ ID NO: 1150 - protein, 360 aa, Arabidopsis thaliana
  Clone ID: AT_F7J8.C1.p140.tg
MLQIRLRRDSPTETGNGARPSPTETVTVACPDHLVLADLPVAKGIGSVTPTTVIKPVGRRSRRQLGERVHFCVRCDFPIAIYGRLIPCDHAFCLECARSDSICYLCDERIQKIQTIKMMEGIFICAAPHCLRSFLKKLDFEAHVHDLHGSLLQADAEKEDGNQSDVQSTMQQSSASESTLRAPLRSQLQQSRELNRSASFAKSQSGFSQVQNYPPDSDNSRPPGFETASPKPGIRFPDYPQPMNLMQPPSLPVPMNQNPGLPQQFGFPSYPTTESGSSQQFFNGAQYEMTRTESGGSEQSSLLGYPPPSPMTNLNFQGSYPPPSWNPGMAPPHTTQQVNRGRDGQSFGWPQENRDGFGQE

SEQ ID NO: 1151 - protein, 820 aa, Arabidopsis thaliana
  Clone ID: AT_MJJ3.C1.p6.tg
MTNMAGTATTEFRWKSPPQPPSQEQPISDSDSDSGSDSENHQHRHNDLSNSIFEAYLDCHSSSSPSSIDLAKIQSFLASSSSGAVSCLICLERIKRTDPTWSCTSSCFAVFHLFCIQSWARQCLDLQAARAVTRPSSNPTEPEAVWNCPKCRSSYQKSKIPRRYLCYCGKEEDPPADNPWILPHSCGEVCERPLSNNCGHCCLLLCHPGPCASCPKLVKAKCFCGGVEDVRRCGHKQFSCGDVCERVLDCNIHNCREICHDGECPPCRERAVYKCSCGKVKEEKDCCERVFRCEASCENMLNCGKHVCERGCHAGECGLCPYQGKRSCPCGKRFYQGLSCDVVAPLCGGTCDKVLGCGYHRCPERCHRGPCLETCRIVVTKSCRCGVTKKQIWDDMTNKIVYCKISTHARGMTLFVACSLQRSMCSLSNNGNNILCLWCHGPRPPPNREFILKPTKKMLHIQAESTPGSPCPRCPEPVWRPCVGHHLAAEKRMICSDRTQFACDNLCGNPLPCGNHYCSYFCHALDIRSSSLDKRSESCEKCDLRCQKERTPRCQHPCPRRCHPEDCPPCKTLVKRSCHCGAMVHAFECIYYNTMSEKDQMKARSCRGPCHRKLPNCTHLCPEICHPGQCPLPEKCGKKVSICQFISIWDAVSVTSEILLVSILSWIKVVVRCKCLTLKKEWVCQDVQAAHRATGSDPKEVPKNQFGVGLLPCDSNCKSKLQVAESVLTQRNVKEIEEKEEPSGKNASKRRKRRGRGQDIQETTRLQKLAVTTKRILMVVMLVAMLAAVSYYGYKGLLWLSDWMNEVEEQRQKSRRYPRI

SEQ ID NO: 1152 - protein, 358 aa, Arabidopsis thaliana
  Clone ID: AT_YUP8H12R.C1.p32.tg
MAVDAHHLFLSPPQLFSNRELTMNNNTMEPTSGGFCNNNQTGYGVVSPFSVPNHTSTTTTATPPLLHVYGGSDTIPTTAGYYADGATNLDCEFFPLPTRKRSRDSSRSNYHHLLLQNPRSSSCVNAATTTTTTTLFSFLGQDIDISSHMNQQQHEIDRFVSLHLYQMERVKYEIEEKRKRQARTIMEAIEQGLVKRLRVKEEERERIGKVNHALEERVKSLSIENQIWRDLAQTNEATANHLRTNLEHVLAQVKDVSRGAGLEKNMNEEDDAESCCGSSCGGGGEETVRRRVGLEREAQDKAERRRRRMCRNCGEEESCVLLLPCRHLCLCGVCGSSVHTCPICTSPKNASVHVNMSS

SEQ ID NO: 1153 - protein, 1051 aa, Arabidopsis thaliana
  Clone ID: AT_F28A23.C1.p140.tg
MEISPADSLSISGAAASEVVSEPSVSSSSSSSSPNQASPNPFSNMDPAVSTATGSRYVDDDEDEEDVCRICRNPGDADNPLRYPCACSGSIKFVHQDCLLQWLNHSNARQCEVCKHPFSFSPVYADNAPSRLPFQEFVVGIAMKACHVLQFFLRLSFVLSVWLLTIPFITFWIWRLAFVRTFGEAQRLFLSHISTTVILTDCLHGDYFRHLRELGGQEERDDDVDRNGARAARRPAGQANRNLAGEGNGEDAGDQGAAVGQIARRNPENVLARLDIQAARLEAQVEQMFDGLDDADGAEDVPFDELVGMQGPVFHLVENAFTVLASNMIFLGVVIFVPFTLGRIILYHVSWLFAAARGPAVAASLHLTDTGLSLENITLKSALTAVSNLTSEGQGNGLLGQLTEMMKVNGSELNGANNTLSVATDLLKGSTVGASKLSDITTLAVGYMFIVFLVFLYLGIIALIRYAKEAVPSLLRQFLAAMRHLMTMIKVAFLLVIELGVFPLMCGWWLDVCTVRMFGKTMSHRVQFLSISPLASSLVHWVVGIMYMLQISIFVSLLRGVLRPGVLYFLRDPADPNYNPFRDLIDDPVHKHARRVLLSVAVYGSLIVMLVFLPVKLAIRMAPSIFPLDISVSDPFTEIPADMLLFQICIPFIIEHFRLRTTIKSLLRCWFTGVGWALGLTDFLLPRPEDNIGQDNGNGEPGRQNRAQVLQVGGPDRAMAALPVADDPNRSRLRAGNVNTGEEYEDDDEQSDSEYNFVVRIILLLLVAWVTLLLFNSALIVVPVSLGRALFSAIPILPITHGIKYAIEHVKSKRTSVLLNQIWKWCGIVFKSSVLLAIWVFIIPVLIGLLFELLVIVPMRVPVDESPVFLLYQDWALGLIFLKIWTRLVMLDHMLPIVDDSWRAKFERVREDGFSRLQGLWVLREIVFPIVMKLLTALCVPYVLARGVFPMLGYPLVVNSAVYRFAWIGCLSVSLFCFCAKRCHVWFRNLHNSIRDDRYLIGRRLHNFGEAALANQNQNQSSEDAGDGVLIGREGDVDNGLRLRRAIQQEA

SEQ ID NO: 1154 - protein, 226 aa, Arabidopsis thaliana
  Clone ID: AT_MBK5.C1.p22.tg
MENDQQGSYLRDEDKEEMEKRIRTVVIDSNLVLSNSTCGICRTAEDEYIKVYDDHNNDGEGDGDGDGDGDEDEDEDADADEDEDEDEDEDDDDDDDDDDDDDADDADDDEDDDDEDDDEDEDDDDDDDDENDEECDDEYDSHRLISTPYCTHKFCKTCWREYLETNFYSLEENLTVISCPDQDCGASVRLKTIEKLGVHDQDMYLSYVMRVYIENESKQLPAPDDN

SEQ ID NO: 1155 - protein, 414 aa, Arabidopsis thaliana
  Clone ID: AT_F4H5.C1.p13.tg
MMIKVKKETMRACLSCSICDNILRDATTISEKCIYEKITEDEIETCPVCNIDLGSTPLEKLRPDHNLQDLRAKIFALKRRKVKAPGIVSLPGKRKERSISSLVVSTPMVSAQAGTTRRRTKAPTRKELRNGSLAERTVKKEESSGDELLESTSSPDTLNKFTQNKRQSKKSCKESISNKENKDGDEPWDSKMDWKPLNFLVEVANGTKPLKSSASQGSGSKSEHANVSRNQFQGSKTKTKNKKRKCKREDDKSNNGDPTTSETVTPKRMRTTQRKRSATTLGDSRNLPQPDESSAKQERRNGPVWFSLVASNDQEGGTSLPQIPANFLRIRDGNTTVSFIQKYLMRKLDLESENEIEIKCMGEAVIPTLTLYNLVDLWLQKSSNHQRFAALVGSSAKDFTMVLVYARKLPECNM

SEQ ID NO: 1156 - protein, 274 aa, Arabidopsis thaliana
  Clone ID: AT_T15F16.C1.p1.tg
MGRTKEQATLTRYPPCPRNPAKFNDINKALQEKGYGKALKRKPWTGVTCPVCLEVPHNSVVLLCSSYHKGCRPYMCATGNRFSNCLEQYKKAYAKDEKSDKPPELLCPLCRGQVKGWTVVEKERKYLNSKKRSCMNDECLFYGSYRQLKKHVKENHPRAKPRAIDPVLEAKWKKLEVERERSDVISTVMSSTPGAMVFGDYVIEPYNGYDHQDDSDDYSDSSDDEMEGGVFELGAFDLGRLQPRSAAISSRGIRGMIIRNRWARSRGASRRRQT

SEQ ID NO: 1157 - protein, 264 aa, Arabidopsis thaliana
  Clone ID: AT_T32E8.C1.p10.tg
MGKIKKVNQRGHIATPYPSPCCKKEWAGSTCPVCLESPHNAVLLLCSSYHKGCRPYMCATSSRFANCLDQYRKSYGNENSGQPELLCPLCRGQVKGWTVVKDARMHFNSKRRTCMQDNCSFLGNFRKLKKHMKEKHPHACPRAIDPALETKWKRLERERDRRDVISTIMSSTPGAVVLGDYVIEPHNRGVYDEEDEEEDYSSDDSLSNGILDLESSWQGQSHHIRFLDMESSDFASSSSSPASPSRSLHRLLFPRNQRGGNRGR

SEQ ID NO: 1158 - protein, 289 aa, Arabidopsis thaliana
  Clone ID: AT_F9E10.C1.p28.tg
MVAVTDSELFHGSPISTDFSKKRKANWFCKLKQWKIDARRKQWISQWKKANVDEEEIGRRLRSLLEKLTDQKAWRIDYDDDEDDEIDLERTSSFASSPTSVLKRKDSVSGDCFCCSKQMTEEEEEVFDDAYDNWDGFKDALNSFENDNNESSRLVTEDFEQEEEDLIPDTSQRMNKCKQEAAPGNQTTIHRNSNKKKRSNSEKQRGDGDEECPICSELMDATDLEFEPCTCGFRICLFCHNKISENEARCPACRKDYKKTSKKSGEVGYQQRGRGTIPLSPSFRGLDRA

SEQ ID NO: 1159 - protein, 276 aa, Arabidopsis thaliana
  Clone ID: AT_K18L3.C1.p70.tg
MVLASISEALISQGDGGERVAKRQRSAIVLLDLDILDCPICCEALTSPIFQCDNGHLACGSCCPKLSNKCPACTLPVGHSRSRAMESVLESILIPCPNVRFGCTKSFFYGKESAHEKECIFSQCSCPSSVCDYTGSYKDLYAHYKLTHSTNIFWNIKRFRCANFFTTSMLISDKILIKRVHEKKLLLAVQCFREPCGVYVTVSFIAPSAPEVGEFSYQLSYNVDGHTVTYESPEVKRVCKVSIETPQENFMLIPHSLLRGDLLEMQVFIIENVDQE

SEQ ID NO: 1160 - protein, 303 aa, Arabidopsis thaliana
  Clone ID: AT_T12I7.C1.p8.tg
MENITNNSERSLDRPKRQRPVSMENVGGTASGSEVARSATLLELDLLDCPICYHKLGAPIYQCDNGHIACSSCCKKVKYKCPYCSLRIGFFRSRILEKIVEAVVVSCPNAKYGCTEKIPYDNESESAHERVCEFTLCYCPEPECKYTGVYTDLYRHYHAEHKTDHSWFKCGEYNNAWLHVTGEKLSFLVLQEYEDGPLVVVQCSMESHGICVTVNCIAPCAPGVGEFSCHLIYRNGSEKITFESKKMNKIQKVSPENHVANYKPIPYYLRGEASNFMSIPYYLLDEASILKMQICIRRSGEEV

SEQ ID NO: 1161 - protein, 412 aa, Arabidopsis thaliana
  Clone ID: AT_F4N21.C1.p20.tg
MVVFLEDNEDDLIVVQAFKGLEGVSELYCTYGFGSTQPLMQSSRTQPAWDQHRAGENPIGGDLGMARSGGNDGHRAGDSRLSKRQRLPPSPDESEEELDPELFEEPSNLEGYEDGEFEEDEEEFEEEEEELEEEEDEEEEEEENVTTDEQSGSPKSSQPVKLQSSDVLDCPTCCEPLKRPIYQCSNGHLACSSCCQKLNKKCSFCRCNIGDIRCRAMEKVIEASIVPCPNAKHGCKETTTYCNQSSHEKVCKFVRCSCPVSNCNYVSSYSNLKSHACSTAHVWGEDDIHFQLVIDRPRIFNMNLGRKKTVVFKEEKEGDLIVVQAFKGLEGVYVTVNRIAHMAPGIRDLSCSLAKLNEYSTLRSGSLVKKIQKVREKMHLEDDLMWIPPKMLSGDHWKMQICIAYGYKFIHI

SEQ ID NO: 1162 - protein, 989 aa, Arabidopsis thaliana
  Clone ID: AT_F9K21.C1.p210.tg
MSDYGEKTCPLCAEEMDLTDQQLKPCKCGYQICVWCWHHIMDMAEKDQSEGRCPACRTPYDKEKIVGMTVDQERLASEGNMDRKKIQKSKPKSSDGRKPLTSVRVVQRNLVYIVGLPLNLADEDLLQRKEYFGQYGKVLKVSMSRTATGLIQQFPNNTCSVYITYGKEEEAIRCIQSVHGFILDGKALKACFGTTKYCHAWLRNVACNNQDCLYLHEVGSQEDSFTKDEIISAHTRVQQITGATNTMQYRSGSMLPPPLDAYTSDSSTGNPIAKVPSSTSVSAPKSSPPSGSSGKSTALPAAASWGARLTNQHSLATSALSNGSLDNQRSTSENGTLATSTVVTKAANGPVSSSNSLQKAPLKEEIQSLAEKSKPGVLKPLQQKIVLDPESKRTTSPNRDPSSNQISCLVESSYNSRVIDKPSAVENSLEHTSEIAEDVFDVGKLSADVAWMGITTNSRDETPGVPVVIGTHCDLGSITQSDNDVQNLEQCRKQSPTNTYAEADISLNGIHGSRPEWDWRSGLQSQIDVKEPLEVNDFSSFNNNRRGIAEAVSHSTSKFSSSISILDSNHLASRSFQNRETSCGMDSKTGSSFEIGSDRLHLPNGFSEKAMSNMEHSLFANEGRSNIQNTEDDIISNILDFDPWDESLTSQHNFAKLLGQSDHRASTLESSNLLKQHNDQSRFSFARHEESNSQAYDNRSYSIYGQLSRDQPLQEFGANRDMYQDKLGSQNGFASNYSGGYEQFATSPGLSSYKSPVARTQVSAPPGFSAPNRLPPPGFSSHQRGDLSSDIASGTRLLDSANLLRNAYHVPPPSGNLNAAGDIEFIDPAILAVGRGRLHNGMETADFDLRSGFSSQLNSFDNDARLQLLAQRSLAAQQVNGFHDPRNVNNFSSSFSDPYGISSRPTDQTQGTGLSPFTQLPRQASANPLLSNGHWDNKWNEPQSGNNLGITQLLRNERMGFNDNVYSGFEEPKFRRPGPGDPYNRTYGI

SEQ ID NO: 1163 - protein, 124 aa, Arabidopsis thaliana
  Clone ID: AT_F16M14.C1.p12.tg
MLVAIQFCNRFQCSGGEGHLTEDDSARTRLLADKDDDGSSMGSCDDSYANDDADLEEFMGNDGEASNRSRRLCAICFDVPRDCFFLPCGHSVSCYECGTTMQEADGSCPICRRKMKKVKRIYTV

SEQ ID NO: 1164 - protein, 488 aa, Arabidopsis thaliana
  Clone ID: AT_F3L17.C1.p20.tg
MEARPDSKKKGGVVFRDRFNSNSCKVPICSDEKKSMNFTRFVGSSDKKEKSVLSTYRSSPNGKEVIGTSSKICISSSSSVKSGEKQPFSQIAIDSSESSRGSEDEVESEILQVPLGRDKRRMNNKLIYGKVITPEAECSKLPSSSRIKRGFRQRFGLSKQEFHPGPSGQSTSANRGCSPLLSGVIPSGFGLDKRLSRKADTISKTKVYGESSSSSSARGKNVTEPPPVEVRRRSFNPRGSVSDSRRARHCILDDDNDVASVGSQRLANRNNSRIRGSGRDGLSSVTAAEMSQTETSNNLNSPVSLELFSGFPEFGLSGSLLSHDSFRSYNLDGISEILPELDRIEQDIELNYEDLLIMETGLLLGGLSFHDQHRDMRLDIDNMSYEELLALEERIGTVSTALTEEAISKCLKTSIYQMKPLSYGSITKSPSDNKEDAKCSICQEEYTIGDEVGRLHCEHTYHVKCVQEWLRIKSWCPICKATAETSSK

SEQ ID NO: 1165 - protein, 396 aa, Arabidopsis thaliana
  Clone ID: AT_MCD7.C1.p7.tg
MEETMAARYWCHMCSQMVNPVMESEIKCPFCQSGFIEEMSGNGGGGGGRGIRDVQDSETDFGTDRALSLWAPILLGMMSSPRRRRRFRRSEFGEENDDNGDDLTTNADGNGNDSNNSNNNVYRHHRARRHGGEIDLDREFESILRRRRRSSGNILQLLQGIRAGIASEYESSDNNWDNSRERDRVIMINPYNQSLVVPSDQNQNHPSLTSLGDYFIGPGLDLLLQHLAENDPNRQGTPPARKEAVEALPTVKIMEPLQCSVCLDDFEKGTEAKEMPCKHKFHVRCIVPWLELHSSCPVCRFELPSSADDDDETKTDSERVLRTRNVRETSNGNVVENVGNADRGREDEVRSGNGRRFSFPWPFSGLFSSSSSSSSSTSGSQSGENNFFSRSSGSSR

SEQ ID NO: 1166 - protein, 337 aa, Arabidopsis thaliana
  Clone ID: AT_F15A17.C1.p230.tg
MGNLISLIFCCGRRQRSNIPPAMETAPLELPPNRFVFAAVPPYLNPNPNYVDQYPGNCLPPPVTEPPMLPYNFNHLHHYPPNSYQLPHPLFHGGRYPILPPPTYVHQKAVTIRNDVNLKKKTLTLIPDPENPNRLLVSFTFDASMPGRITVVFFATEDAECNLRATKEDTLPPITFDFGEGLGQKFIQSSGTGIDLTAFKDSELFKEVDTDVFPLAVKAEATPAEEGKSGSTNVQITQVVYTKEKGEIKIEVVKQILWVNKRRYELLEIYGIENTVDGSDEGKECVVCLSEPRDTTVLPCRHMCMCSGCAKALRFQTNLCPVCRQPVEMLLEINKNG

SEQ ID NO: 1167 - protein, 200 aa, Arabidopsis thaliana
  Clone ID: AT_F17P19.C1.p5.tg
MSQSLNQDAIDEAIALDLQFDDLYLTINDQYIALKIKQNEEAMSIQADEDYAKMLQLQEDEETAKTLHAMEENPPNIPQSDVPSTSRDTSGLNDGDRRQDQPTLVVNQTAIENNNPGNGSGESTEVVNKEGLPENIISGLPTQKYSRKTWWWSKKTFVPDRKECSICIADYEKGDKITILPCKHAFHKDCIANWLKENKV

SEQ ID NO: 1168 - protein, 279 aa, Arabidopsis thaliana
  Clone ID: AT_T17A5.C1.p9.tg
MASSSSSSYRFQSGSYPLSSSPSLGNFVERIKDACHFLVSAVLGTIISAILTFFFALVGTLLGALTGALIGQETESGFIRGAAIGAISGAVFSIEVFESSLDLWKSDESGFGCFLYLIDVIVSLLSGRLVRERIGPAMLSAVQSQMGAVDTAFDDHTSLFDTGGSKGLTGDLVEKIPKMTITGNNNTDASENTDSCSVCLQDFQLGETVRSLPHCHHMFHLPCIDNWLLRHGSCPILTSQFRYFYSSYIKSLLCSSSLLLEFHSHCRTPSSLMYKETQK

SEQ ID NO: 1169 - protein, 203 aa, Arabidopsis thaliana
  Clone ID: AT_T4C9.C1.p50.tg
MNSRKVEFRFTNLQRKLSSPSHANSVIVEIDTKSEEIFVNQTTDHQTRRSTPATLSCLDTINLSSSSHDHIRSLLRTRFASHHWLCDDLASEISTAAIDLGFGRNGFTITVVVTVTYRTVSVTSNNKKSLRIVLLGRIKAEELKSLKMETESCSICLENLVSGPKPSDLTRMTCSHVFHNPCLLEWFMRKNTCPLCRTELYDR

SEQ ID NO: 1170 - protein, 432 aa, Arabidopsis thaliana
  Clone ID: AT_F25O24.C1.p10.tg
MYQIFFFFLPLLHSYASAQTPPPFRNGDLVANFEPSLAVVTGVLAIMFALTFVLLVYAKCCHIDLRSGSGDRRRHDRRLRQGIFFNRSTASSDRFSGLDKTAIESLPLFRFSALKGSKQGLDCSVCLSKFESVEILRLLPKCRHAFHIGCIDQWLEQHATCPLCRDRVSMEEDSSVLTNGNSFRFLNQSEIREDSSLELYIEREEEEERIHREELSGSSRFSIGESFRKILKLGNKEKTLLDEHVNDKDEKKLMHKFNHRIVVSDVVFKNRWSNVSSSDLMFLNSEMVNSISSERFSSLDHVKRGDEEDQIGILRIKEEMEAKRMLENKLTSMTTMFSSENGDSGSKSRSVMIEPGRRSVSDITAVPRLSISIHGDCSGSAAETASALQNGGNETEERRRRLWLPIARKTAQWFANREKRSQINTTHQHFDV

SEQ ID NO: 1171 - protein, 512 aa, Arabidopsis thaliana
  Clone ID: AT_f2o15.C1.p210.tg
MDPTNSRHGASFEFSTRRFTLSTFGQNAPSLYVTTVYNSAIIYPVKHSPRVYLPSNPTPLIPLLRIALKTTFSFSHLQTSLSLLWSAILLSSSSQILSPSKKILKMPSTPTTPTTTTPITASYWCYSCTRFVSVWADQGTTTVGSVACPHCDGGFIEQINDSSSAATELTIPASTEVRSINNNRRSVIRRRRSGRRPSFNPVIVLQGGAGEREEGEEGDAARDRRAFEFYYDDGSGSGLRPLPDSVSEILMGSGFERLLEQLSQIEASATGIGRSGNPPASKSAIESLPRVEISDCHIGSEANCAVCTEIFETETEAREMPCKHLFHDDCIVPWLSIRNSCPVCRFELPSEPNRRSNNNEEDNAVGMTIWRLPGGGFAVGRFNAAMRDGERVLPVVLTEMDGGGIGNSQDGPRRISWVRSHGTLESDSNGTGSGSGSGGRLRRMVRGMVSLMRRVRPNRSSSSSSAAISTSSDNLDLNIEVESRVLDRSNSVMRRYFRRNRSNRDSSSSVLH

SEQ ID NO: 1172 - protein, 351 aa, Arabidopsis thaliana
  Clone ID: AT_T5A14.C1.p7.tg
MEEAVVTRYWCHMCSQTVNPVMEAEIKCPFCQSGFVEEMEDDDDHDSSDPADVRANNSLWAPILMELMNDPVRRRRNQSVESVEDNQNEVQTENNEDDGENDLDWQLQEILRRRRRHSAAVLQLLQGIRAGLSVESESTGNGGNNPGRVILINTSNQTITVQNSADMDSVPAGSLGDYFIGPGFEMLLQRLAENDPNRYGTPPAKKEAVEALATVKIEETLQCSVCLDDFEIGTEAKLMPCTHKFHSDCLLPWLELHSSCPVCRYQLPADEAKTDSVTTTSDNNGSSSASATTSHGAENSDGNRRQEEEEEEEEEEEEENENNDGSGFSIPWPFSTLFSSSQDSNAPTDSS

SEQ ID NO: 1173 - protein, 218 aa, Arabidopsis thaliana
  Clone ID: AT_F18O14.C1.p14.tg
MSDVPSCSSGNDTNNNDSSNFECNICLDLAQDPIVTLCGHLFCWPCLYKWLHLHSQSKDCPVCKAVIEEDRLVPLYGRGKSSADPRSKSIPGLEVPNRPSGQRPETAQPPDPNHGFAHHHGFGGFMGGFAAPMASARFGNVTLSAAFGGLIPSLFNLHFHGFPDAAMYGAAASGGFPHGFSNPFHGGHSHMHSYQRHTASEEIDLANCISLFILDFIA

SEQ ID NO: 1174 - protein, 225 aa, Arabidopsis thaliana
  Clone ID: AT_F27J15.C1.p36.tg
MSANELPASAQSLQEQFLGSFVTRKLLLHDPFDHNSLRVFAVAPSPLITHENNLKGNVLMLLSVLICGIICCLGLHYIIRCAFRRSSRFMISEPISSLSTPRSSSNKGIKKKALRMFPVVSYSREMNLPGIGEECVICLSDFVSGEQLRLLPKCNHGFHVRCIDKWLQHHLTCPKCRHCLVETCQKILGDFSQADSMASTPTESVIVRIDPLEPEGRVNTFRESS

SEQ ID NO: 1175 - protein, 212 aa, Arabidopsis thaliana
  Clone ID: AT_F2A19.C1.p150.tg
MSTATLVVFPPPPPVPIPTYITSLGLGYSIAIALGFLVLISTIILSSYICCRASRLRFSASAANANANASFSDRGVIVPRIIFVAEDDDLESGNVVVGGLDHSVINSYPKFHFTKDITAVVNGDGFHDGEGRETTCSICLCEYMEEEMLRMMPECKHYFHVYCLDAWLKLNGSCPVCRNSPLPTPQSTPQSTPLSEVVPLSQYAADRRRSRR

SEQ ID NO: 1176 - protein, 302 aa, Arabidopsis thaliana
  Clone ID: AT_F6A14.C1.p25.tg
MPNSMRKTHGMAERSDDFDCTVCLKLLYEPATTPCGHTFCRSCLFQSMDRGNKCPLCRTVIFMTPRTCAVSVTLNNIIEKNFPEEYAERKSEQDTLVHLGNESMPLFVMDVIIPCEKNNGRKSSDGNALDSATGSPVDVACEVEITECDPLPDGRFVLELESHRRCRIVKAWDQDGYRVAEVEWVKDIPPQSEQGKADLRELTTSAASFARSWLDRAKEAARQGDRRRLEILLNVESMIPTPQDPERFSFWETFRKIGTTSASGYWRENKARVDISPISRKRMQNAMNWQHDGIVLPVKLQR

SEQ ID NO: 1177 - protein, 158 aa, Arabidopsis thaliana
  Clone ID: AT_F11B9.C1.p106.tg
MTSSSPSPQASMLLYWHENQYDDRNFQIHGRTLFFALALFSVVLFFALLTLYIHRNCLPRDSINLHASSPDRLTRCRSGGLDPAEIRSLPVVLCRRERAEEEEEKECCICLGGFEEGEKMKVLPPCSHCYHCECVDRWLKTESSCPLCRVSIRVDSSS

SEQ ID NO: 1178 - protein, 670 aa, Arabidopsis thaliana
  Clone ID: AT_F17I5.C1.p130.tg
MSSLGSSKSLRDEMEVTTADVFPEVNAAAVTENLDRNELVLADGVVSAEERNIEPDNRGERKIESESPPEDDVCPICFGSFTVPCRGNCGHWYCGNCILQYWNYAAISRPCKCPMCVRHITKLSPEPSLQERQEQEVKEVLDKVRRYNRLFVGGLTGFVQMFMSTLYTAAEFNFIPTGGFRIVTVFDYAAIAMILILRLVGIYRRRRLAQQKKKHRLSFLLENHLFRSIESERRRKENGCPYNISGGIRRSGIITCVPGESSVKDNPVIACLDRLKEFDSVSIDGPLRDEVFDEISSLFKNLNELCSSQESGNAAIATKHGAVDLTCSICSKIKISTRSNRVLVPCFKALAVLIRDIQSTERFRNCTGPNIVVDLLNDSSSDSDLLDAGFAVVAAAATGNEVVKQLFMELKIDELILQVLNRESKTTIRALYDAICALLTPDDFRVVASQVYGYARTFAKLGIATALTEALQAGIGSDSLVSASTALKAIAVNDEICKSIAESGGIDTLLRCIDDSGEQGNKTAAKTCCSLLSKLAGSDSNKSTIVEKQGLDKLITLALRFSDDPLVIQEVMLIISIICLRSPDHAAKAIEAGAGDLAVQAMKRFPVAAQMQRNACNMIRNIAVRSAENRTILLANGIEKLIRTAKANNETCRAAATDALRDLGLDNYNN

SEQ ID NO: 1179 - protein, 202 aa, Arabidopsis thaliana
  Clone ID: AT_F16J13.C1.p210.tg
MNDPIPKPIVSVQVQAVKVSTNSIFLIVNTIKDEILINPVTGHRAETSTPLSYKSLPINFSLPSCSHHHIQSLLHDQLHSDDNWLCDHLVPKISTAAINAGFMNNGVELTVGVTVTYQYVHVEETSSKESRMVRLGSMKAEELKSFNMETDSCSICLQSLVSSSKTGPTRMSCSHVFHSSCLVEWLKRKNTCPMCRTVLYDR

SEQ ID NO: 1180 - protein, 537 aa, Arabidopsis thaliana
  Clone ID: AT_F16G16.C1.p4.tg
MIQLKVYAGLSTLATLVVIYHAFSSRGQFYPATVYLSTSKINLVVLLNMGLVLMLSLWNLVKIVFLGSLREAEVERLNEQAWRELMEILFAITIFRQDFSVGFISLVVTLLLIKGLHWMAQKRVEYIETTPSVTLLSHVRIVSFMVFLLILDCLLTYSSIQQLIQSRKASMSVFFTFEYMILATTTVSIIVKYAFYVTDMLKEGQWEGKPVYTFYLELVRDLLHLSMYLCFFLMIFMNYGLPLHLIRELYETFRNFKIRVTDYLRYRKITSNMNDRFPDATPEELSSNDATCIICREEMTSAKKLVCGHLFHVHCLRSWLERQNTCPTCRALVVPAENATSTASGNRGPHQESLQQGTGTSSSDGQGSSVSAAASENMSRHEARFQAAASAASIYGRSIVYPSSANTLVWSQGNSLLPQTEVEAQRRFLESQIEDILVSNFVKDEAMKSLIWLTAEEAAKNRGKVLSLYRQLLRSINSPKLQLSYASRLAKKAEVRTIFLFGSEEISKHNVADLIRTGEYALSQLKQGKIPNNSTQY

SEQ ID NO: 1181 - protein, 217 aa, Arabidopsis thaliana
  Clone ID: AT_msk20.C1.p10.tg
METETLRTIEVSTMVSNRPKIVGVTNTVLIYQEEEIEELIEYESGIVANLGWYTSPLETNAHILLNPRRLTRRVLTQLLDDQFLGQKIAHDVKDSFANDNSLRQPVTVTVYVTYIKERRVIFPHGPSLLSRGASGEVFHRLVEEQRVESADLEEEDETCSICIEKFSESHEDIIRVPDCLHLFHQGCLFEWLGLQNSCPLCRKVPYEEEDEDEDEEG

SEQ ID NO: 1182 - protein, 308 aa, Arabidopsis thaliana
  Clone ID: AT_mzn1.C1.p30.tg
MSEEDGGSMSVKSSLSSFLKILSSYNSNVLLAALVFLLLVVLFVLLLHFYARFFWSPSHQDFSAAARHRRRRRRNRRRTVTTTRIIPSLPLGGFDDGVSSPAATATRDDKGLDSSVISSIPLFVYEENEEEEDEEEECVICLGLWEAGDFGRKLRNCGHGFHVECIDMWLSSHSTCPLCRSPVLAAVSDEENLKLAVNAVEEEAEVRLQMSPAGENESNVSGDRRVSLSLSVMEDDLKTGDDDGEEEVRIEVFDDDEEINDGGTRSDRRRSMSMTSSASSSLMRMLSSSSSRSERNKVFPTARQDSSK

SEQ ID NO: 1183 - protein, 409 aa, Arabidopsis thaliana
  Clone ID: AT_F11A12.C1.p102.tg
MASTKPDSAINLEEEAEGDGVAVDDPIFIPETTNLLVRYSPFDDRDIDCNPYFPFTGPISDSGSGSYSDSEPDPNSCPIDFFDRDSSDVDVAEYLESGGLTAGDYNIWGFYDPKEDEEEEEIVLGTSGSDLQPGDSGEQGLRVTGIDSDSDCEDGVFDFISEDSSGNRGNDSGRVEVGTGLPPVWDHLFGEGTVLADEEWEEVQNAINWTAFSGPEDEDEEDELSSLSRDDEEEDHELDWQVLLTVNNVVNYIEQAEGIMLNPDDIDPDYYLYLSGLDEFDENHSGHYDADAILGQMFDDETGIRGNPPAAKSVIQDLPVVELAVEELDKGNNVCAVCKDEMLVEEKVRRLPCSHFYHGECIIPWLGIRNTCPVCRYELPTDDLEYERHKSSERGDTGLARNVLPGRYS

SEQ ID NO: 1184 - protein, 395 aa, Arabidopsis thaliana
  Clone ID: AT_F12A12.C1.p140.tg
MMPNSRSATITPTTESTTTTTTTTTTLTTSYWCYSCTRFISVWEDQDANAGVLCPYCNGGFIEEIEDSSNSTVAAIPASTPEVRSVEETHRSIIRRRRSNRRTSFNPVIVLHGGGGGGAGERVENEEGDGATRERRAYEFYYDDGSGSGLRPLPDSVSEILMGSGFERLLEQLSQIEASGNGIGRSGNPPASKSAIESLPRVEISDCHTKAEANCAVCTEVFEAGIEGREMPCKHIFHGDCIVPWLSIRNSCPVCRFELPSDPIQRSNEEEHAVGMTIWRLPGGGFAVGRFNAGVREGERILPVVLTEMDGGGLGSNEGPRRISWVRAHETPEMSRNGGRSGNGGRLRRAVRGMVSFMRRVRPSRGSSNSNVIDLDSDGETRVMNRSTSLIRRFF

SEQ ID NO: 1185 - protein, 221 aa, Arabidopsis thaliana
  Clone ID: AT_K2A18.C1.p15.tg
MDGYYSLSPISVLHRIKDSFHFAVSALLANLFSALFTFFFALVGTLLGALTGALIGQETESGFIRGAAVGAISGAVFSIEVFESSLLLWQSDESGIGCLLYLIDVIASLLSGRLVRERIGPAMLSAVQSQMGAVESQFQDHTDIFDTAISKGLTGDSLNRIPKVRITDTSPEIVSCSVCLQDFQVGETVRSLPHCHHMFHLPCIDKWLRRHASCPLCRRHL

SEQ ID NO: 1186 - protein, 106 aa, Arabidopsis thaliana
  Clone ID: AT_F6A14.C1.p24.tg
MKIYFSHSIIRNPQPENEGTITVNAKIDGYNPTPASKLVVKSLARKIYKMTTSSTGEMCIICLEEFSEGRRVVTLPCGHDFDDECVLKWFETNHSCPLCRFKLPYQ

SEQ ID NO: 1187 - protein, 124 aa, Arabidopsis thaliana
  Clone ID: AT_MYC6.C1.p14.tg
MLPVIMIIGTGYIVYYTIVGFWVIVFIVLLCCRTPPPPPPPPPPQQDIETGHIPAINKTTVETIIKVEDVEEGDEGCCSICLEEFKIGHELMCIKKCRHVFHRFCMLSWIDANRNCPICRCSVD

SEQ ID NO: 1188 - protein, 334 aa, Arabidopsis thaliana
  Clone ID: AT_MXK3.C1.p15.tg
MSDAPSSSPDATASHWCYHCNKRVVVETLDDFVVCCECNKGFVESIQPTPAAYSSPAPPQPLSPDLNVEDSSIGSHFLQMLRLLAHAPSQRSPPRHLDVLSYEDDFFRLELNSRNEIDDDEDEDEDDGDEEEEDEEENLTVNDEEDEEDDLRRRNRFPLTTTQSRTGRNRILDWAEILMGIEDNSIEFRMESDRYAGNPADYIDDAAGYEALLQNLAEGDGGGGGGRRGAPPAAKSAIEALETFEVSSSEGEMVMVCAVCKDGMVMGETGKKLPCGHCYHGDCIVPWLGTRNSCPVCRFQLETDDAEYEEERKKRTSTVSDSAAASSSSSTSRY

SEQ ID NO: 1189 - protein, 145 aa, Arabidopsis thaliana
  Clone ID: AT_F20D10.C1.p260.tg
MISMLFPRSPLCTAAIVFYTCVCIPLGRLKKNGGDADAHDDDGYNLVGVMFGDKEKEEEICCPICLVEFEAEDAVTHLPRCAHLFHINCIEPWLLRGHLTCPLCRSFVLAPTPPTQNVNNAHSSSTLYLSIFFFFCIFLHLLGYL

SEQ ID NO: 1190 - protein, 202 aa, Arabidopsis thaliana
  Clone ID: AT_T10I14.C1.p80.tg
MTETHRTTTTFLDLLRRQMSGHDLTRRKRTLKERLRFKCIGCCGPTWNLRLTNNTTLHSPTSRDDEIEELQIETGLVLESDHGSGTGMNLATALEAERYNRGESTEAEADMTPRRVSLMRLLEETAEKIVDDDGKETEILTASIGTLTGNDSVCCVCMGRKKGAAFIPCGHTFCRVCSRELWLNRGSCPLCNRPIIEILDIF

SEQ ID NO: 1191 - protein, 236 aa, Arabidopsis thaliana
  Clone ID: AT_F28M11.C1.p70.tg
MSYSDPNQNPIPETYAPSNSTESEKLKLYQAFIFSVPICFTFIVLFVLYVIYLRRNSTTNVDWSSLGMRGGTFVPTNNNLSTAELGLSKDIREMLPVVIYKESFIVKDSQCSVCLGDYQAEEKLQQMPSCGHTFHMECIDLWLTSHTTCPLCRLSLIPKPSLDLSHQSTEIVSSIENSNGGEASTQPDSQSATEAISHTDDVEEGNRDSQEVSKETEENDRNSVGTSDGCCTCRLG

SEQ ID NO: 1192 - protein, 225 aa, Arabidopsis thaliana
  Clone ID: AT_F28M11.C1.p80.tg
MSFIDPRTYIPSNSTESQILKFTFIVCVPICVILIVLLVLYIMRRNSNTNVDWSSLGGFVPTNNNLSTAELGLSKDIREMLPIVIYKESFTVNDTQCSVCLGDYQAEEKLQQMPSCGHTFHMECIDLWLTSHTTCPLCRLSLIPKPSVDLSHQSIEIVSSIENTNGGEASTQPDSQSATEAIIHIDDVEEGNRDSIEVVKESEENDRNSVGTSDGCCSCRLGEKA

SEQ ID NO: 1193 - protein, 691 aa, Arabidopsis thaliana
  Clone ID: AT_MBD2.C1.p14.tg
MQGERASLGYLSEALNFEHGSSSSNGVIDHWENIHSLGDNDLQDYMIANSESNTSLANSVYHEQQGLRRFSLGEASSSGTKDEASSHNEQRMETRCFDGRGNEIIDLDPVFAQPSGTNQPVQNVNLNAEYIEIHEDINPYRGRSGFIEANGPGTRVSQPGRSFEENGVGTGSSVEGRRASCKRKALEGSISQSSSGGYHDFQRGESSSWTPGSTVFRPGNGLNISGSLDNGPRGMVSGTVPNFPVSAPNFPVSAIAESSSRNICVRSNPSDHQETVNPSTFAAGTVVRRPVPPSQLNLSRHLPADQHSLDLRPGQSFVVSRNPNSTPVSIPPGSRTMLPPFRWTGSSLVGGTSNSTAPVERNLHLDETRSRSIPGNTLEIPMFAAPEVGNFARSQSSRNVTNGNLNSASSVSRTGSTTSVPPPPPPSSNLAWTSYQNSPHYQRRRTERSELARRSLLSSLAADATNQRSGDHPTLRSLAPPASSDGLVLQPGGDNSQMHNRAYSRAGPLFDRQGDSVVGIPHPLRALAAASRGRSRLMVSQMQNVLDVMRRDANNNNLRLEDVMLLNHSVLFDGATGHDRYRDMRLDVDNMSYEELLALEERIGDVCTGVNEETISNRLKQRKYKSNTKSPQDAEPCCVCQEEYTEGEDMGTLECGHEFHSQCIKEWLKQKNLCPICKTTGLNTAKKRRIA

SEQ ID NO: 1194 - protein, 273 aa, Arabidopsis thaliana
  Clone ID: AT_T22E16.C1.p190.tg
MSFVFRGSRGDLESGFSGGFLPERRAMRVHGARPVNSNSLAFLVTVLLLFMILNSHQMPPNFLLWLVLGVFLMATTLRMYATCQQLQAHAQAQAAAASGLFSHTELRLHVPPSIALATRGRLQGLRLQLALLDREFDDLDYETLRALDSDNVSTTSMSEEEINALPVHKYKVLDPENGCSLAKQASTSSSAEKMLDSANESKKGTEDELTCSVCLEQVTVGEIVRTLPCLHQFHAGCIDPWLRQQGTCPVCKFRAHSGWQEQDEIDDDASDMV

SEQ ID NO: 1195 - protein, 306 aa, Arabidopsis thaliana
  Clone ID: AT_T2O9.C1.p60.tg
MSSSTTTTTTVHGEPERRTYWCHECDMSLSLLSSSDSDSDSSPLLCPQCRVDFLERMDHDSSSSNLFDVTIGDFEEQDGENDDEDDEEDWCFVDPAVNSDDNFLLDSPYLHRLLRHLASDNSGSSSSSSSSSSSSLLKSSDIDSIPTIQISSSLLCSTDDSDPDSVLLCAVCKEDFIIGESARRLPCSHIYHSDCIVPWLSDHNSCPLCRFELPTTAKVGIGGSEAEMRIRLSDLATIAADGDDVEDDWLGIRNALRRLARRHEQMRLGVGEMERNLARTVSGLGIGMRRREEIEADRSNVTTTPL

SEQ ID NO: 1196 - protein, 348 aa, Arabidopsis thaliana
  Clone ID: AT_F14F8.C1.p200.tg
MSSAKLFGCSINVNVEAEEEEGGDGGSSTNVEVSRSGNQPDCEAMSFSNQMEIGVRNTYYQFLESNSDSGSDSMYAEPEFIDFFDRESYEVDTVREVCVSSNQRVSTPGYFNIWDQDVDLGLGIGLGSRSGSGQLPGDSGGVGVEVGRGVTPVEYNLFGEEAMVVDEVLEWENFNNAIHLVQEPAYASMEGEEEEEEDEVVMEFAASIYSDAWEILLYDNMTNSAPMDLDVEVWLDSVDGYAPMDYNAIIGQMFDNETGIKGTPPASKSVVDGLPDVELTIEELSSVSIVCAICKDEVVFKEKVKRLPCKHYYHGECIIPWLGIRNTCPVCRHELPTDDLEYERKRRA

SEQ ID NO: 1197 - protein, 375 aa, Arabidopsis thaliana
  Clone ID: AT_MWF20.C1.p13.tg
MDLSNRRNPLRDLSFPPPPPPPIFHRASSTGTSFPILAVAVIGILATAFLLVSYYVFVIKCCLNWHRIDILGRFSLSRRRRNDQDPLMVYSPELRSRGLDESVIRAIPIFKFKKRYDQNDGVFTGEGEEEEEKRSQECSVCLSEFQDEEKLRIIPNCSHLFHIDCIDVWLQNNANCPLCRTRVSCDTSFPPDRVSAPSTSPENLVMLRGENEYVVIELGSSIGSDRDSPRHGRLLTGQERSNSGYLLNENTQNSISPSPKKLDRGGLPRKFRKLHKMTSMGDECIDIRRGKDEQFGSIQPIRRSISMDSSADRQLYLAVQEAIRKNREVLVVGDGGGCSSSSGNVSNSKVKRSFFSFGSSRRSRSSSKLPLYFEP

SEQ ID NO: 1198 - protein, 189 aa, Arabidopsis thaliana
  Clone ID: AT_F16G20.C1.p150.tg
MGCCCCLPSIPESSRTIDEHLPLSRATPSSLSNAYSSPLSPPIPLAITNINLQTSPPKLPRTQGNSSEASPGLTQVVPEKKTWHVDDLTDFELKKQYREAIDECPICLEEYEIDNPKLLTKCGHDFHLACILAWMERSEACPVCDKVCVRLKSAIFTIHFELLESLESVLTIESTFWVFFSQELVLTES

SEQ ID NO: 1199 - protein, 274 aa, Arabidopsis thaliana
  Clone ID: AT_F9G14.C1.p60.tg
MASLSALSPSHLTNLTHSILSISHHHRRRLGAVLSSPTLFSLTLRHLLSLSLPDKTHLIANHLLSLLHPLLIHRKHHSSYAVTMKLRDLDAVVLLLFLCETHQLHPDVLEASADNWREILGNTYSNNMLSNNSGLWTCDAGILMPYIETLVRCKRFVDIMGGYNHLRRRDQKEGYQVPAARAAVVALRAVEVFNVAASNAGEVECVICKEEMSEGRDVCEMPCQHFFHWKCILPWLSKKNTCPFCRFQLPTDDVFSEIQRLWEILVKSSELHVA

SEQ ID NO: 1200 - protein, 199 aa, Arabidopsis thaliana
  Clone ID: AT_MOP10.C1.p7.tg
MQKQNNRRVFFYPVTFSPRFHSNSASHFSITLATFRRDIYRPITGKERLFGQTSLGRPLQLKFEISSEFLAASDVETCLRHVSLVLADVEPRIREILVLYGIQLIGESRGRAFELKAEAEDVEYHLMEESKGWTTCIPAKSITPVNECTICLEELCHDEESIETHDCCHVFHKLCLWRWIRTKSSCPLCRHPIYSRPKF

SEQ ID NO: 1201 - protein, 195 aa, Arabidopsis thaliana
  Clone ID: AT_F14D16.C1.p27.tg
MMCMKCMIIQPVGASCSNISCSSSMGKYYCKICKLFDDDREIYHCPYCNLCRLGKGLSIDYFHCMKCNACMSRLIVEHVCREKCLEDNCPICHEYIFTSNSPVKALPCGHVMHSTCFQEYTCSHYTCPICSKSLGDMQVYFRMLDALLAEQKMPDEYLNQTQVILCNDCGRKGNAPYHWLYHKCSSCASYNTRLF

SEQ ID NO: 1202 - protein, 675 aa, Arabidopsis thaliana
  Clone ID: AT_T21L14.C1.p11.tg
MEEISTDPVVPAVKPDPRTSSVGEGANRHENDDGGSGGSEIGAPDLDKDLLCPICMQIIKDAFLTACGHSFCYMCIITHLRNKSDCPCCSQHLTNNQLYPNFLLDKLLKKTSARHVSKTASPLDQFREALQRGCDVSIKEVDNLLTLLAERKRKMEQEEAERNMQILLDFLHCLRKQKVDELNEVQTDLQYIKEDINAVERHRIDLYRARDRYSVKLRMLGDDPSTRNAWPHEKNQIGFNSNSLSIRGGNFVGNYQNKKVEGKAQGSSHGLPKKDALSGSDSQSLNQSTVSMARKKRIHAQFNDLQECYLQKRRQLADQPNSKQENDKSVVRREGYSNGLADFQSVLTTFTRYSRLRVIAEIRHGDIFHSANIVSSIEFDRDDELFATAGVSRCIKVFDFSSVVNEPADMQCPIVEMSTRSKLSCLSWNKHEKNHIASSDYEGIVTVWDVTTRQSLMEYEEHEKRAWSVDFSRTEPSMLVSGSDDCKVKVWCTRQEASVINIDMKANICCVKYNPGSSNYIAVGSADHHIHYYDLRNISQPLHVFSGHKKAVSYVKFLSNNELASASTDSTLRLWDVKDNLPVRTFRGHTNEKNFVGLTVNSEYLACGSETNEVYVYHKEITRPVTSHRFGSPDMDDAEEEAGSYFISAVCWKSDSPTMLTANSQGTIKVLVLAA

SEQ ID NO: 1203 - protein, 226 aa, Arabidopsis thaliana
  Clone ID: AT_F27J15.C1.p35.tg
MAANELASSSVQAFQEQSLGGFVSRKLLLHNPFDHNTQRAFAVAPSPLITHENNLSGNVLMLLSVLICGIICCLGLHYIIRCAFRRTSSFMISEPIAGLSTPCGSSNKGINKKALRMFPVVSYSPEMNLPGLGEECVICLSDFVSGEQIRMLPKCHHGFHVRCIDKWLQQHLTCPKCRHCLVETCQKILGDFSQADQVAATPTASVIVRIAPLEPEGRVNILRESS

SEQ ID NO: 1204 - protein, 508 aa, Arabidopsis thaliana
  Clone ID: AT_F10C21.C1.p23.tg
MSYSNSNPENYSAATSSPELKLYQAFIFSVPICFTFIILFLFYLIYLRRSSSDLSSLGMRTTFIPGNSLSTIELGLSKELREMLPIVVFKESFTVMDSQCSVCLGDYQPNDKLQQIPVCKHTFHMDCIDLWLTSHTTCPLCRLALIPSRSRQSQDDPVPSLVSPDEEVSSQPESEPVNHRVVSTQPESEPVNHSGVSSQPESQPVVNHRGVSSQPESQPVNHINDGHEQQCDQDVEGFKEMEEDERNNIGTSSACCSCRTVHYCCVSRDNQIMYAYNNAGDHRNNESLAALCLEKTPPFHKWYFETRGKKTFGFLMKDDFVYFAIVDDVFKKSSVLDFLEKLRDELKEANKKNSRGSFSGSISFSNVQDQIVRRLIASLEFDHTCLPLSSPSIDGAEQSYASNSKAPLLGRSNKQDKKKGRDHAHSLRGIEIEEHRKSNDRGNVTECSNASSESATYVPRRGRSGGSQSIERKWRRQVKIVLAIDIAICLTLLGVWLAICHGIECTRS

SEQ ID NO: 1205 - protein, 159 aa, Arabidopsis thaliana
  Clone ID: AT_T20L15.C1.p150.tg
MHRLLLESHGGGNETSGSGGGDGYTRDMNFDANMVIILAALLCALILALGLNSILRCAMRCGFGLSSSAAAGTVADRAGLKKRELKKFPVAEYGSGEVKIAATECAICLGEFADGERVRVLPPCNHSFHMSCIDTWLVSHSSCPNCRHSLIEVHVAGSE

SEQ ID NO: 1206 - protein, 1579 aa, Arabidopsis thaliana
  Clone ID: AT_F8K7.C1.p29.tg
MEEPECPVCLQSYDGESTVPRVLACGHTACEECLTNLPKKFPDTIRCPACTVLVKFPPQGPSALPKNIDLLRLFPSISKLKLEPGRNFEKVVEFVTRSWSDDFYATWKDRILVHDAVSVEIRESESSDFDSSSRLCGSLRDDSKVSLLRVASFEHGDCDSVLKYSYVQRMMSCLWGMREEERDELDAIISVKQRGVSKVFGLWGDLKNGVLYLVGEKLIGFSLEEFDSLEDETLRLGIIGMQICEALLNLHKEGLITGCLSVSCVKFDEYENAYVDLIELIETGRNVYRIIAEETSSLRKPVGASEMGLIFVGLQQKGIFISSEVLFEFLKEQNMLIKNTSSKSFVSHNSDVWPVCFLLLKLRLGKRCTEEFIESVNCVDGKGCEEGIEDILVLYTGITEKLSLESELQGKFKSMVEILRQCCCLDPQARPVLTDLWKCIRELVMKPRFNSMSRLHKTIYGKRKQFCLAQSELCRLVEVESKEVDKELPGMKIGDEAEEGKVDIDFPGRVSEGKVRSKDMRGHQDSVTGLAVGGHQDKVMALIHIEGTEPVCVSGDGGGGIFVWSTTFPLEEQPLRKWYEPKDWRYTGIHALAYSEYGHVYTGSGDNTIKAWSLQDGSLLCTMSGHKSVVSTLVVVNGVLYSGSWDGTVRLWSLSDNSLLTVLGEETPGIIWRDDTLMKSMKIQNGAILSIAVNGKWLFTGGWDKTINVQGNLGRLKRNVQDFTSMNYWVVRDYYRLVESVNSLEPQIQSLSDEQLKAKTAEFRERLARGESLADMQAEAFAVVREAAKRTIGMRHFDVQIIGGGVLHDGSIAEMKTGEGKTLVSTLAAYLNALTGEGVHVVTVNDYLAQRDAEWMGRVHRFLGLSVGLIQRGMKAEERKFNYSCDITYTNNSELGFDYLRDNLTSNREQLVMRWPKPFHFAIVDEVDSVLIDEGRNPLLISGEANENAARYPVAAKVAELLVKDSHYKVELKENSVELTEEGISLAEMALETGDLWDENDPWARFVMNALKAKEFYKRDVQYIVRDGKALIINELTGRVEDKRRWSEGVHQAVEAKEGLEIQADSIVVAQITYQSLFKLYPKLSGMTGTAKTEEKEFLKMFQIPVIEVPTNLSNIRIDLPIQAFATARGKWEHVRREVEDMFGQGRPVLVGTTSVENSEYLSELLKEWGIPHNVLNARPKYAAREADFIAQAGRKYAITISTNMAGRGTDIILGGNPKMLAREIIEDSILSYLTSEVLADNIDDDELSQKVLSKIKVGPSSLALLARASLMAKYVGKSESKSWTRKKAKSVVTESLEKSQTMDPMELQNLINEQSEMYPLGPAIALAYLSVLKDCEAHCLHEGSEVKRLGGLHVIGTSLHESRRIDNQLRGRAGRQGDPGSTRFMISLQDEMFQKFNFDTEWAVRLISKITNDEDLPIEGDTIVKQLLALQINAEKYFFGIRKSLVEFDEVLEVQRKHVYDLRQLLLTGENESCSQHIFQYMQAVVDEIVVGNSNPQKHPRYWSLAKLLKEFMAISGNLLDEETMLQSLENLHEGSSIEMEDLSLPHLPKPPNAFRGIRRKNSSLRRWLDICSDNLTG

SEQ ID NO: 1207 - protein, 132 aa, Arabidopsis thaliana
  Clone ID: AT_T14L22.C1.p90.tg
MDTIDEILIGFSIIGLIVIVIANCCDNIDPPPTRLPPETIHQTVQPQQDIETGQSKALVFKDIKEEEGGREEEGGGKRFCPICLEEYEDDHQIRRLRNCGHVFHLLCIDSWLTQKQNCPSCRRSVDLMSLGL

SEQ ID NO: 1208 - protein, 495 aa, Arabidopsis thaliana
  Clone ID: AT_F4D11.C1.p200.tg
MGVSLLKQQHRITNQADTFSRFMERSPENNLSRNEHIIIDIPRNAAIASSSSSHDRISNVLEPLQHEEERPSTVSPMAAPQPATATASSSSSMRSNPRSVRRRRSPLNSGLWISIELFLTVGQIIAAIVVLSLSKHEHPRAPLFTWIVGYACGCVATLPLLYWRYYHSNQASEQDSGQHRPNLNVAAGPFAFSISRTSEADGRQTNTTSSRGSRYPGFISAARLKVIVEYFKMALDCFFAVWFVVGNVWIFGGHSSAAEAPNLYRLCLVFLTFSCIGYAMPFILCTTICCCLPCIISILGYREDLTQPRGATPESINALPTHKFKLKKSRSNGDDNGSSTSEGGVVAAGTDNERAISGEDAVCCICLAKYANNEELRELPCSHFFHKECVDKWLKINASCPLCKSEVGEKNSDLTSQGILTSLSSGENDNHQQQQQQQRSELRVENDLRDLLYVRENGKLAVWRCSYTKWGLLLIAKKVKKDTAKILFCKCFLPL

SEQ ID NO: 1209 - protein, 356 aa, Arabidopsis thaliana
  Clone ID: AT_T12J13.C1.p17.tg
MGSTGNPNPWGTTYDSYRDCSQGVCSVYCPQWCYVIFPPPPSFYLDDEDDSSSSDFSPLLIALIGILASAFILVSYYTLISKYCHRRRHNSSSTSAAAINRISSDYTWQGTNNNNNNGATNPNQTIGGGGGDGLDESLIKSITVYKYRKMDGFVESSDCSVCLSEFQENESLRLLPKCNHAFHVPCIDTWLKSHSNCPLCRAFIVTSSAVEIVDLTNQQIVTENNSISTGDDSVVVVNLDLENSRSRNETVNEGSTPKPPEMQDSRDGEERRSASLNSGGGVVSIADILREIEDDEESAGVGTSRWVEEGEGEKTPPPSGSAANQTNGISNFLVRSSMAAMKRSGYDRAKNYRLPK

SEQ ID NO: 1210 - protein, 382 aa, Arabidopsis thaliana
  Clone ID: AT_mzn1.C1.p240.tg
MNNRALDYPREKDGARVQMRLSYSPTAQFFLFLVQWTDCKLAGFLGLLRVLIYMTYADGKTTMSVYERKASIREFQAVILPSLSQLQRGVTDIDDSKQKEVCKMRYRKKDESEMSEIEIEREEECGICMEMNSKVVLPNCTHSLCIKCYRDWRGRSQSCPFCRDSLKRVDSGDLWMFLDQNDTVNLTAIARENQKRLFMYIEKLPLVVPDQVYASSPYDFHVKKTQSINAKELDLGIYDEASWHAKYKDSAYVYVGELPYDLTEGDLLAVFSQYGEVVDLNLVRDKGTGRSKRFAFVAYEDQRSTNLAVDNINGAKVLGRIIKVEHCGKYLKREEEDEETKQKKREAPWCLQSFSEKGVYSELPIPGGVTKIVEVPSERSSK

SEQ ID NO: 1211 - protein, 284 aa, Arabidopsis thaliana
  Clone ID: AT_T12H1.C1.p22.tg
MAAKEIAGGSGSIDDGSDFDPCPICLGQFLRESYLDTCFHKFCFNCIKQWIKVVSSKASKQRSSVTCPLCLLLGNALFCSQHLEELVYRNDHNLCRQRIYPSSTTTMDVLLSGIISTRIFQMGFLADVFDVARFWKLQKFLQPNRCLEAWLRRELQALMQEEDVDIVLHHLVGVMESFCKRIKQRRKQETRSAETTNQEQFKAVVSEAARPFVMARTDRFVDELELFLAAGLNLEAYDAIYKQGLEGNNRREIGAASEEREEVEEHNVRTRVTPYLFIFEEDSD

SEQ ID NO: 1212 - protein, 486 aa, Arabidopsis thaliana
  Clone ID: AT_K9L2.C1.p3.tg
MSVKNNSFSSAEIPDVADQPRDRFNPEATQDLQEKDETKEEKEGDEEVKHDEAEEDQEVVKPNDAEEDDDGDDAEEDEEEEVEAEEDEEAEEEEEEEEEEEEEEEDSKERSPSSISGDQSEFMEIDLGEIRKDVQCPICLGIIKKTRTVMECLHRFCRECIDKSMRLGNNECPACRKHCASRRSLRDDPKFDALIAALFTNIDSYEEEELAFHEDEMARNKQIQASIAQISQRQSEALVKRRSLGKEAAVLMRSPRIASGSRRRRNSRNMEQQNASEAHEDDDNDDNNNRGRDKDSSSDERGTEVRQKKRRKRSTSRSTQHPSSSGANKNNGNCADNDTEVYRDTKGISPGLVWNPEILAWGRGGTRSNTRHGNNTSGGSSKSVRNARVNKLVEYLRSSVDGSSVEFVALQIHLKTEEVELLVTRRRVGEDAAIENLPAVTPASAAASKDEMLSLEDNETLSRLKIDFISSHEQHLIIAYRKKQTE

SEQ ID NO: 1213 - protein, 161 aa, Arabidopsis thaliana
  Clone ID: AT_F15H11.C1.p24.tg
MSEIEELVCIEASVTRKSTSNTVEIRESRRNKVTLGSSDSPAFPTPHLFLKNIVSFDEQSMYNLLYPRLQDPNLCSILSFKIAFEAKRVPGPLYISYDVTLTPQIFEEPDMETCGLCLLEEQHLFDMPNCAHVFHGDCIDKWLSTSNNCPLCGVEIMDDDE

SEQ ID NO: 1214 - protein, 310 aa, Arabidopsis thaliana
  Clone ID: AT_F22D1.C1.p80.tg
MDASSSPSPSEESLKLELDDLQKQLNKKLRFEASVCSIHNLLRDHYSSSSPSLRKQFYIVVSRVATVLKTRYTATGFWVAGLSLFEEAERLVSDASEKKHLKSCVAQAKEQLSEVDNQPTESSQGYLFEGHLTVDREPPQPQWLVQQNLMSAFASIVGGESSNGPTENTIGETANLMQELINGLDMIIPDILDDGGPPRAPPASKEVVEKLPVIIFTEELLKKFGAEAECCICKENLVIGDKMQELPCKHTFHPPCLKPWLDEHNSCPICRHELPTDDQKYENWKEREKEAEEERKGAENAVRGGEYMYV

SEQ ID NO: 1215 - protein, 465 aa, Arabidopsis thaliana
  Clone ID: AT_F17I23.C1.p260.tg
MKWVFPEIKTTQNFLSPSSLPQEPPLSLRSSANFDLNSKISPSILLIIIILSIIFFISGLLHLLVRFLLTPSSRDREDYFDNVTALQGQLQQLFHLHDSGVDQSFIDTLPVFHYKSIIGLKNYPFDCAVCLCEFETEDKLRLLPKCSHAFHMDCIDTWLLSHSTCPLCRSSLLSDLSSHQDPRSSFLLVLESASDHSSREIGGDRDSAACVAANDDIDVSSAHLGLVGNNDLGSTRIDSGHGDQYLDGELGGSVGKVVPFSVKLGKFRNIDIGEGTSSNNNIGNSSSLDERRCFSMGSYEYIMDEETTLKVHVSTKKQSSKNRGLPGHRTAMSECGFDPTGRLKFSGSGSMRIVEEAAEKNVVERESFSVSKIWLRGKKEKHSKVQGKEDSSLVSSSSGRAFSFRLSNQRNHPDAMIESGCEEDNQKCENSESLETKTPSFARRTMLWLAGRQNKVVHSSSSTNV

SEQ ID NO: 1216 - protein, 345 aa, Arabidopsis thaliana
  Clone ID: AT_F23J3.C1.p150.tg
MNIFTRYHLPRVVSGVILPLFLFHLLPYVTCQQESVPTNSIRQTNLSADSIIAIVVLAIFISLGMVSCCLHCIFYREEIGAAGQDVLHSRARRGLEKEVIESFPTFLYSEVKGLKIGKGGVECAICLSEFEDQETLRWMPPCSHTFHANCIDVWLSSWSTCPVCRANLSLKPGESYPYLNMDVETGGVQKLPNERSLTGNSVTTRSRSTGLLSSWRMAEIFVPRSHSTGHSLVQQLGENLDRFTLQLPEEVQRQLVSLNLIRRSHIVLPQAVSSRQGYRSGSVGSERGGFSQGRQTHRRALSMSFSFSFQTASVRSIHDMNDQAQAKDKYFGERSFERLMPEEKV

SEQ ID NO: 1217 - protein, 357 aa, Arabidopsis thaliana
  Clone ID: AT_F16J13.C1.p220.tg
MNDPIPKAVVSVQVQAERVSRSPSQGNTNSIFLIVNTIKDEILINPGTGHRTATSTPLSYKSLPINYTLPSCSHHHIQSLLHDRLHRDDHWLCDHLVPKISSAISSGFVDLTVSVAVTYKYVRVDEAALKISRMVLQGFMSVEETKSLNAESCSICLQSLVSSSKTAPTRMSCSHVFHNGCLVEWLNRKNTCPMFHMQLIDSSMFSSTDYTAYIVEHCKRHDFSSSGSTHVRSRYINICRSTHGHIRKLLHNQFLSTISNPWRSLCDFLSPKISTEFINLGFGRNGFTLTMDAKVTYRTVSVTSNDEKSLRTILVGKIKAEELKSLKIETERCSICLESLVSGPKPIGLTRMPCFIY

SEQ ID NO: 1218 - protein, 404 aa, Arabidopsis thaliana
  Clone ID: AT_F4I1.C1.p22.tg
MDLDLNQEPSSDSESPGGLMTALSPMLEELESAQERIQERIRQLEVIVSRIREREITTTTTPALVSPNEHRDSTAGVIHERSRERLVENGENKTYLIAKALNMEKTSSVPGGFFDCNICLEKAEDPILTCCGHLFCWGCFYQLPLIYLNIKECPVCDGEVTDAEVIPIYGNGDDCDGTKPKLEDCGISLPPRPNAKRVESVRQKIINRGNPFFPGHENEAIEHIRRTIDSIGLQALAQGDEFGLTNIINNGGDNGGQQQQQQHHHHHHPPFGPLRLLPPYATFPGLLVDTSDIPAPFDDDAFDVDSFVDTTSLRRNRRRPSPAVRASYQRNRSNNASQTISFRLGSSASSAPREFAVPSSSIMTRSQTVNPTEVVTSSTSASSSRRRTEDVNNGPRTRSRRRLR

SEQ ID NO: 1219 - protein, 208 aa, Arabidopsis thaliana
  Clone ID: AT_MNJ8.C1.p20.tg
MDTYSNWESVEITTTAMILPQDQGFRNTVFVNLHDVVNELAEDQNGVVICLGTFAAPLMTKIELKPSCLSSHHIYQDLDKFITHTEFCRLLSERIVLDCAHIPQPFSVSFYVRVTRDVMLPSIVVRSRDMFQRLLEEQTMELTNLGDEEETTCSICMEDFSESHDDNIILLPDCFHLFHQSCIFKWLKRQRSCPLCRRVPYEEDLETE

SEQ ID NO: 1220 - protein, 180 aa, Arabidopsis thaliana
  Clone ID: AT_F4I1.C1.p14.tg
MSSSSTQNQLEMRDYTCPECNIGLRVLSLPSASPPYCPLCNVASYFTSSTPFEVGPNPFEDDEESQFLDPMESLPTIKISSSMLSSASSDDSALPCAICREDFVVGESARRLPCNHLYHNDCIIPWLTSHNSCPLCRVELPVASSEDDSGLDMWFDALNLEDDLEEEAGVTLDLEQSLDG

SEQ ID NO: 1221 - protein, 368 aa, Arabidopsis thaliana
  Clone ID: AT_F2H15.C1.p16.tg
MSSTTIGEHIRLRRARNQTIRHLHAADDDPPLSHVVLPISQPNRFCNSAMSSFFPLPTSSSNESTRKKPYQTSSFRGMGCYAAAAAAAQEVSVPSVIRYSADLDARIRKDKKKKKHKHKKKKKKNKGSYEDGSIRILSEEARDVIDVWCRPGLGFSTDAVIGRSVDPPRGRNIPSSRRKIDVDNNNYNHTLGSSVLPIRFLNQETHSHDIFNSDSTFVTSSRAEPTMLSSRCRGHLPRSYPDDLTEMRMLQNGFVMGRITDSRDNYHELRLDVDSMSYEQLLELGDRIGYVNTGLKESEIHRCLGKIKPSVSHTLVDRKCSICQDEYEREDEVGELNCGHSFHVHCVKQWLSRKNACPVCKKAAYGKP

SEQ ID NO: 1222 - protein, 378 aa, Arabidopsis thaliana
  Clone ID: AT_T16G12.C1.p120.tg
MGISLSKRRRDNNNNHHHPHHNPPYYYSDPPPQQPPPQNGYSYSHNYPVSTPQLSLPPPPAQPPSSSQPPPSQISYRPYGQNYHQNQYYPQQAPPYFTGYHHNGFNPMMRPVYFGPTPVAVMEPPAPYVEHQTAKKVKNDVNVNKATVRLVADDLNPGHYLVSFVFDALFDGSFTIIFFGEEESKCTIVPHLPEAFPPIKVPFQKGAGQKFLQAPGTGIDLGFFSLDDLSKPSPEEVYPLVISAETVISPSSVSEEPLVHKQITQAVLEKTNDGSFKVKVMKQILWIEGERYELQELYGIDNSITQGTAASGLEDTGGKECVICLTEPKDTAVMPCRHLCLCSDCAEELRFQTNKCPICRQPIHELVKIKVESSDEQH

SEQ ID NO: 1223 - protein, 407 aa, Arabidopsis thaliana
  Clone ID: AT_MJJ3.C1.p23.tg
MSSSSLILLFSTLSLFLNVSLADNHTAVVITTSDTPPPLPPPSPPPRHNFTSSLMPGIAVVIAVLTAFFSLTFLLLLYVKHCKRRNGSVYVNHPQRFAITRYGGGYYNGGGVVGGRKNSGIDRSVIESLPVFRFGALSGHKDGLECAVCLARFEPTEVLRLLPKCKHAFHVECVDTWLDAHSTCPLCRYRVDPEDILLIGDCNSWFELQFSKDESNSVNNNPPGLTRFIPVSRISGRHSSAGERASRLNEIRTSSSYKSNPMSFRRSLDSSLKVNDAGEEKSESVAVNCLDRLQRKDGLLLIPNRESFEGRFEHRIIISGGNRDDQRWSEVRPSDLLYLRSEMILSDCRKLAAAEGGRDVINGRSVSELTGIERRRRWGGEPRQRQATAVISRWLAWSHRASASSIV

SEQ ID NO: 1224 - protein, 328 aa, Arabidopsis thaliana
  Clone ID: AT_MPN9.C1.p19.tg
MSSGVNSTGSAAAAPEVDKMFFCYQCNQTVTISISSSADPFCPICNQGFLEEYEDPNPNQSLNFNPNSSDSFFPMADPFSTLLPLIFGSSAAAPSGMDFMSLFGPSMQPQARSTQQNPQSDAFDPFTFLQNHLQTLRSSGTHFEFVIENHPSDPGNRMPGNFGDYFFGPGLEQLIQQLAENDPNRYGTPPASKSAIDALPTVKVTKDMLKSEMNQCAVCMDEFEDGSDVKQMPCKHVFHQDCLLPWLELHNSCPVCRFELPTDDPDYENRSQGSQGSGDGQGSVEGQQTPRFSIQLPWPFRRQDGSGSGSGAPGTGGGNLETRGEDLD

SEQ ID NO: 1225 - protein, 176 aa, Arabidopsis thaliana
  Clone ID: AT_F17I23.C1.p290.tg
MSITIPYDGSISREPSPSPPPPKANTKNLPTKILSNFLIGLIMIPVAITAFIFILTSLGFTFFFAFYWFLQRNYRHRLRRHRRHEYSDGLSPRCVKRLPQFKYCEPSSEYGGDDCVVCIDGFRQGQWCRKLPRCGHVFHRKCVDLWLIKVSTCPICRDRVYRFEEGRRWRPQGEIF

SEQ ID NO: 1226 - protein, 272 aa, Arabidopsis thaliana
  Clone ID: AT_T14C9.C1.p100.tg
MGDVYFNHFAQQLQMSDQEKGEMSRHSHPHSINEESESSTLERVAAESLTNKVLDRGLMEYGCPHYRRRCCIRAPCCNEIFGCHHCHYEAKQNNINVDQKQRHDIPRHQVEQVICLLCGTEQEVGQICIHCGVCMGKYFCKVCKLYDDDNGHPCVEGAMHHDCPICFEFLFESRNDVTVLPCGHTIHQKCLEEMRDHYQYACPLCSKSVCDMSKVWEKFDMEIAATPMPEPYQNRMVQILCNDCGKKAEVQYHVVAQKCPNCKSYNTRQTRG

SEQ ID NO: 1227 - protein, 245 aa, Arabidopsis thaliana
  Clone ID: AT_F13I12.C1.p210.tg
MAKVSFKDSLKALEADIQHANTVALDYPREKDGARVQMRLSYTPAAQFLLFLVQWTDCHLAGTLGLLRVLIYMTYADGKTTMSVYERKTSIKDFYAVIFPSLLQLERGITDLDDRKQKEVCKIRYRNKDETEKVKLSEIDIEREEECGICMEMNNMVVLPNCTHSLCIKCYRDWHGRSESCPFCRDSLKRVNSGDLWMLMEKSDTVNMYTIERENKKRLFVYIEKLPLVVPDQVFASSPYDCHVK

SEQ ID NO: 1228 - protein, 666 aa, Arabidopsis thaliana
  Clone ID: AT_F28A23.C1.p200.tg
MQGPRSTGDSSTGINYADGEPICSTNSETTSNNILNPVDVQFPNNTTGSGRPTYASSSSHVVQNHNWWSFGESSSRLGPSDHLNSNGSKTDRQLLSDGYGFEEGQSGMLLPGESFLRGSSSSHMLSHVNLGKDMDIGSGLQTSGVVIRHNNCETSLGSSSQTAEERSSGPGSSLGGLGSSCKRKALEGAPSHSFPGESHGCFFQTENGAWNEGLAQYDASSSLSLSMPSQNSPNVNNQSGLPEPRFGLGGGRAVTASAFPSTRSTETISRPGRRLNPGQPPESVAFSFTQSGSSVRQQQQLPATSPFVDPLDARAIPVTGSSSSGDGQPSMIHLPALTRNIHQFAWSASSSSRANSMPEEGLSPWDAPRINSEQPVFTTPANETRNPVQDQFCWSFTRGNPSTSGDSPFVPRAGSSSGIHGLQPNPTWVTPHNQSRISEVAPWSLFPSIESESATHGASLPLLPTGPSVSSNEAAAPSGSSSRSHRSRQRRSGLLLERQNDHLHLRHLGRSLAADNDGRNRLISEIRQVLSAMRRGENLRFEDYMVFDPLIYQGMAEMHDRHRDMRLDVDNMSYEELLALGERIGDVSTGLSEEVILKVMKQHKHTSSAAGSHQDMEPCCVCQEEYAEGDDLGTLGCGHEFHTACVKQWLMLKNLCPICKTVALST

SEQ ID NO: 1229 - protein, 612 aa, Arabidopsis thaliana
  Clone ID: AT_F13M7.C1.p19.tg
MENSDIDMVIIPDTPDRSVHHREVKRRPHSPVAPLRYQREEYRNHHLHGRARPVPEIGDNRESSDTRTESGHRPRASVGNALFRRTVVEKDKGKSISTDPCAPRVEKNPVLNLNQRNGHVHVAASRYQPSEDIRELRTSNGCSPLRGDHNSFVLPGNSNKGKEKADSGSVPHRETIDLSSGKPQNRGTKRLVRHGCISPHEIAARARQAADTNSYDTLSVEQELASETASSIGIREIVPESDIHGRARGKRPEISSSRVSILCINANRVASRDGLEGLDVRETGVVERESRQQRRRKNGFTTSTASNEPEVTVNRSSGEPSSSRPPRIQNHLRHWHGTQVLEIEDSSPEVRVFRGPRRVENDVSDVNIRQIEADEILARELQEQLYREESLIRHEQIDEIIARSMEQEENSLRASSSRASTRITRSSNTIAANPRGRSRLEARLQQHSSRRRFNPPQARAPVRAPARGRGYRLGGASASLRTALNFSFPIDMGLDSRMDILEELENAIGHSITSSNLLHMDRDFTEDDYELLLALDENNHRHGGASANRINNLPESTVQTDNFQETCVICLETPKIGDTIRHLPCLHKFHKDCIDPWLGRSKSCPVCKSSVT

SEQ ID NO: 1230 - protein, 586 aa, Arabidopsis thaliana
  Clone ID: AT_F6F3.C1.p27.tg
MSDSGEPKPSQQEEPLPQPAAQETQSQQVCTFFKKPTKSKNIRKRTIDADEEDGDSKSESSILQNLKKVAKPDSKLYFSSGPSKSSTTTSGAPERSVFHYDSSKEIQVQNDSGATATLETETDFNQDARAIRERVLKKADEALKGNKKKASDEKLYKGIHGYTDHKAGFRREQTISSEKAGGSHGPLRASAHIRVSARFDYQPDICKDYKETGYCGYGDSCKFLHDRGDYKPGWQIEKEWEEAEKVRKRNKAMGVEDEDDEADKDSDEDENALPFACFICREPFVDPVVTKCKHYFCEHCALKHHTKNKKCFVCNQPTMGIFNAAHEIKKRMAEERSKAEQGLRRLWPVGEVVPKSKAVTRVWWDINRCPVPADVDVRRVGPCIKRALEKLGYSGPLTITAVGILTDVPHDFLRQVHSSGIALHHVPTVSETALSGIGWAVVKWTWYNQPPANLMLISYEHIYLTTLDMLGRIGYNTVRSILPDDPQQAASSASPSTGSFLWESLLASLPAADDMDSGAPQEDKCGEMGEPALLCEQCRFTVQGFENFSTHLKSEEHAHESQYYRNEDDETDGDDYVRDSEDDEEE

SEQ ID NO: 1231 - protein, 381 aa, Arabidopsis thaliana
  Clone ID: AT_F19P19.C1.p21.tg
MDLTDRRNPFNNLVFPPPPPPPSTTFTSPIFPRTSSSGTNFPILAIAVIGILATAFLLVSYYIFVIKCCLNWHQIDIFRRRRRSSDQNPLMIYSPHEVNRGLDESAIRAIPVFKFKKRDVVAGEEDQSKNSQECSVCLNEFQEDEKLRIIPNCCHVFHIDCIDIWLQGNANCPLCRTSVSCEASFTLDLISAPSSPRENSPHSRNRNLEPGLVLGGDDDFVVIELGASNGNNRESVRNIDFLTEQERVTSNEVSTGNSPKSVSPLPIKFGNRGMYKKERKFHKVTSMGDECIDTRGKDGHFGEIQPIRRSISMDSSVDRQLYLAVQEEISRRNRQIPVAGDGEDSSSSGGGNSRVMKRCFFSFGSSRTSKSSSILPVYLEP

SEQ ID NO: 1232 - protein, 163 aa, Arabidopsis thaliana
  Clone ID: AT_MJC20.C1.p31.tg
MHYTRISPALVPSLSPTAAAESSGGGTMIATVFMALLLPCVGMCIVFLIYLFLLWCSTRRRIERLRFAEPVKPVTGKGLSVLELEKIPKLTGRELAVIARSTECAVCLEDIESGQSTRLVPGCNHGFHQLCADTWLSNHTVCPVCRAELAPNLPQCNENQSPC

SEQ ID NO: 1233 - protein, 493 aa, Arabidopsis thaliana
  Clone ID: AT_T7H20.C1.p30.tg
MESQGPSNGHPMDISSNSIPSSACNLCGRVVQSASDDLEIFSLCVDCKFLLLEDFGTPAPPLARRQTIRRRRMRRRRRTTRHDSSESVGVGDLSSQQFTHLISIARQSLSTVQASEDLRDDLRTSSHTTPSGSTRWRLFSESESDDFDNFGETESNASFSLYRFPHADNDTISFSAYGGESDASTDRHADIFVQPDDRSDIDFDTDIDPMRAGLNQWNSDEEDREWEEGAGPSGVAGTRYRNYLASPSESYSSMTRFDSPELERSFRQRIIERRHSLSRNIFTGLEDLDFSPYAANVGDYLDERGFDELLEQLAESDNSRRGAPPASVSCVRNLPRVIIAEEHVMKGLVCAICKELFSLRNETTQLPCLHLYHAHCIVPWLSARNSCPLCRYELPTDDKDYEEGKRNVLDVSEDSSSSDDGTESGEEEYVERGESESGVSRVSRGRWLFLAAAPVVSLVGVVLAMWLSSPHRRGIAISHSQRENRTRRWLPFF

SEQ ID NO: 1234 - protein, 198 aa, Arabidopsis thaliana
  Clone ID: AT_T28I24.C1.p21.tg
MDTESFKLDVHVQAWSQGRSLGFLSTVVISLHREVEEFLIKEKDDSVTSLGSYPDSSCHDPLISLKLPCFKPNDVFHRLQSQLHDHVMSEQISSKIVEAQRQRSQSFYSQQQPLFMIVSVKLTQKVYSVVPCISSPSATDVDQEEESETCAICLENMSRSENYCQMPYCKHCYHEGCVTKWVIGHNNSCPLCRKPVDK

SEQ ID NO: 1235 - protein, 292 aa, Arabidopsis thaliana
  Clone ID: AT_T17F15.C1.p140.tg
MFCGRVVVLSVLSLLLYPFLWAWTVIGTQWFTKSKTCLPEEGQKWGFLIWLMFSYCGLLCIAFICVGKWLTRRQVHLLRAQQGIPISEFGILVDMIRVPDWAFEAAGQEMRGISQDAATYHPGLYLTPAQASLVIYSQQAKQRTEAVEALIQELPKFRLKAVPDDCGECLICLEEFHIGHEVRGLPCAHNFHVECIDQWLRLNVKCPRCRCSVFPDLDLSALSNLQSSGTEQHSQVNTETSEARYIRSQPQSESYFLRVQSLIHPVHTDTALETAENGGVPPVLTDLSPSRR

SEQ ID NO: 1236 - protein, 316 aa, Arabidopsis thaliana
  Clone ID: AT_F15O4.C1.p19.tg
MNYSWITIMSLLVICKLASAKVVLIGKNTILSFDDVEATFTPIVRNSGECGILYVAEPLEACSDITNMAEKRSKYRSSYVLIVLGGCSFEEKVRKAQKAGYKAAIVYNDGYDELLVPRNSSGVDIHGLLVTRASGEVLKGYADQDEMKLWLIPGFGISSWSIMGITFISLLAMSAILATCFVVRRHQIRQSVRDLPHGGQGLSCMPRDLLQSMPTEVYSGVLEESSTSVTCAICIDDYCVGEKLRILPCKHKYHAVCIDSWLGRCRSFCPVCKQNPRTGNDVPPASETTPLISPSPNSITSLQSFYDLPIVVRVYL

SEQ ID NO: 1237 - protein, 132 aa, Arabidopsis thaliana
  Clone ID: AT_F23J3.C1.p130.tg
MSYFKRNEGTIVFAFASIGFIAFYIINYYIRRCRNRAAAAGDIEEARMSPRRPPRGLDAEAIKSFPSFVYTEARGIEPGIGELECVVCLNEFKDDETLRLVPPCVHVFHADCVDIWLSHSSTCPICRAKVVP

SEQ ID NO: 1238 - protein, 479 aa, Arabidopsis thaliana
  Clone ID: AT_T19L18.C1.p19.tg
MNSASVSGESSLSDMIQTVHFSSGNPRIGETRGVMHLISDNAVSSSSSSSSSNLPIGRNPLVCVLGVPNHMTYADFCQFCGSFIQHILDMRTVRNDDIENRYSILIRFDSQESTDTFFQHFRGKQFNSLDEDVCRLLFALDVQFTGYSGSIDHTQPSAAGPIEQPTCPVCLERLDQDTGGILTTMCNHSFHCSCISNWPDSSCPVCRYCQQQPENSVCCVCQTTENLWMCVICGVVGCGRYKEGHARRHWEETEHCYSLELETQRVWDYAGDNYVHRLIQSKTDGKLVELNSHGSLSKDGCGSCEYSDSGMTDALLNSKVDMIISEYNELLQAQLENQKQYFEKLLQNVKEETEQKISEAASKAISQRLQKLQTRFDRCVKEKQFLEDLNENLVKNKDVWSTKITEMKEREKKAVRAKDEKIQGLEEQLGNLMAQMDGESEVSETKEVQDATVSTTNTSSSGAGNVIHANKKKSNRRKG

SEQ ID NO: 1239 - protein, 289 aa, Arabidopsis thaliana
  Clone ID: AT_T6K21.C1.p100.tg
MSTIIPSPLAPQPPQQHYVTPPLTVILTVILLVFFFIGFFTLYFCKCFLDTMVQAWRLHHGGDTVSDNPLQQPEAPPVNPGLELRIINSFPTFPYSSVKDLREEKYGLECAICLLEFDGDHVLRLLTTCYHVFHQECIDLWFESHRTCPVCRRDLDPPPPPENTKPTVDEMIIDVIQETSDDEEDDHHRQQTTTQIDTWPSSGQTSSIKKEQNLPEKFSRSHSTGHSIVRNKPEEEDKYTLRLPEHVKIKVTRGHSQTESCVTFAELIRNRGYDHRRFGEVSGQTQSKN

SEQ ID NO: 1240 - protein, 230 aa, Arabidopsis thaliana
  Clone ID: AT_K19P17.C1.p8.tg
MEATPVFNYHIDVNPERKKIGTIQVYVSFVGSANMSPILTRSNFSCSLPANELTDDEDSPHKQRLYYFLTDSAVDSQDAYTLILKLTQLARDLTSNSFEYCPRYALSVWLTLDVAPLNEYERNSEYRPASNLRVGALSRRIYKRKQKTSSIANKSTRYMRKRETYSSGEYKCAICFQEFKTGREVATLLCGHEFDNKCIMEWFKVRYNCPLCRFELPREDDHIPQRTTDL

SEQ ID NO: 1241 - protein, 161 aa, Arabidopsis thaliana
  Clone ID: AT_MYC6.C1.p13.tg
MIESMPSLDVSSIVVTGAILIVLFTLYIISDSCNKYIQPPTELALETHQNSHPSLPPLPVPLPLPLPQPQPQPQQDNETGHLMPLHSQLEFKIGYRASIEEMEFKDIEKEGFDEIGCSICLEELEDGHEIIRIKKCRHVFHRSCIDSWLKQNRSCPNCRCF

SEQ ID NO: 1242 - protein, 145 aa, Arabidopsis thaliana
  Clone ID: AT_T22E19.C1.p19.tg
MPSVQIGPPPASQSAIEAVRTVIITDEDLVKEKVCAICKEEFEVGEEGKELKCLHLYHSSCIVSWLNIHNTCPICRFEVNLGVSESNVDEGGSYNIDNDRSNRFRTRVCSLWPLRMMIDWVHNLIGKIPPPDIAFMAFLLCLYGF

SEQ ID NO: 1243 - protein, 125 aa, Arabidopsis thaliana
  Clone ID: AT_T7N9.C1.p7.tg
MTSPPSPFAISPAAAVAADLPNDPDLTIVGFLKFRQKTKPLKKEILKSLPKLTFSQECGVRLCNSRCVICLEDYMVSDIVRVLPHCGHQFHAFCIDKWFQLCSTCPSCRGIPVIYHPLLNVLIQK

SEQ ID NO: 1244 - protein, 67 aa, Arabidopsis thaliana
  Clone ID: AT_F14P3.C1.p6.tg
MADSENMYILSEDEDVCPTCLEEYTSENPKIVTKCSHHFHLSCIYEWMERSENCPVCGKVMEFNETP

SEQ ID NO: 1245 - protein, 310 aa, Arabidopsis thaliana
  Clone ID: AT_T18A20.C1.p16.tg
MDEESVSNGSLFSKFEGEETMGKVLLFSIVSIFTGILFLLLLHLYARLFWWRVEQHFNLNLIQSDDPGSTVIGRNPRRRRFVFAQSQEDPLHNAGLDSKILQSIHVVVFKCTDFKDGLECAVCLSDLVDGDKARVLPRCNHGFHVDCIDMWFQSHSTCPLCRNTVGSVEDTTHGGSEGLPQNQNFESGHSTNQHNPSQDQSFVHEFSTEPLSFPTNVLVWGDQNQVRSAGLVVTEESPSGNFAASYNDHQQESSSTRSQEVTAVVVDIPDNSSENLSERIDEEEPKSPMFTRLRLLKNVLSREKTNNNNV

SEQ ID NO: 1246 - protein, 315 aa, Arabidopsis thaliana
  Clone ID: AT_MRP15.C1.p6.tg
MEDASETSYWCHMCSRSVIPLIQDEIIKCNFCQSGFVEEMDNNDDHQAADSLWTPILMEMMNNNHDQHSTNQEDSESILEDEDEDEDDGDDGDQNNDGEIDITHQLEEIRRIRTRHSTAIVNLLQGIRAGLLIESENNEDNPDNSELVVLINSFNQRIRVHQDSVDTTSVPSGSLGDYFIGPGFETLLQRLAENDLNNRYGTPPATKEAVEALAMVKIEDSLLQCSVCLDDFEIGMEAKEMPCKHKFHSDCLLPWLELHSSCPVCRYLLPTGDDDEPKTDAETSRNDDNNEDISNASMASNGSSPDSSSNNSSVN

SEQ ID NO: 1247 - protein, 683 aa, Arabidopsis thaliana
  Clone ID: AT_T9I22.C1.p12.tg
MLNGWRRAFCTSIPKETNQNDVDDDGLVGLRHKSTSRFGFFSTPSTPRSDSGTGTYSLRCRTSTATAVSTTSSLPGTPKLKCKTTTTGETTPRNRSLVSLLTPSSSSISPASFTLLKSKLRFKQSSSNKCGICLQSVKSGQGTAIFTAECSHTFHFPCVTSRAAANHNRLASCPVCGSSLLPEIRNYAKPESQIKPEIKNKSLRVYNDDEALISSPISPAGFHTILESDENEDCEEFTGFSVNTPSPLTAKLLTDRNVDVKLSPESAIVASGKGYETYSVVMKVKSPPFPTARGFARRVPVDLVAVLDVSGRNSGGKLEMLKQTMRIVLSNLREMDRLSIIAFSSSSKRLSPLRRMTANGRRSARRIVDIITVPGSVSGVGIDFSGEGMSVNDALKKAVKVLDDRRQKNPFTAVFVLTDRQAHQVAQLAHSRIPIHTIWLSHAIPEDAFARTINGYLSLSVQDLGLQLGIVSGLGQGEITSVYSLSGRPAWLGTGSIRLGDMYAEEERALLVEIKSPVNNSLTGSRSHKIMTVRSRYVDPTTQELRNPEDRALLIPTPLTVRSSSNPNISRLRNLHVSTRAVAESRRLIERNHYSGAHRLLTSARALLVQHGLSSSDACIRGLDAEIADLNSVKGRHVAASESLESLTPTSAWKAAERLAKVAMVRKHMNRVSDLHGFENARF

SEQ ID NO: 1248 - protein, 344 aa, Arabidopsis thaliana
  Clone ID: AT_M3E9.C1.p170.tg
MVNPVIGAEIKCPFCQSGFVEEMSREINGGSSSSLREVQDPEIDFGTDRALSLWGPILLGMMSNPRRRRRFRRTEFGVDNDEVNVSDDVDGNDSVDIDRHHHRRHRHRQQGREIDLDREFESILRRRRRSSATILQLLQGIRAGIASEYESSDRDLLNQSAVVQGSTSLNQNRNNTSLSAIGDYFVGSSLDHLLEHLADNDSIRHGSLPARKEVVDNLPTVKISESLQCSICLDDFDKGSEAKEMPCKHKFHIRCIVPWLELHSSCPVCRYELPPDDETKVNPVRPRTRTLEINVSNENVEDDARNSNVSERRFSFPWPFSGLFSSSSSSSASASGSSHLGENS

SEQ ID NO: 1249 - protein, 913 aa, Arabidopsis thaliana
  Clone ID: AT_K1G2.C1.p3.tg
MKVRRKLGGGCGGDVVVSWRTFFWFVILFVFSFVLFSTMFIFKGKFRPVVRSTISFSTAVTARAVFRESISSSPAVTIREAVKLPEQTLVFLKYPQSRRLFTKDDLICVFSGSSKLRKVYPTAVDRDKFGGQIVRCPETPRGYTISLAVSRWTTDDHLPAGPTHRYDWLVYDAVIDYDNSTVVFVKGLNLRPGRVADVSRYECVYGWDFAKHNRLIRSDVITAAQEIVRCRTPLAVLDGPKAARGPVKVSVRIKGGTGMLPSIAQPVRIINPPRKKPFQMCVCTMTRNAAAVLREWVMYHAGIGVQRWFIYDNNSDDDIIAEIENLERRGYNISRHFWPWIKTQEAGFSNCAIRAKSDCDWIAFIDVDEFFYIPSGETLTSVIRNYTTTDSIGEIRTPCHSFGPSGLRSRPRSGVTSGYTCRVVLPERHKSIIRPEAMNATLINVVHHFHLRDGFTFADMDKDIMVINHYKYQVWEVFKEKFYRRVATYVADWQNEENVGSRDRAPGLGTRPVEPSDWAERFCEVNDTGLRDQVFEKFKDKKTQRLVWEKAEEDDNIQRMVSETPLRVTNRSGDGSNGSKEVSIAREKNGENAEIFISPRFKSAAAMAGWDEEDLIIASFVVDDTPERSSSKRRRRSNLLFKSTPPSGSSRRNQRVKQSLVPLPVIDLDKVIRHEEEKSAEKKKKKREMETETKEEKKIDKDEKSLSDHVVLPCIDKLRDELSCAICLEICFEPSTTTCGHSFCKKCLRSAADKCGRKCPKCRQLIGNGRYCTVNTVLWNTIQLLFPKEVEAQRAASANLKGKETPSPRNPNQRLRSRNRETALFQERLQREDISRLLVSEERSERSERRRRSTSMRLDQNRDAALAMRLQRQEFASAFGATTAETSSSSVSTLSRARANLQAMASRAVRRQG

SEQ ID NO: 1250 - protein, 251 aa, Arabidopsis thaliana
  Clone ID: AT_F21J9.C1.p220.tg
MYYQLTKSSYRDSLKILEADIEHANGLAAEIPMGKSGVRLQMKLVCSNLAPFFIFLLQWMDFSCLLPRYFDFFHILIYKVRADGRWNRSRYGRKATIREFYGVILPSLERLHINFADLPDESLWYPNPKAITKKQYDIEGSRYMNSIDLEREDECGICLEPCTKMVLPNCCHAMCIKCYRNWNTKSESCPFCRGSIKRVNSEDLWVLTCDEDVVDPETVTKEDLLRFYLHINSLPKDYPEAAFLVYNEYLI

SEQ ID NO: 1251 - protein, 167 aa, Arabidopsis thaliana
  Clone ID: AT_T5C2.C1.p130.tg
MTFFIEDTSLIISHVLYKTALIITVLRWIFAWILRYRSRSSSSSSSQSSSSPSISSQTIKESLAVSAFRDAVERSPAAINDMCAVCLGDLEDEDEIRELRNCTHVFHRDCIDRWLDYECCGGDDDNHRTCPLCRTPLLPSFTDYSTVTQTSWAVERLLYLFGDDLLP

SEQ ID NO: 1252 - protein, 276 aa, Arabidopsis thaliana
  Clone ID: AT_F23N11.C1.p3.tg
MTLLVYKGAAKVSIVMIGQQAIMDSYLCLLHLTAGILVESLFNAFATAAFFKFVVFSIFEMRYLLSIWKATRPSTSGEGWETMRRELSFLYSRFYGILLGGILLMYEFHNYMRPILLLMYSFWIPQIVANVVRDSRKPLHPYYILGMTVTRLAIPLYVFGCPKNFMRVEPSKAWCVSLCAFMGFQAGVLLLQHYFGSRCFVPRKLLPEKYSYYRRLDHNVNRSRDCVICMTTIDLRHRINDCMVTPCEHIFHSGCLQRWMDIKMECPTCRRPLPPA

SEQ ID NO: 1253 - protein, 1495 aa, Arabidopsis thaliana
  Clone ID: AT_T13K14.C1.p230.tg
MSPFSETSVLLLPMVEKCINLLQTYGVSSITKLRQIHAFSIRHGVSISDAELGKHLIFYLVSLPSPPPMSYAHKVFSKIEKPINVFIWNTLIRGYAEIGNSISAFSLYREMRVSGLVEPDTHTYPFLIKAVTTMADVRLGETIHSVVIRSGFGSLIYVQNSLLHLYANCGDVASAYKVFDKMPEKDLVAWNSVINGFAENGKPEEALALYTEMNSKGIKPDGFTIVSLLSACAKIGALTLGKRVHVYMIKVGLTRNLHSSNVLLDLYARCGRVEEAKTLFDEMVDKNSVSWTSLIVGLAVNGFGKEAIELFKYMESTEGLLPCEITFVGILYACSHCGMVKEGFEYFRRMREEYKIEPRIEHFGCMVDLLARAGQVKKAYEYIKSMPMQPNVVIWRTLLGACTVHGDSDLAEFARIQILQLEPNHSGDYVLLSNMYASEQRWSDVQKIRKQMLRDGVKKVPGHSLVEVGNRVHEFLMGDKSHPQSDAIYAKLKEMTGRLRSEGYVPQISNVYVDVEEEEKENAVVYHSEKIAIAFMLISTPERSPITVVKNLRVCADCHLAIKLVSKVYNREIVVRDRSRSKMADTSHLERMGRELKCPICLSLYNSAVSLSCNHVFCNACIVKSMKMDATCPVCKIPYHRREIRGAPHMDSLVSIYKNMEDASGIKLFVSQNNPSPSDKEKQVRDASVEKASDKNRQGSRKGRASKRNEYGKTKEIDVDAPGPIVMKPSSQTKKRVQLLQNLSAESLTKPTESVETAEKPKDYTENTVIRLDEHPSLNKEGNLSPFFWLRDEDDGENSSQRTESDQLLGTTPVNVPSFSDLMDSDHESPSKEDEQQKPNPGDMFDSEMFEWTQRPCSPEILPSPVKAKVLGRDEIDLTQKKLPKVKVASSKCKNRKAGSARNTVARRSIGVSQEDNMESSAAATISEQQDSRGTSGTIIRNDVNTDENVKAKRATRSKAQSTRVQSDLNVSNEADGKQGTKRKRSSIKSSPAHPIAGPNELSLGTEIVGKGDQDQAHGPSDTHPEKRSPTEKPSLKKRGRKSNASSSLKDLSGKTQKKTSEKKLKLDSHMISSKATQPHGNGILTAGLNQGGDKQDSRNNRKSTVGKDDHTMQVIEKCSTINKSSSGGSAHLRRCNGSLTKKFTCAFCQCSEDTEASGEMTHYYRGEPVSADFNGGSKVIHVHKNCAEWAPNVYFNDLTIVNLDVELTRSRRISCSCCGLKGAALGCYNKSCKNSFHVTCAKLIPECRWDNVSVAYIVEALYSPLHSSFNTFSYQQVKFVMLCPLDASIKLPCEEANSKDRKCKRTPKEPLHSQPKQVSGKANIRELHIKQFHGFSKKLVLSCSGLTVEEKTVIAEFAELSGVTISKNWDSTVTHVIASINENGACKRTLKFMMAILEGKWILTIDWIKACMKNTKYVSEEPYEITMDVHGIREGPYLGRQRALKKKPKLFTGLKFYIMGDFELAYKGYLQDLIVAAGGTILRRRPVSSDDNEA

SEQ ID NO: 1254 - protein, 431 aa, Arabidopsis thaliana
  Clone ID: AT_T15G18.C1.p20.tg
MIRSSIVILSLLLISHLVSAKVLLIGNSTSLSFDDVEATFTPMIKRSDQGGVLYVAEPLDACSDLVNTVNVKNGTTVSPPYVLIIRGGCSFEDKIRNAQKAGYKAAIVYDYEDFGFLVSTTGEVLKEYAGRTDFEVWLMPSFETSAWSIMAISFISLLAMSAVLATCFFVRRHRVRRRRILALNGNDFHRMPKSMIIRMPTTIFNGICDEATTSILCCICLENYEKGDKLRILPCHHKFHVACVDLWLGQRKSFCPVCKRDARSISTDKPPSEHTPFLSRTPSMTPTSSFLLSSSSTTPLQSSHELPISIRVDPSLPSTSMQPHTVPMYLSHSRSHTSFQNGSNRFSRPIPVSRSSADLRNAVSQRSYNSPHQVSLPRFLHSRYTHILGPGNASRSQVVGLLTSQREHSLHQNDSRRSFIHFASASSLPGW

SEQ ID NO: 1255 - protein, 324 aa, Arabidopsis thaliana
  Clone ID: AT_F17A22.C1.p9.tg
MAGAKDSGCDDDLRIAGGCDPGKRGNPEDSSSPVEVSCSICLESVLDDGTRSKAKLQCGHQFHLDCIGSAFNMKGAMQCPNCRNVEKGQWLYANGSTRPFPEFSMEDWIPEEDLYGLSYPEMQYRVHWCPFGELSQAAASFELLILQTRKLELTFALCFRELEPATTTYHTEFHGHHAAAVNHSYLAYVGPGPAATPRTSDNNSTDDHPWNSHSNDHFHQLPVAPQYHHHSPSFSLPAAHVVDGEVDSSAARGLPYAHPFLFSHRVFYNILLELGIVGLIKGPHQQLTVTKEAAPKCVNSIMLIIIRGNNIMPMVPLSHHLSSP

SEQ ID NO: 1256 - protein, 208 aa, Arabidopsis thaliana
  Clone ID: AT_MNJ8.C1.p60.tg
MDTYSNWESVEITTTAMILPQDQGFRNTVFVNLHDVVNELAEDQNGVVMCLGTFAAPLMTKIELKPSCLTSHHIYQDLDEFITDIEFCRLLSERIALDCAHIPQPFSVSFYVRVTRDVMLPSIAVPSRDMFQRLLEEQTMEFTDLGDEEETTCSICLEDFSESHDDNIILLPDCFHLFHQSCIFEWLKRQRSCPLCRRVPYEEDLEIE

SEQ ID NO: 1257 - protein, 291 aa, Arabidopsis thaliana
  Clone ID: AT_MRN17.C1.p15.tg
MDMGFHENEQNQEFANLMEIGSGHYGCSHYRRRCKIRAPCCDEIFDCRHCHNEAKDSLHIEQHHRHELPRHEVSKVICSLCETEQDVQQNCSNCGVCMGKYFCSKCKFFDDDLSKKQYHCDECGICRTGGEENFFHCKRCRCCYSKIMEDKHQCVEGAMHHNCPVCFEYLFDSTRDITVLRCGHTMHLECTKDMGLHNRYTCPVCSKSICDMSNLWKKLDEEVAAYPMPKMYENKMVWILCNDCGSNTNVRFHLIAHKCSSCGSYNTRQTQRGSDSHSCSSGMPQVVGSTG

SEQ ID NO: 1258 - protein, 204 aa, Arabidopsis thaliana
  Clone ID: AT_F24O1.C1.p39.tg
MSQLGDLLRESEDGTRSERTMMMSLLEEDQINGGDRTMSKWTTLKQRLRFDWVGCCGKPLTLRLRQAETPIVVDDDDDEEESQNQVVDFSDPGTGTELDCLTRGSTRNLAEALAEERLAHVTEEETAVTKVPLMRLLAESDGCDSTTTWLGNDPLCCVCMGREKGAAFIPCGHTYCRVCSREIWMNRGTCPLCNRSIFDVLDLY

SEQ ID NO: 1259 - protein, 207 aa, Arabidopsis thaliana
  Clone ID: AT_MNL12.C1.p2.tg
METESFKLDVHVKALSQPPSLGFLSTVVISQYREVEEFLINNKDNCVTSLGSYPDDSSTCHDPLISLTLPSFKPNDVYQHLQTQLHDHDLSEQISCKIVEAQQRQTSQSVYLPQQPPLFIIVSVKLTHKVYVVVPPLATDLDQEMSQGEEEESKTCAICLEELSTSDDYCELPNCTHCFHEPCLTQWLIRGNNSCPLCRKPVDKQPQ

SEQ ID NO: 1260 - protein, 381 aa, Arabidopsis thaliana
  Clone ID: AT_F16M19.C1.p7.tg
MSRETTTEATPLILTDGGGGRRSVRRQGLREAARLLRHASSGRMMMREPSMLVREAAAEQLEERQSDWAYSKPVVVLDFVWNLAFVVVATAVLVLSSDENPNMPLRVWIIGYGLQCMMHMVCVCVEYRRRNSRRRRDLSPRSSSSSSSSSSSMDEEEGLGLSRNSDERYLELGQLENENNSFAKHLESANTMISFIWWVIGFYWVSSGGQELAQGSPQLYWLCIVFLGFDVFFVVFCVALACVIGIAVCCCLPCIIAVLYAVAEQEGASKEDIDQLTKFKFRKVGDTMKHTVDEEQGQGDSGGVMTECGTDSPVEHALPHEDAECCICLSAYEDETELRELPCGHHFHCGCVDKWLYINATCPLCKYNILKSSNYEEGEEV

SEQ ID NO: 1261 - protein, 645 aa, Arabidopsis thaliana
  Clone ID: AT_F27F5.C1.p26.tg
MQGERASLGSLSKALNFERGSTSSNAVVDQQIRWENLHNYGDNDLQDYMSSAADTNPTFANSVYHEKRGLQRFNIGEASSSGTKNEGASLTEQWKGIGRFEEQRNDKLELSPLFVQPSNGSRVVRDVNLNAEYNEHLEDMNPVTVHPGHFEVNGLRSEFLLDNSVRAGSSVDGRRASCKRKALDASGGQSSSTGGFREFQRGVSSSWISGPTYYSPAMTANDLNISLDHGRRGLVSSAVPNLSPPTITESSSRNYPVWVNPTYQQETVSNFAPSLNSPGLIPADHQQISMRYGHALGNFASQNPNAPATHMPPVSRNTFQWNTSPVAAVISSSSATPVDRNVIHRNATRQRSNTLEIPLFVPAPELRNVAHGHISRNASGARHVASSSSRTSVQPSPSSPALTPYQNNSLHNQRRLSENFRRSLLSSLVTQQRAARSLAHPASPNEHVLQSGGDNTSQVHNRASSRAGPRQGQDATGISHSLRGLASTSRGRTRMGASEIRNILEHMRRAGNLRLEDVMLLNQSIMLGAADIHDRYRDMRLDVDNMTYEELLSLEERIGDVCTGLNEETISNRLKQQKYKSSTRSSQEVEPCCVCQEEYKEEEEIGRLECGHDFHSQCIKEWLKQKNLCPICKTTGLNTANKPQR

SEQ ID NO: 1262 - protein, 301 aa, Arabidopsis thaliana
  Clone ID: AT_F12B17.C1.p270.tg
MAFNHRKMLLSCLQFKDLRFCFRQYPPPPPPPPPPRELSLLLPTSICVVGSIILFLFLVFFLYLHITQQRRISAASVTPGDTNQQEDEDETEERDFSDFHHVWQIPTVGLHRSAINSITVVGFKKGEGIIDGTECSVCLNEFEEDESLRLLPKCSHAFHLNCIDTWLLSHKNCPLCRAPVLLITEPPHQETETNHQPDSESSNDLRGRQDSSRSRRNHNIFLPRAQSDLANYCGSGRVENVRRSFSIGGSLSLCDGINNATRSGRQFYTSFSANLFSSSRRVRNEQPIPQNQMPSVTGNTS

SEQ ID NO: 1263 - protein, 192 aa, Arabidopsis thaliana
  Clone ID: AT_MNJ8.C1.p40.tg
MILPQDQGFRNTVFVNLQDVVNELAEDQNGVVMCLGTFAAPLMTKIELKPSCLSSHHIYQDLDEFITHTEFCRLLSERIVLDCAHIPQPFSVSLYVEVTRDVMFSSIAVRSTDTFQRLLEEQTMELTDLGDEEETTCSICLEDFSESHDDNIILLPDCFHLFHQNCIFEWLKRQRSCPLCRRVPYEEDLETE

SEQ ID NO: 1264 - protein, 174 aa, Arabidopsis thaliana
  Clone ID: AT_T8L23.C1.p19.tg
MVPEITIDVNVFPSPRKSSSNTVEINLKRESDDKCDDAPLFQITQLILKDVVNFDPHKTSPLLETIFPDSISGTRLCVEMALASERVPAPFDMYLHVTVRFVEESTSSSPLENKTCAICLEDMSQDVHDYQEMPNCPHVFHNDCIYKWLGHSNLCPLCRTVLEDEDDDDYPYYS

SEQ ID NO: 1265 - protein, 193 aa, Arabidopsis thaliana
  Clone ID: AT_F26K10.C1.p150.tg
MEIEKDEDDTTLVDSGGDFDCNICLDQVRDPVVTLCGHLFCWPCIHKWTYASNNSRQRVDQYDHKREPPKCPVCKSDVSEATLVPIYGRGQKAPQSGSNVPSRPTGPVYDLRGVGQRLGEGESQRYMYRMPDPVMGVVCEMVYRRLFGESSSNMAPYRDMNVRSRRRAMQAEESLSRVYLFLLCFMFMCLFLF

SEQ ID NO: 1266 - protein, 238 aa, Arabidopsis thaliana
  Clone ID: AT_T20N10.C1.p70.tg
MAIPLFQINPIIVMIRIHDRRVGEFLLSLRGMLGLGVIQDLVPPSHTRHQIPIRNSNNLRRQHLEALRQAVHNQSTRPESSSRSSSQTNEEDEILKHLTKETYNPVPKSTLLRSLSLYYRNKNPGSESSRNTQNLSGEEDDKRCSVCLEDFEPKETVMLTPCKHMFHEECIVPWLKTKGQCPVCRFVILKPTKQDSSPPANGSNLTGDMTTNDLFTLELLSVVRAMEETFLFGNPRRR

SEQ ID NO: 1267 - protein, 576 aa, Arabidopsis thaliana
  Clone ID: AT_F2D10.C1.p27.tg
MASISSLHRWASNQHSRLPRITSISEADQSRPINQVVAFSVPISRRDASIILLSSIPLTSFFVLTPSSSEARERRSRKVIPLEEYSTGPEGLKFYDIEEGKGPVATEGSTAQVHFDCRYRSITAISTRESKLLAGNRSIAQPYEFKVGSTPGKERKREFVDNPNGLFSAQAAPKPPPAMYFITEGMKVGGKRTVIVPPEAGYGQKGMNEIPPGATFELNIELLRVTPPPEEKSLKIHAKEKFPVNSKTRLQLHGELDTGAGVPSYFCAMIRYFFHEASTNLGVGLHYDKREKLRCLVRGKKKFPVITDEVVTFNIKGRCDFDQDLVQRNAKGAAEFDWNIWKFQKDQDLRLRIGYEMFEKVRFSLPFNKENNNGSYWIIEHYVLAFSVTESNTPSPAIDNSTAALNSDLVVILAALLCALICVLGLIAVSRCVWLRRLAAGNRTVSGSQTQSPQPPVAAANKGLKKKVLQSLPKLTFSPESPESEKFAECAICLAEFSAGDELRVLPQCGHGFHVACIDTWLGSHSSCPSCRQILVVARCHKCGGLPGSSSSGLESEPEIEIRIKQGEDDPNSFLP

SEQ ID NO: 1268 - protein, 428 aa, Arabidopsis thaliana
  Clone ID: AT_T10O8.C1.p160.tg
MSLPDSLPSSSSSPPVTREETGFHRFEHHGNDSGFDHRDRPPWNRSEYDYRHGSVVASENVRNNSTSEDPWSCVVVVATFCIFGNVDDFDSGALWNNECLVEELGNKGSGLILYGLNQAPQLDVLTKWSEVHYLAVPNDSYKYWIQYLNKGSRVKVSYNVESVGSSLYLVIAQGVDGLSEWVQDPTRPDTTLSWHIISGKCPSGYIEQDITKSSSYYVAVGNVYLNEVKATIDIQVEGVLYDTTNAYYNCSFPNDKCTLSVPLFGTNAAVLTSPGPKLNNSKNEFCAKLSYEPRWIAYIVCMGVVTALLLIVSSLFNKRQPVTEDETVDENDDVAPLIPGKDDDNSSWCSSYSSILTSTEELEGAHGEGHSSTRYLCAICYDAPRDCFFLSCGHCVACFQCGTRIAETSGFCPVCRKKIRKVKKIFNV

SEQ ID NO: 1269 - protein, 357 aa, Arabidopsis thaliana
  Clone ID: AT_F23J3.C1.p160.tg
MTIFTRDFSHRILACVLLPLFLFQCLPYVTCQQGSESAGRNGKSKESSIIGIVLLSLFLLLLVVYCLNYGCCIEENETGGHEVLHSRVRRGIDKDVIESFPAFLYSEVKAFKIGNGGVECAICLCEFEDEEPLRWMPPCSHTFHANCIDEWLSSRSTCPVCRANLSLKSGDSFPHPSMDVETGNAQRGVQESPDERSLTGSSVTCNNNANYTTPRSRSTGLLSSWHVPELFLPRSHSTGHSLVQPCQNIDRFTLQLPEEVQRQLVSLNLIKRSHIALPRARSSRQGYRSGSVGNERTGFSQGRQTLRRAISTSLSFSFQPAPVRSTLDRDNLMRETSQANDKDFGERSFQRLMPEKN

SEQ ID NO: 1270 - protein, 232 aa, Arabidopsis thaliana
  Clone ID: AT_F14F8.C1.p170.tg
MGCVSSCFGVDDFEDYPNPSSSVNRSCPCPRCLVNNFLNLYISLFRRGETRSLPSSLQATNVSIATSTSYDNFMSNTFHSTPRPLPYDADPRYFRSRRDSLVSRRDKGSSHSHEEAEPLRSDADVDSESFSVEGSKWANKLIISGEDSKEEFSRSSRRILQSRTMSTSNEGLYITSDDEDVCPTCLEEYISENPKIVTKCSHHFHLSCIYEWMERSENCPVCGKVMEFHETP

SEQ ID NO: 1271 - protein, 206 aa, Arabidopsis thaliana
  Clone ID: AT_C6L9.C1.p30.tg
MSMSSRPEVEVHVTNGRKLSPSEPNSVIIRLKTKSVEIIIENQTTGRQNRRTQVSPPFLIDINLRSSSHDHIRTLLHDRLVGYPFESYLCDDLAPKISTAAIDLGFGHNGFTLTMAATVTYRTVSVMSNDEKSLRMVLLGRMKAEEFKSLKMETEPCSICLESLVSGPKPRDVTRMTCSHVFHNGCLLEWLKRKNTCPLCRTEIYD

SEQ ID NO: 1272 - protein, 535 aa, Arabidopsis thaliana
  Clone ID: AT_T17M13.C1.p17.tg
MSSDMRDERFFYHRYLSVTNRTTPTTATNLPTSTSNMRSTSLMTPRVAHTSMSSGGDFPDDRFFHARHQSATDRAASNRSRAIMPISTTNVPSSTSNSPRVLQTSMSRRGTSPMSSSTRRSVQASMSARETVPSSTSTRSMQTSTSTPEIMPTSSRNVITSSEEVANTFTQTSYIQFGSLWETNTTPSTRSWPTVPSSNSPRVLQTSMSRRGTSPMSSSTRRNVQSSMSGRETVSSSTSTSSMQTSMSTPEIMPTSSRNVITRSEEVANTFSTQTPYIQFGRLWETNTTSSTRSRTTVPTSTTNVPSSNSSRVLQTSMSTRGTFPMSSSTRMSVQASMLAPGTVSSSMSTVEIMPTSARNMITMSEEVANSFTQTSYIQFGSLWETFKTVTKLSRVAMVENGECVICLEEWRKETYVTSSTSNMRTSSLMTLTRFIDEQISLRATVSSTRTTARLLTNESPATIRAVAMLPRVAMVEKGECVICFEEWSKSDMETELPCKHKYHLECVEKWLKIHTSCPQCRYKLSCVYKSFLML

SEQ ID NO: 1273 - protein, 216 aa, Arabidopsis thaliana
  Clone ID: AT_MNJ8.C1.p70.tg
METETLRLQVATRMSKLPSNLGFTSAVQIELHEVIHEMLEDVTGTTPVVASLSPISHVLLKPRSFLPEQLSRLLRRQLHRDTSICESLAEKISSLRFSRANYTLYQRPFLMTVKVRVIKEVRFIVSPVSAPSSGAPVDVFQRLLEEQTVEPSMDSDESCSICFEKLSDSLSETYHNSIIQMPKCLHSFHQKCIFKWIGRQNSCPLCRRVPFEEDED

SEQ ID NO: 1274 - protein, 274 aa, Arabidopsis thaliana
  Clone ID: AT_T20O10.C1.p70.tg
MGGSASLQSDSMEAAAAADSSIPRDKDFGKFQFGCEHYKRRCKIRAPCCNLIFSCRHCHNDSANSLPDPKERHDLVRQNVKQVVCSICQTEQEVAKVCSNCGVNMGEYFCDICKFFDDDISKEQFHCDDCGICRVGGRDKFFHCQNCGACYGMGLRDKHSCIENSTKNSCPVCYEYLFDSVKAAHVMKCGHTMHMDCFEQMINENQYRCPICAKSMVDMSPSWHLLDFEVSILCNDCNKGSKAMFHILGHKCSDCGSYNTRRISTPQDPVSETE

SEQ ID NO: 1275 - protein, 1208 aa, Arabidopsis thaliana
  Clone ID: AT_T6K21.C1.p90.tg
MVRGLVNFTGLSTRLLNICVDSLCKFRKLEKAESLIIDGIRLGVDPDVVTYNTLISGYCRFVGIEEAYAVTRRMRDAGIRPDVATYNSLIAGAARRLMLDHVLYLFDEMLEWGIYPDLWSYNTLMCCYFKLGKHEEAFRVLYKDLQLAGLNPDNALELFKEMQSRFKPELMTYNILINGLCKSRRVGTAKWMLTELKKSGYTPNAVTYTTILKLYFKTRRIRRGLQLFLEMKREGYTYDGYAYFAVVSALIKTGRTKEAYEYMQELVRKDGNLDAVDDLLGEIERRGMKADEYTHTIIVNGLLRTGQTRRAEEHFVSMGEMGIGLNLVTCNCLVDGLCKAGHVDRAMRYFESMEVKDEYTYTSVVHNLCKDMRFVCASKLLLSCYNKGIKIPTSARRAVLSGLRMSGCYGEARKAKAEMKLTLVIMGRVRLVTPSSSESEDERVTIIREADMNREEVAEENKFEDENCEQESPENLNEPEEENISEEGDNVEPMQSQGMEENPEEEEKEGEEEEESEGNQNPNFFSIQPKTYQRTWIWRDMRKIRRRRRFVVLFVGGSSSSEKREGEKKSFREKKGEEGNKERERKFSNSPVKLELKSPAKSELKSPAAKSEKITSEVVGENRGSNDRSIRMGLSWDRLVVVVGTDSFCDCQKRGQSLSFRASVSSYRVALMLITCLCILAVDFTIFPRRYAKTETYGTSLMDLGVGSFVLANAVVSRQARDVSSGNWITGIKATAPLLLLGFIRLVTTSGVDYQVHVTEYGVHWNFFFTLAAISILTSFVNIPAKYCGLLGFAVLAGYQTWLLSGLNTYLLSDERGTDIISKNKEGVYSILGKILTWLLGHVPSWRSLRIVTILFDNYVERISRRTALGIFMLSSYIPLNKLSSLEEAIDQNLLATFLLSDPNPSAWNQYINPRDCTQGLCSTFCPQWCTYINFSPPPISYEQFLNDGVASNPNLSPLVIAIFGIFATAFLLAAYYTLVSKYCANDTTNEAASESGRSDIILDVNSPERGDQDDPFALESSTAGLDDTLIKKIGFFKLKKHQNGFKINGTDCSICLGEFNEDESLRLLPKCNHTFHVVCIDRWLKSHSNCPLCRAKIIVPTTQQPEHHVVVMNLDRFTSNVGSAEGNVVVDDHREEVSVSISSHHPSWFSAADIVLRISRDGEEEEGNYDLENGNREKLVDLKRSFSSGGLVLGTQGRTRRSLNICP

SEQ ID NO: 1276 - protein, 131 aa, Arabidopsis thaliana
  Clone ID: AT_F21J9.C1.p80.tg
MGLSHFPTASEGVLPLLVMNTVVSITLLKNMVRSVFQIVASETESSMEIDDEPEDDFVTRRISITQFKSLCENIEEEEEEKGVECCVCLCGFKEEEEVSELVSCKHFFHRACLDNWFGNNHTTCPLCRSIL

SEQ ID NO: 1277 - protein, 250 aa, Arabidopsis thaliana
  Clone ID: AT_K3G3.C1.p4.tg
MIQMDGGDRLRVTLLDRMSTVESSRSCLTLEAILMADKNRTSPQILSPPPSRSQSNRSLVEVMQREHRHSRDKTAWKSLREKLRLKRNGSVWISSNSIPSLDTPIPNRDNVSHQLGFLLSNSGNVTEEASSVEGRIRLGAVLAEERALSAREEETPAEREVEPARMSLMELLEENEGQMSFVSVDGEAEEEVAAVTAAEISCCVCMVRSKGAAFIPCGHTFCRLCSRELWVQRGNCPLCNTTILEVLDLF

SEQ ID NO: 1278 - protein, 304 aa, Arabidopsis thaliana
  Clone ID: AT_F25G13.C1.p190.tg
MTMPFALEICSAAIELRILVQIEGKLSAKVDFVVLVFRSHFIIDKMIQMDGGDRLRVTLLDRMSTVENGRSSVTLEDILMAETSSFRSLTTPTTPVRNHSSSSLLDVMRRERRRDKTAWKSLRDKLRLKRTATGWISSNPIPTLDNHILTPDNDSHRFNRLGFLLTNSETNRSSRDVSDAAEEAAEREGRLRLGTVLAAEREEMQPPRMSLMELLEDNDGHMYELSARDEVEVEGRDGCDGGGEAVAVTGAAELGCCVCMVRSKGAAFIPCGHTFCRLCSRELWVQRGNCPLCNTAILQVLDIF

SEQ ID NO: 1279 - protein, 518 aa, Arabidopsis thaliana
  Clone ID: AT_T14P1.C1.p25.tg
MALLEKLQVISVVKLSSIRKFQVEKDSIVWKEREINIKNELGDVSRKTSAVTDSRMASLDSEIQKQLDEKMRIKTRLGNISRERGRKEIFADMKALISSFPEEMSSMRSQLNNYKETAGGIHSLRADVQSLSGVLCRKTKEYEALQLRSADYASQLGDLNATVCDLKNSHEELKLFLDMYKRESTDARDIAEAKEQEYRAWAHVQSLKSSLDEQNLELRVKAANEAEAVSQQMLAAAEAEIADLRQKMDDCKRDVAKHSDILKSKHEEHGTYLSEIQTIGSAYEDIVPQNQQLLLQVTERDDYNIKLFLEGITSRQMQDTLLIDKYIMDKDIQQGSAYASFLSKKSSRIEDQLRFCTDQFQKLAEDKYQKSVSLENLQKKRADIGNGLEQARSRLEESHSKVEQSRLDYGALELELEIERFNRRRIEEEMEIAKKKVSRLRSLIEGSSAIQKLRQELSEFKEILKCKACNDRPKEVVITKCYHLFCNPCVQKLTGTRQKKCPTCSASFGPNDIKPIYI

SEQ ID NO: 1280 - protein, 226 aa, Arabidopsis thaliana
  Clone ID: AT_MBG8.C1.p26.tg
MKNSYKHELISTSTNETDRVINRCFLRKKTTKEVIHLKASQVESDSYSFIVTYQPNLRIRHENLDGHQLKTTLERHPDRVFKLEDNIPKQFLVSQETCLEHVMIILSAMYLPQTIQERLVRYISTESVKFRNRRCGTGGGLKVEVDVKVDVEQWVRIDCCCKQKGTCLVPALDCPICLTELSSGVSRMKLPCSHVFHRDCIMTWLKKNPSCPICRTKAHGKTVSIY

SEQ ID NO: 1281 - protein, 4706 aa, Arabidopsis thaliana
  Clone ID: AT_MYJ24.C1.p10.tg
MDSLLLEDFGQKVDLTRRIREVLLNYPEGTTVLKELIQNADDAGATKVRLCLDRRVHGSGSLLSDSLAQWQGPSLLAYNDAVFTEEDFVSISRIGGSGKHGQAWKTGRFGVGFNSVYHLTDIPSFVSGKYVVLFDPQGAYLPNISAANPGKRIDYVGSSALSQYKDQFLPYCAFGCDMRSPFNGTLFRFPLRNTEQAASSRLSRQAYFEDDISLMFDQLFEEGVFSLLFLKCVLSIEMYTWDDGDSEPKKLYSCSVSSPNNDTVWHRQAVLRLSKTSISGDREMDAFTLEFLSESEKGNQTKRRTDRFYIVQTMASASSKIGLFAATASKEYDIHLLPWASVAACISDDSSENNILKLGHAFCFLPLPVRTGLTVQVNGYFEVSSNRRGIWYGEDMDRSGKVRSAWNRLLLEDVVAPSFARLLLCLREVLDSRDSYFSLWPSGSFEAPWSILVEQIYKNICNAPVLFSDLDGGKWVSPADAYLHDEEFSGSKDLGDALLQLEMPIVCLPRLVFDMLLKHPSFLLPKVVTPDRVRNFLKECKTLSALKKSLKLVLLEYCLDDLTDDSVCTQASNLKLLPLANGDFGFFSGRTGSVSYFICDELEHMLLQKVYDRVIDKNIPPPLYTRLFAIAESRTANVAIFSIHNLLQLFPRLVPAEWKHRSKISWHPESNRDHPSSSWFVLFWQYLDKRCQSLSLFCDWPILPSTSGYLYIASPQSKLINAEKLPAAVRNVLEKIGGKILNNNIKVEHSDLSSFVSDASYTGVLESIFDAASSDLDGVQNLIYDLNAQEKDELRSFLLDPKWHIGHQIGDLYLRICKILPIHRIYGETSAQESKYSDLVNPPKHLPPLDVPACLLGCEFILCCQGSEEDVLSRYYGIERMRKSNFYRQNVFNRIEVLQPEIRDQVMISILQDLPQLCLEDRLLREELQNLEFVPTVNGPLKRPSVLHDPRNEELYALLEDSDCFPASGFQGSAILDMLQGLGLKTTVSPETILESARLVERLMHKDLEKAHSRGKVLFSFLEVNAVKWLPDQSSEDDGAINRIFSRAATAFRPRNLTCNLVKFWSELKMICWCPVLVSAPFQTLPWPVVTSTVAPPKLVRPKTDMWLVSASMRILDGECSSTALAYNLGWLSHPGGSAIAAQLLELGKNNEILIDQVLRQELALAMPKIYSILARLLGSDEMDIVKAVLEGSRWIWVGDGFATLSEVVLDGPLQLVPYIRVIPTDLAVFRGLFVELGVREFLTPSDYADVLCRIAVRKGTSPLDPQEIRAAVLIAQQLAEAQFLDKVTIYLPDVSGRLFPSSDLVYNDAPWLTASDNLNSSFSAESTMLLNAKRTMQKFVHGNISNEVAEKLGVRSLRRVLLAESADSMNFSLSGAAEAFGQHEALTTRLKHILEMYADGPGILFELVQNAEDAGASEVTFLLDKTHYGTSSLLSPEMADWQGPALYCFNNSVFTQQDMYAISRIGQASKLEKPFAIGRFGLGFNCVYHFTDIPGFVSGENIVMFDPHANHLPGISPTHPGLRIKFAGRYILDQFPDQFAPFLHFGCDLEHTFPGTLFRFPLRNASVAPRSHIKKETYAPEDVLSLFTSFSGVVSEALIFLRNVKTVSIFTKEGAGHEMQLLHRVCKDHNVGQDTEPKPSSQVFSLLDENIFAGMNKDQLLKKLSNTVVKDLPYKCQKIVVTEQDSSGCILHGWITGECLNAGVSKKNLNLPEMSHKLIPWASVAVHINSVKNENVEDLAASISNIFGPSTISIQNRRNFGGRAFCFLPLPITTGLPAHINAYFELSSNRRDLWFGNDMAGDGKVRSDWNLYLIEEVVVPAYGHLLEKIASELGPCDLFFSVWPVTLGTEPWASLVRKLYSFIANNGLRVLYTKARGGQWISTKQAIYPDFSFPKADELVDVLADAGLPVINISKTVAERFGEACSSLHLMTPQLLRTLLTRRKREFRDRNGLALALEYCLLDLKVPFLADLLYGLPLLPLADGSFTTFNKNGTAERIFFAEEIGYELLKDSLPHQLVDREVPEGVYSKLLAVAQSGESCICLLSCNLLEKLFFKLLPADWHLSEKILWTPGQRGHPTVEWIRVLWSYLKLSCDDLSVFSKWPILPVEDGCLMQLILNSNVIRDDGWSENMSSLLLKCGCRFLNRELPVEHPQLETFVQPPTATGILNALLAISGGHENIKGIFLNVSEGELHELRNFILQSKWFSGGHMNEVHFETIKHLPIFESYRSRKLVSLNCPVKWLKPDGIREDLLDDDFVRLDSERERTIFKRYLQIKEPSKMEFYKACVLNRMSEFLSQQEALLAILHDLNDLVVADVSLQCAISTTPFVLAANGLWQQPSRLYDPRVPALQELLHKEVYFPSEKFSDSKILDALVGLGLRTTLDCSTYLDAARSVSMLHDLGDLEASRYGRRLLFHIKTLSIKLSSKTGEANHDESQNIMSITSEDSFDGETYPEYETETSYLGSLLTQQSEDEFWCQLRSIPWCPICLDPPIEGIPWLESSNLVASPDRVRPKSQMFLVSATMHLLDGECQSSYLHQKLGWMDCLTIDILCRQLIEISKSYKEQKSRSSVNPEFESMLQSQIPLLYTRLQELSRENDFLALKSALSGVPWVWLGDDFVSADVLSFDSPVKFTPYLYVVPSELSDFKELLLELGVRLSFDAADYMNTLQHLQNDIKGSQLTDEQINFVLCVLEAVADCFSEVSSDSDNNSVLVPDSAGFLVPLEDLVYNDAPWVDSSSLSGKRFVHPSINSDMANRLGIQSLRCISLVDNDITQDLPCMDFTKLKELLSLYASKDFLLFDLLELADCCKVKKLHIIFDKREHPRKTLLQHNLGEFQGPAIVAILEGVTLTREEICSLQLLSQWRIKGETLNYGLGLLSCYFMCDLLSIVSGGYFYMFDPQGATLSASTTQAPAGKMFSLIGTNLVERFSDQFNPMLIGQDKAWSLTDSTIIRMPLSTEILKDGFEAGLDRVKQISDQFLENASRILIFLKSVSQVSFSTWEQGNAQPHQDYTLHIDSASAIMRNPFAEKNLKTSKLSRIFGSSNSGVKSRIIEVNLHIGENKLLDRWLVVLSKGSGQSQNMARGRKYLAYNLTPVAGVAAHVSRNGRPVDVHAASPIMSPLPLSGSVNLPVTILGCFLIRNNCGRFLFKNKNERAMSEPQLDAGDILIDAWNKELMSCVRDSYIEIVVEMERLSREHSSSSTESSTARQLALSLKAYGHQLYSFWPRSNQHDDAIEAEVLKPEWECLVEQVIRPFYARVADLPLWQLYSGSLVKAEEGMFLTQPGSEVAVNLLPLTVCSFVKEHYPVFSVPWELLAEVQAVGIPVREVKPKMVRVLLRKSSASIDLRSVDTFIDVLEYCLSDIQFIEALNPEEANMDEGNSTSTSSSMSTQAQAGSSDAFEMMTSLGKALFDFGRVVVEDIGRTGDSIGQRISNNRYSNADPRFLSAVNELKGLPCPTATNHLARLGISELWLGNKEQQALMLPVSARFIHPKVFERSSLADIFLKSSVQAFLKLRSWSLPLLASNMKYLFHDHWVSYISESNSVPWFSWESTSSSSDDSGPSPEWIQLFWKNFNGSADELSLFSDWPLIPAFLGRPILCRVRERHLIFFPPPALQPVSRSGTDMHQTDSDISTTSVSGGPLSELTQRYVSGFDLAQSKHPWLILLLNQCNIPVCDTAYIDCAERCKCLPSPSVSLGQAIASKLAEGKRAGYIADIASFPTFGRDELFTLLANDFSSSGSSYQAYELEVLSSLPIFKTVTGSYTHLQRHGLCIISGDSFLKPYDECCFCYLPDSVECHFLQALGVTVLHNHQTLVRFGLAEFESRSQSEREDILIYVYGNWLDLEVDSDVIEALREAKFVRNSDEFSSELSKSKDLFDPSDTLLVSVFFGERKRFPGERFSSEGWLRILRKAGLRTAAEADVILECAKRVEFLGNERNRSSEEDDFETDLVHSEKDISVELSTLAGSVIEAILLNFAGFYSTAFCNTLGQIACVPAESGFPSLGGRKGGKRVLTRYSEAVLLRDWPLAWSSVPILSTQRFIPPGFSWTALRLKSPPIFSTVLKHLQVIGRNGGEDTLAHWPNDPNVMTIDVTSCEVLKYLEIVWDSLTTSDILELQKVAFLPAANGTRLVGASSLFVRLPINLSPFAFELPSLYLPFLNILKDLGLNDVLSVAAAKDILSKLQKLCGYRRLNPNELRAVMEILHFLCDEINTTKPPEINTIKSDVIVPDDGCRLVHALSCVYVDSFGSRYVRYIDTARLRLVHPLLPERICLDLGVRKLSDVVIEELENAEHIETLDNIGSISLKAVRRKLQSETFQAALWTVSRQATTVDDLSFEVMQHSLQSAAEKIGFVRNIYTRFLLLPNSVDVTFVAKESMIPEWENESHHRTMYFINRHRTSILVSEPPGYISFLDVMATVVSEVLGFPTSLPIGSLFSCPEGSETEITAYLRLCSYSLTNTGTADSSVGQEIMPQDAVQVQLHPLRPFYKGEIVAWKIKQGDKLRYGRVPEDVRPSAGQALYRLKVEMTPGETGLLLSSQVFSFRGTSIENEGPSTLPEVLPAVSDKKSQEISESSRTNKTSSSQPVNEMQLGRVTAKELVEAVHEMLSAAGINMELENQSLLQRTLTLQEELKDSKVAFLLEQERAEASMKEAETAKSQWLCQICQTKEVEVTIVPCGHVLCRHCSTSVSRCPFCRLQVNRTIRIFRP

SEQ ID NO: 1282 - protein, 378 aa, Arabidopsis thaliana
  Clone ID: AT_MHF15.C1.p6.tg
MEPFVVKENIVASASSPMKKRRIDHTESADGSAINASNSSSIGGNDTVMNMAEFGNDNSNNQESQQVCTFFKKPTKSKNIRKRTIDADEEDGDSKSESSILQNLKKVAKPDSNLYFSSGPSTRTSGAPERPVFHYDSSKEIQVQNDSGATATLETETDFNQDARAIRERVLKKADHALKGNKKKASDEKLYKGIHGYTDHKAGFRREQTISSEKAGGSHGPLRASAHIRVSARFDYQPDICKDYKETGYCGYGDSCKFLHDRGDYKPGWQIEKEWEEAEKVRKRNKAMGVEDDDDEADKDSDEDENALPFACFICREPFLDPVVTKCKHYFCEHCALKHHTKNKKCFVCNQPTMGIFNAAHEIKKRMAEERSKAEQGL

SEQ ID NO: 1283 - protein, 145 aa, Arabidopsis thaliana
  Clone ID: AT_F8N16.C1.p21.tg
MASSCCGDYVAAASPEMSTVMGSESIVLRLLCVVFIILFYGSIILLCFVMYPKLPKEEIGDEEAGEPLPPAVRLTKCGGGDGGDGDGVKADVCVICLEDFKVNDVVRVLVRCKHVFHVDCIDSWCFYKLTCPICRAPFQWFGGDW

SEQ ID NO: 1284 - protein, 424 aa, Arabidopsis thaliana
  Clone ID: AT_F17M19.C1.p13.tg
MRNNITLSFDDIEANFAPSVKGTGEIGVVYVAEPLDACQNLMNKPEQSSNETSPFVLIVRGGCSFEEKVRKAQRAGFKAAIIYDNEDRGTLIAMAGNSGGIRIHAVFVTKETGEVLKEYAGFPDTKVWLIPSFENSAWSIMAVSFISLLAMSAVLATCFFVRRHRIRRRTSRSSRVREFHGMSRRLVKAMPSLIFSSFHEDNTTAFTCAICLEDYTVGDKLRLLPCCHKFHAACVDSWLTSWRTFCPVCKRDARTSTGEPPASESTPLLSSAASSFTSSSLHSSVRSSALLIGPSLGSLPTSISFSPAYASSSYIRQSFQSSSNRRSPPISVSRSSVDLRQQAASPSPSPSQRSYISHMASPQSLGYPTISPFNTRYMSPYRPSPSNASPAMAGSSNYPLNPLRYSESAGTFSPYASANSLPDC

SEQ ID NO: 1285 - protein, 327 aa, Arabidopsis thaliana
  Clone ID: AT_T9I1.C1.p10.tg
MTIGKSPILLHHHVIFLLLLVLQVSGQHQPRTTAPPYIAQRPNQVPAVIIAMLMFTLLFSMLACCVCYKYTNTSPHGTSSDTEEGGHGEVAFTRRTSRGLGKDVINSFPSFLYSQVKGLKIGKGGVECAICLNEFEDEETLRLMPPCSHAFHASCIDVWLSSRSTCPVCRASLPPKPGSDQNSLYPFIRPHDNQDMDLENVTARRSVLESPDVRLLDRLSWSNNTGANTPPRSRSTGLSNWRITELLFPRSHSTGHSLVPRVENLDRFTLQLPEEVRRQLSHMKTLPQARSSREGYRSGSVGSERRGKGKEKEFGEGSFDRLKAEMV

SEQ ID NO: 1286 - protein, 151 aa, Arabidopsis thaliana
  Clone ID: AT_K18J17.C1.p6.tg
MRSFPPSPAPASIENNTHHHLHEDFTLMVIVFVLYGIVAIRYATFNDGCRGTNLRFQRPQPPLPLPQPQPPMCPREIAAMIKDIVVDVELCCPICLEDLKKVDNDDDKVVVCLSKCNHSFHMNCIFSWLRESQDCPICRSTVYRGGVTLIK

SEQ ID NO: 1287 - protein, 325 aa, Arabidopsis thaliana
  Clone ID: AT_F6A14.C1.p12.tg
MNELLQENPKRLNIIDKIYLFLIVLAIMISSFAHEIEHNPVPEDVGIINISVATTKIYQSIISNYDLYDELTSEFSCIPVSLRDCVAVELTEFLTGSGKITPIDAYHVLLELFRFVDEITSSDDYTPGCALRVLMTLTIAIPPEHIEEDVLGLEDEQDVYGEASSSQFEEVVPFYGLPYFRDDYNDYFPYEEASSSQLGEVVLFHGLPHLRDEHHASFGFDHQIEEASHSQIEEVFQVSFNETNTVRLKPASKLTVGALNRKTYKKASGVVCENDVCTICLEEFDDGRSIVTLPCGHEFDEECVLEWFVRSHVCPLCRLELPCER

SEQ ID NO: 1288 - protein, 368 aa, Arabidopsis thaliana
  Clone ID: AT_T12C24.C1.p17.tg
MSTETTTGNSSLIPASSSSSSSDAIDPAPLLFNGDDNEGNNGGGGGERRSVRRQGLREAARFLSRASSGRVMREPSMLVREAAAEQLEERQSDWAYSKPVVVLDIVWNLAFVSVATAILVMSRKEHPIMPLRVWLLGYALQCVLHMVCVCVEYRRRNRRRTNRTTTTTPPRSRSSSSSSSSSSLEEEALGSRRNSGVQDLSLGHLDTESSRLSIVFLGFDVFFVVFCVALACVIGIAVCCCLPCIIAVLYAVADQEGASKEDIEQLTKFKFRKLGDANKHTNDEAQGTTEGIMTECGTDSPIEHTLLQEDAECCICLSAYEDGTELRELPCGHHFHCSCVDKWLYINATCPLCKYNILKSSNLDREEV

SEQ ID NO: 1289 - protein, 226 aa, Arabidopsis thaliana
  Clone ID: AT_MYC6.C1.p6.tg
MGGCCCCSSSRRADVDNGPAYYYYPRATEERVPLSSAHNRTSSAISTGVVVVDTNLETSSPDAYIPPPLPTPFDVPIGIPQTPASGEEATCVDIREVSVDSANTESAQETVDGITLGVPTTCSHKETDSKIQTEIDLESTEEIDPKLSKAVFIPIEEEEDCPICLEEYDIENPKLVAKCDHHFHLACILEWMERSETCPVCNKAQFSLYQKKEIGEQEKNLKRKNG

SEQ ID NO: 1290 - protein, 242 aa, Arabidopsis thaliana
  Clone ID: AT_F7A7.C1.p40.tg
MRKSFKDSLKALEADIQFANTLASEYPEEYDGGYVQMRLSYSPAAHLFLFLLQWTDCHFAGALGLLRILIYKAYVDGKTTMSLHERKTSIREFYDVLFPSLLQLHGGITDVEERKQKEICDKRYRKKDRTDKGKMSEIDLEREEECGICLEIRNKVVLPTCNHSMCINCYRNWRARSQSCPFCRGSLKRVNSGDLWIYTCSAEIADLPAIYKENLKRLLIYIDKLPLVTSDPNLVPYAPLPR

SEQ ID NO: 1291 - protein, 272 aa, Arabidopsis thaliana
  Clone ID: AT_K21H1.C1.p8.tg
MDPNEDNSEIPDSPFSFMWLLFGDDWDLWDTYSPVDADDISPDPTLDVNGDGPAIEPGSLLRTISWETTFEQDSLQSWNDEQSETTSVVEYTDVSSHGNTFTNEEETLERYWRNWLQSSTNEQSETGSQEEYTNASSHGGTFIYEEETLEQYWRNWLQSSTNEQFETESLEEYTNPSSHGDIFTYEELLSITDETGDERTGLSEEVIDENLIRRKYEKRSDDETKRCVICQQKLKDNEEVSKLGCGHDFHFGCIKNWLMVTNKCPLCNREVV

SEQ ID NO: 1292 - protein, 302 aa, Arabidopsis thaliana
  Clone ID: AT_F23J3.C1.p140.tg
MTIFARDLIYRIETKVLLPLFLVHLLPYVTCQQESESVDRNRKTNFPTETVIAIIVLAIFISLSMVACFLHKTFYRAEVEAASQEVFHSRARRGLEKELVESFPIFLYSEVKGLKIGKGGVECAICLSEFVDKETLRWMPPCSHTFHANCIDVWLSSQSTCPACRANLSLKPGESYPYPITDLETGNEQRDEHSLLQLGTNLDRFTLQLPEEMQRQLVSLNLIRTSNMTLPRAMSSRQGYRSGFSHGRQTLRRAISMSLSFSLQAASVRSTVGRDDLVLETSQAKDKDLCEQSFQHLMPEKV

SEQ ID NO: 1293 - protein, 224 aa, Arabidopsis thaliana
  Clone ID: AT_F6A14.C1.p13.tg
MRIDFYHNIIRNHQPENAGTLSVNANIDGYDYTFTDTSFIEEFLNEENNQFPTKQKLHYFLEDSELINDYDMEWGTAIFELIFYVVAVTNPARGDYSPGDDLLVSLLIFPNDEPIEEEYEIEEEDLSEEEDQIEEAVRASLEETNNISLRPANKLVVNSLARKIYKKTTSSTERCTICLEEFNDGTKVMTLPCGHEFDDECVLTWFETNHDCPLCRFKLPCEDQ

SEQ ID NO: 1294 - protein, 720 aa, Arabidopsis thaliana
  Clone ID: AT_F20D10.C1.p10.tg
MMNGLRRTFWSSIHKKKDNNRVDDSLDRQKPTTTSRFGFFSNPSTPRSETRPDSVTCSPTIPCQSWSATAISTPSPSLPASPKLQCDTSGDVTPTRNRSPLSFLSVSSSSSTPSSPKSPASFSLLKSKLCFTKVRILNRNNQSSISSSKCGICLQSAKAGRGTAIFTAECSHTFHFPCVASRAGDRNLLSDCPVCGASWRETSLLPLSLSSSLHESGSESDSKIRESKNNNKSLRVYNDDEPLISSPISRTGFNTIPESNEDEEEEDNDDGEFKGFYVNTPSPLTTKKMLTDSVTGHVDVKLSSEAAIVAVGRGNETYSVLMKIKSPSLPTARRSPVDLVTVIDVSGGNIEMVKRAMRQVISSLRETDRLSMVSFSSSSKRLTPLRRMTANGRRLARRIVDDISGDGDGMSVNDAVKKAAKVIEDRRQKNLFTTIFVLTDRNRNSAHQAQLAQPDFVTSTRFSHLEIPTHTIWLGACNHALPEDVFAKRIKSLLSLSVQDLTLNLGLVSGSGQGKVTSVYSLSGRPVWLGSGLIRLGDMYGDEEREVLVELKSPSSSRSQRIMTVRSRHVDPTTQEIKNYEDRALMIPRPTTVRSSDPSIARLRNLHVSTRAVAESRRLVEVNDYSGAERMLTSARALLVQYGLSSSDSCLRGLEAELADLNRLRGRHVAVKSPEPVVQKSEPLTPTSAWRAAERLAKVAIMRKHMNRVSDLHGFENARF

SEQ ID NO: 1295 - protein, 269 aa, Arabidopsis thaliana
  Clone ID: AT_F4B14.C1.p110.tg
MASSRFQSGFCPISSCPSLENFIERIKDACRFTLSAVLGTILSAVLTFFFALELRKLFPSSVGTLLGALTGALIGQETESGFIRGAAVGAISGAVFSIEIDVIVSLISGRLVRERIGPAMLSAVQTMRSPLIIFISLLTDQMGAVDSTFEELSSIFDTGGSKGLTGDLVDKIPKIKITGKNNLDASGNKDSCSVCLQVFCSFQLKRNLNSPNAEPKGLVLDLLLCNFLQDFQLGETVRSLPHCHHMFHLPCIDNWLFRHGSCPMCRRDL

SEQ ID NO: 1296 - protein, 299 aa, Arabidopsis thaliana
  Clone ID: AT_F4P12.C1.p110.tg
MGNVISGGSRPENHRDRTSPPYPNPNAQYQGNYPSPYQDCARYPYGEMASPVQYVEHQEAVTIRNDINLKKETLRLEPDEQNPGKFLLSFTFDASVPGSITVMFFAKEGKDCNLIATKEDLFPSTQVSFAKGLEQRFKQACGTGIDFSDMSEADLVEANETDVYHVAVKAEVVSEDDHPESGTPNRQITHVVLEKDHKGEYKARVVKQILWVNGNRYVLQEIYGIGNTVDDNGEDANERGKECVICLSEPRDTTVLPCRHMCMCSGCAKLLRFQTNLCPICRQPVDRLLEITVNNNDRN

SEQ ID NO: 1297 - protein, 460 aa, Arabidopsis thaliana
  Clone ID: AT_F22D1.C1.p50.tg
MSFFIEDSGLIVTQLLYKMAVLITVLRWILAWILRYRSRSRSTSSSTSACPSISSQAIKESLSVTTFRDAAERSPAMINDTCAVCLGDLEDGDEVRELRNCSHMFHRECIDRWLDYECCGGDENNEGEEDNHRTCPLCRTPLLAANTTSCGDWPTKNEPSWAVERLLYLFGDDLHEKFVRSLLSNSSSMAAIQILDQVDDSADSLIESMRGVQNTMALLHSTVGELLNSMSETLNSMAEMKSALLQQPTATATSESTKVTVDHDLPVAPPPPTKQSTAAEDNSIDTHPHRMSRYIQLMKPKIEMPVFEGPNVNSWLTRAERYFEFGSFTDAEKIQLVYMSVEGRALCWFNLENRNPFVDWNDFKARVLQRFGDPRSAMERLLTLKQVDSVISYLGEFEDLSTQCLDDLDTVLEVVFVKGLKEEIQEMLRVFQPKGLSDIIMMARRLENSPFCRLIKNSQV

SEQ ID NO: 1298 - protein, 213 aa, Arabidopsis thaliana
  Clone ID: AT_F15J5.C1.p80.tg
MEGTSTWILNYESKTHIVDHKNSGSFSISIQGIERILIRSPSGRETLAQQKSLGKKNATVRIASEIPPVFLTGEEICSIFVANVLSKSKINKWIQQSIVPKICEDLIDIRRHLEEEEKDGFLVEVEVVLETLYSDWLRVNDYDSQGCLIPIEEECIICLEELASSGSERRIMKLLCSHSFHKDCILPWLRCKRSCPTCRDDIHNRRAEEDHHE

SEQ ID NO: 1299 - protein, 233 aa, Arabidopsis thaliana
  Clone ID: AT_T24M8.C1.p4.tg
MTLESYAGDVHTVPQSENSMEERGGGELFVPPLNFAMVDNGIFRSGFPEPVSFSFLQSLRLKSIIYLCPEAYPEVNREFAKSNGIQVFQFGIERCKVRLVEPFVNIPDEVIREALQHRTGCLVGCVRKIQRWCLSSIFDEYQRFAAAKARISDQRFMELFDISNLKHTPLSFSCSKRGVNNDSVCCVCMGRKKGAAFIPCGHTFCRVCSREVWLNRGSCPLCNRPIIEILDIY

SEQ ID NO: 1300 - protein, 310 aa, Arabidopsis thaliana
  Clone ID: AT_T27A16.C1.p6.tg
MRGDSKQEGDEESKLTVSCANDVEGIRVRKRGDSREEEAKGFKSLNWNWDFQKLYRFVDELTSSDDYTPACALRVSMTLTTVIPPEQTEEAAPSDHAEEVDQVSLNEDLGLEVENDANFFYGESSSSQPGRGVPFYELPHLRYEHDVNFSYGEASSSQLGGFVPFHGLPYLGYEQDPNVFYGQSSPYQPQEVLFHWLPRYEHDFDHQTEEAFHPQFEQVLQASFNETNTARLKPASKLAVESLNRKTYKKASDVVGENEMCSICLEEFDDGRSIVALPCGHEFDDECALKWFETNHDCPLCRFKLPCEDQ

SEQ ID NO: 1301 - protein, 418 aa, Arabidopsis thaliana
  Clone ID: AT_K15E6.C1.p70.tg
MTTGLVTPGDVIGKATEFKAGKGAYVNDATIYASLTGTCRIVSPLPESIDQRAIVEVTGHKAHGPIPETGSVVIARVTKVMTKMAAVDILCVGSKAVRENFAGVIRQQDVRATEIDKVDMHQSFHAGDIVRAMLSLGDARAYYLSTAKNELGVVSAESAAGETMVPISWTEMQCPLSGQTEQRKVAKEEQEFCTKKREEGFWFTGAIDLFESYVNPNTSITRNCPCLNCFLQSFMDLYASLFSRGGMHPIPSTVETATVMNSTTALDDSLSSVYHSPPTPLPYDADPRYFRFVKGSSHSGEESEPLRGDTEMSSEALGDGGAKWSKSDSEDGSKEVYTKGSSTFTKSKTMPGIEVYYADSDDEDICPTCLDDYTLENPKIITKCSHHFHLSCIYEWMERSETCPVCGKVMAFDENETS

SEQ ID NO: 1302 - protein, 234 aa, Arabidopsis thaliana
  Clone ID: AT_T32F12.C1.p20.tg
MPVTVVLTGVLLFVIFAGFFSLFLWQFLLNRLFTTWNLQRTPYGDLIHVATPPENTGLDPFIIRSFPVFHYSSATKKNHGTECAICLSEFSDEDTVRLITVCRHPFHSNCIDLWFELHKTCPVCRCELDPGMIGSGRLESFHNTVTITIQDINHDEENPPTAGSSKRLIEASAWRFSRSHSTGHFMVKTTDANVKSKRRHYQTGSCVSFDELTRYEGAGWQWLGDSSHISRIEV

SEQ ID NO: 1303 - protein, 419 aa, Arabidopsis thaliana
  Clone ID: AT_T5C23.C1.p110.tg
MSSSSSTTTNTTTESDSSSLPTHIGRSNSDGIIDTTPFLPPTVTRTISVDEESNPIHRSARRQGLREAARFLRHAGSRRMMREPSMLVRETAAEQLEERQSDWAYSKPVVFLDILWNLAFVAIGVAVLILSRDEKPNMPLRVWVVGYGIQCWLHMACVCVEYRRRRRRRHPEDGGGSGLTNSSSQQYVSLAQLEDRGETSNPAKHLESANTMFSFIWWIIGFYWVSAGGQTLSSDSPQLYWLCIIFLGFDVFFVVFCVALACVIGLAVCCCLPCIIAILYAVADQEGASKNDIDQMPKFRFTKTGNVEKLSGKARGIMTECGTDSPIERSLSPEDAVQSHFHILIKLYILKVCKIDNAWLLMILQECCICLCEYEDGVELRELPCNHHFHCTCIDKWLHINSRCPLCKFNILKNANNEV

SEQ ID NO: 1304 - protein, 327 aa, Arabidopsis thaliana
  Clone ID: AT_T13D8.C1.p23.tg
MSLSQPITRTDSAPNGAFRTFGLYWCYHCDRMVRIASSNPSEIACPRCLRQFVVEIETRQRPRFTFNHATPPFDASPEARLLEALSLMFEPATIGRFGADPFLRARSRNILEPESRPRPQHRRRHSLDNVNNGGLPLPRRTYVILRPNNPTSPLGNIIAPPNQAPPRHVNSHDYFTGASSLEQLIEQLTQDDRPGPPPASEPTINSLPSVKITPQHLTNDMSQCTVCMEEFIVGGDATELPCKHIYHKDCIVPWLRLNNSCPICRRDLPLVNTVAESRERSNPIRQDMPERRRPRWMQLGNIWPFRARYQRVSPEETANQNPRDNRS

SEQ ID NO: 1305 - protein, 320 aa, Arabidopsis thaliana
  Clone ID: AT_MRG7.C1.p22.tg
MSDESPAFALHSGSSRQRKSLEFRFQQSPRWAPYSSASDGNEQKTSLVNNSLTRPNSSNPQCLNEENGFDRDSTAISTSFRSLLSLSESSVPWETPTNNQSSSLTHCSYPRVFCNPVSVCENPEPDHTQEDSSTNPGSSIMMSTRNHQGSPVEEEVSPNSSSNDMLLDVERSNDTEVANPRSEQGSMTHQRCGICKKLLSQKSPWSSYKILRSRDMPATGVFPCHHVYHVECLDKATPTAQTRDPSCPVCSNTIGVMEQPLIAPETLQMALRSLRRSRTALELETVRVPSNDNQRRHNTRRSHKWDKLSCCLNISFSSSS

SEQ ID NO: 1306 - protein, 214 aa, Arabidopsis thaliana
  Clone ID: AT_T3F17.C1.p19.tg
MSTLASSASVFLVHPPLPPSPPQAGNHSYLTTLGFGYSIAIALGFLVLLSTVLLSSYICCRDSRRRTTAVESTGDRGGSVILPRIIFVAEEDNEDLEAGDVVVGLDQAVINSYPKFHFSKDTSAASSDGFGGGGDTTCSICLCEYKEAEMLRMMPECKHYFHLCCLDAWLKLNGSCPVCRNSPLPTPTSTPLSTPLSEVVPLSQYAADRRRARR

SEQ ID NO: 1307 - protein, 204 aa, Arabidopsis thaliana
  Clone ID: AT_T26F17.C1.p12.tg
MEAEISFGGEIDLKPKSQDAGSFKICVSARRSDTSISLPPNFVLSYNDYEGVISSYPNDSKKLNDWLYSAGLSEQYVDIANSQLTERICKSISMVDSSVCATLVYMYCKVIVPPRIDSFDETTNNIELIRPANKLVVDRLARKVYNKKKKSNSDASVCTICLEEFEKGEIVVTLPCGHEFDDGCIGKWFLKDHVCPLCRFELPC

SEQ ID NO: 1308 - protein, 285 aa, Arabidopsis thaliana
  Clone ID: AT_F7K24.C1.p180.tg
MSSVTEIVSEQQVIDGIQDLALQNQLELILSMMLLLLCGNVYNVKLTVAEFATDIDKKKIQEEIHEPSFGNHGGCCAICLSEIPLQETAMVKGCEHTYCVTCILRWASCKESPTCPQCKHPFDFLSVHRALDGSIEDFLFEESVCLLLRASWFVPLDVVEQASYSHGYHDDFDIPYDYEDEDDDLDEFYLHGSSLRIGNRRWGGNGFVRSGRQEARPVQRYSGSGSSSSSSSGSSSSEPKDKQVKTTNTTGRRAKRAMKREAANKAAEVTAAAKHEAHLVRLGRK

SEQ ID NO: 1309 - protein, 194 aa, Arabidopsis thaliana
  Clone ID: AT_T4C9.C1.p30.tg
WKGTLSIRTKLKLKPVIISVENISEEIIEDQTTGRQTRRTQVSEPFLININLCSSSHDHIRTLLHDRLVGYPFWSYLCDDLATEISTAAIDLGFGRNGFTLTVDATVTYLTVSVTSDNERSLRMVLLGRIKTEELKSLKMETEPCSICLESLVSGPKPRDITRMTCSHVFHNGCLLEWLKRKNTCPLCRTELYD

SEQ ID NO: 1310 - protein, 349 aa, Arabidopsis thaliana
  Clone ID: AT_T17F15.C1.p100.tg
MSSVEPDMEDLFQEKKRVRNPLVPLGALMTAGVLTAGLISFRRGNSQLGQVLMRARVVVQGATVALMVGTGYYYGDNPWKKLLLSEIHETEALSPKSSSAATLTLMNQKDPSSSSIVSVLCLVISGLALIIVFLGVLYLIFKFLRKSSTLFPIPHFNYNPDLFSFSSPQLQHLFFLHDSGLDQTAIDALPVFLYGNVTISLEQPFDCAVCLNEFSDTDKLRLLPVCSHAFHLHCIDTWLLSNSTCPLCRRSLSTSNVCYNHSETLVAPLSGHQQVDDGKASLAKRVFSVRLGRFKSTNESQSQRHDVKDEIGVRMPRRCYSMGTQQYLVCDQDFVVALSSSPREGNIGR

SEQ ID NO: 1311 - protein, 676 aa, Arabidopsis thaliana
  Clone ID: AT_T5N23.C1.p140.tg
MVSKWKKMKLALSLNLCNYLPRTLEEEPPSLALNSAETLSDAALLSPLNWPMTPTPSSYRRRLSRSSSKSSKQTCSICLNKMKEGCGHAIFTAECSHMFHFHCIASNVKHGNQVCPVCRAKWKEIPIQKPSLDLPYYPFDRCNNDAAISLFRCLPPSQRAITQGHPEPATFDDDERLEEQIVFDGETEVLKKENRDYVRMMDMKVYPEVSAVPQSKSCENFDVLVHLKAVTGDQISQYRRAPIDLVTVLDISGSMGGTKLALLKRAMGFVIQNLGSSDRLSVIAFSSTARRLFPLTRMSDAGRQLALQAVNSLVANGGTNIVDGLRKGAKVMEDRLERNSVASIILLSDGRDTYTTNHPDPSYKVMLPQISVHSFGFGSDHDASVMHSVSEVSGGTFSFIESESVIQDALAQCIGGLLSVAVQELRVEIEGVSPNVRLSSIKAGSYSSLVTGDGHSGLVDLGDLYADEERDFLVSINIPVEEDGHTPLLKLRCLYINPLTKEITTLESHVLQIRRPEYVAEEKVVPIEVVRQRNRFLAAEAMAQARTLAEHGDLEAAVKAIENFRLVLAETVAAKSCDRFCVALDSELKEMQGRMRSSHMYEASGRAYILSGLSSHSWQRATARGNSRDSSSFVQAYQTPSMAEMLRRSQAMFLVSPSHHRLIQPLLSFASQPKPR

SEQ ID NO: 1312 - protein, 711 aa, Arabidopsis thaliana
  Clone ID: AT_F5D14.C1.p14.tg
MGCTVREKHVKPTRRIKAAAFRSDPPLCWVEKIAMSQSIVENLVYHPGLTDSGSVNLNSVTENPEENFWAYCTEEHLEEILLKHLEFLYNQAVSKLLELGYEERVALKAVLSNGHCYGELDVLTNIVNNSLSYLNSGGGGGGSNGNGEDRTETGFTDLRDLEEYSLAGMIYLLQQVKPNLSKGDAMWCLLMSELHVGRASTLDVPTNRSSCCTKEDSNVEDVGTGGTLDIAGFMAPALCRFHGGWGFGNGGGPEFSGNGFSMKGAELKLQREIDCPKRFNLSPSMKSLLKRNVAAFAAGYRASMKQKQIQSSDTIGDSKACNDPAIVKSCGQQPRKSGSEESVSTVLEKFRDLNLDDNLESVGVDDKDCVIVDLLHQVKDFEKKVKERKEWAQKNAMQAAQKVSEELAELKTLSSEREGIQLLKKGKQAVEESTAKRFTDKEIELRKACSQNDRANVIVRKLENQNAEIRAEREGSKLSASESLKACMEASKKEKKCLKKLVAWEKQILKLQDEITAEKEKIKALYKTLAQITEYEKEIEAKWRQEQKAKEEALAQMEEEQRSKEAAEGHNKRKLETLRLKIELDFQRHKDDHQRLEQELGRLKASSDSDSSHISNNAWKPKKSQGENIAKLLEEIDKLEGSYDNEANYDRECIICMKDEVSVVFLPCAHQVVCGSCSDSFFASNNGGSKVTCPCCRGLVQQRIRIFGATS

SEQ ID NO: 1313 - protein, 369 aa, Arabidopsis thaliana
  Clone ID: AT_T23E23.C1.p16.tg
MSERRIHYSQLKNDNLNQISPSSAPSPITLNHQLTDSSSSSSSGGNNRISPIILFIIVLLSVIFFICSILHLLVRYYLKKKRSNLSSSPNESNQNPEFSDSDTYQRQLQQLFHLHDSGLDQALIDALPVFLYKEIKGTKEPFDCAVCLCEFSEDDKLRLLPNCSHAFHIDCIDTWLLSNSTCPLCRGTLFSLGHQFEYPDFNFGFFAGDDGGGGVRVSPVQKPAENEIGKRVFSVRLGKFRSSNIVNNGEVVVGGGGETSSSSLDNRRCFSMGSYQYIVAESDLVVALCPNNEGLKNNKDVEGKKINMRSKGESFSVSKIWQWSNKRSKFPNNHPSETNLVVGGSSSSSSYVCSGSDGLSLNGRRFQGP

SEQ ID NO: 1314 - protein, 277 aa, Arabidopsis thaliana
  Clone ID: AT_F17P19.C1.p3.tg
MSRLVNQSSVDENIAVYLQNELSELTVNDYAIGREIQQQYQNKSICNDAAIALEIQKEEEACVHSCLHDDEGLARTLQDLEANLQPSLSDDEKLARYLQEHDELANNTEDDIQETHHHQYHPMQVNRSYIPQRDAPSSSRAIFHYDDGENFSGRYTHTHSPSSISHNPTDDENNDPENMTYEELTELGDSVGDVGKGLSQERISRLRTHKYGTKTKSWYCLHMKKKFVADDSQCSICLMEYAKGDKITTLPCMLHLQGRGLSIILNLVGPTIYNVRF

SEQ ID NO: 1315 - protein, 411 aa, Arabidopsis thaliana
  Clone ID: AT_K13E13.C1.p3.tg
MRFVAPPPRSGDNSPSPSPSSGISEEILSRSSDPPLEFSPPLIAMVVVLAAAFLFVTYSRLISRRFLSPLFRRFRRWRCRRRRLLHLSSASSASTSSSDLRSFSPFPFDSFHYSSYSPYGLDDSVIKTLPLFLYSAAACTGKPAVGKTSAANCRDCAVCLLEFEEGDYVRTLPLCFHAFHLECIDEWLRSHPNCPLCRTAILGSAGVLTPMSPFVPLMAPRIRPSLDDEENNAIIIRGEITPSRSNWNTIAADTTNDQEIRASVEEQSSPAISRFRELKRSYSFECERESESERVTMEPATVSPWRYRRSTWNKRQSPFGNLISKSRVFSFRYYRSTKSPFFRRRSSAGVFYPISERIPATGSSSRRTKSMTSPMFFRTAPHSSSRLRCGDPEALLSPERWRRRDTCRAEM

SEQ ID NO: 1316 - protein, 151 aa, Arabidopsis thaliana
  Clone ID: AT_T14G11.C1.p12.tg
MGFNDPSLNTIILWFASVTSLVTISVIFALLIICLLKRRRFDVSPETENENQGRREPRCQGLSASVIAAFPTFSYKPDNNDPESNNQEIECPVCLGLIPKNVVIKVLPNCMHMFDEECIGKWLESHATCPVCRRLAEPMTSNGDKVLERIV

SEQ ID NO: 1317 - protein, 899 aa, Arabidopsis thaliana
  Clone ID: AT_F7A10.C1.p17.tg
MENQESDEPMQKKPHLLDSVSPNSMARNSSPSHPIAKSVSFFDCDFSLLCLRLVDYEIDVDATVLQLQNQKLVQQLDLQKKQLYDVESKIQELQLNQTSYDDELISVNQLWNQLVDDLILLGVRAGANQEALNYLDIVDKKRVPPCAADETFLCRLLQVDSLDTSKSDEVVRKVEEALALRHSSTMELMGLFENTIDTQKTKAESISQSLHAVKSTEDATIQLSSINDLMKEESKNLREMIDALHVRHKEHSEQIQAYISSHSTDQSELKHLKGQLEEIKAELEENRRKLITLKMQKDAACEGHVTSPAIANGSLSPEKPVDKTKLRELKDSIDEIKIMAEGRLSELQASQEYNLSLSRQCQDIENELKDDQYIYSSRLYSLINDRIHHWNAELDRYKILTEAIQAERSFVMRRDKELNLRAESLEAANHKTTTVGSRIEVLEKKLQSCIIEKNGLELETEEAIQDSERQDIKSEFIAMASTLSKEMEMMEAQLKRWKDTAQDALYLREQAQSLRVSLSNKADEQKGLEDKCAKQMAEIKSLKALIEKLLKEKLQLQNLASICTRECNDDRGLAEIKDSQRKAQAQAEELKNVLDEHFLELRVKAAHETESACQERLATAKAEIAELRTQLDLSEREVLELKEGIKVKEQEAEASIAEMETIGQAYEDMQTQNQHLLQQVAERDDYNIKLVSESVKTKHAYNTHLSEKQVMEKQLHQVNASVENFKARIAHNEEQMKGCFSEAYKLIQEDRHLVISLETTKWEVADADKEFRWLKSAVSSSEKEYEQISRRTDDIKLELDDEREKKKLEEELMELNKELEELGSESVEAAIVRLQEEVKNCKNILKCGVCFDRPKEVVIVKCYHLFCQQCIQRSLEIRHRKCPGCGTAFGQNDVRLVKM

SEQ ID NO: 1318 - protein, 211 aa, Arabidopsis thaliana
  Clone ID: AT_MZN14.C1.p8.tg
METESFKLDVHVQALSQDQSLGFVSTVLISQYREVEEFLINEKDDTVTSLGSYPEDSSTSHDPLISLKLPSFKPNDVYQRLQTHLHDHDLSEQLSYKIVQAQQRQKRQSFYLPQQRPLFMIVSVKLTHKVYNVVSCDSAPLATDFDQESQQEEEEESKTCAICLENLLRSEDYCEMPTCSHYFHEPCLTEWLTRDNNSCPLCRKPVDKLHS

SEQ ID NO: 1319 - protein, 255 aa, Arabidopsis thaliana
  Clone ID: AT_F25A4.C1.p27.tg
METVHGQHPSYRDPHSLIFGCNHYKRNCKLLAPCCDKLFTCIRCHDEEADHSVDRKQITKMMCMKCLLIQPIGANCSNTSCKSSMGKYFCKICKLYDDERKIYHCPYCNLCRVGKGLGIDYFHCMKCNACMSRTLVEHVCREKCLEDNCPICHEYIFTSSSPVKALPCGHLMHSTCFQEYTCSHYTCPVCSKSLGDMQVYFKMLDALLAEEKMPDEYSNKTQVILCNDCGRKGNAPYHWLYHKCTTCGSYNSRLL

SEQ ID NO: 1320 - protein, 464 aa, Arabidopsis thaliana
  Clone ID: AT_T15N24.C1.p30.tg
MEDKLDVLIMGELKLELVELRHYFPSSPLFDSITKLSEGREGEREERWRCLTKKKTRIDKAAAVAVGVLLRRQKTKVVRFYRPTSEDKVFDENASLIYPSMSFFLHLKLYSVSLCSCSGDQIKDLSVSDMSTRYSSQLQSSAINSITVSSSSSFASTQLDDNTHTAPESSPSSSFFMRLAMRVSRARWFIFLRRVFHYQNASRSDLGTNPFNSIAWMVSELIALLLQITVITSTLALSKNERPVWPMRLWITGYNVGCLLNLMLLYGRYRQQDTSHENAFSFGDIEQQQRSREETTRCSHLMNKCRTSLELFFAIWFVIGNVWVFDSRFGSFHYAPILHVLCISLLAWNALCYSFPFLLFLLLCCVVPLVSSFLGYNMNVGSSEKGASDDQISSLPSWKYKLIDETSDSSQANNDPECCICLAKYKEKEEVRKLPCSHRFHLKCVDQWLRIISCCPLCKQDLPN

SEQ ID NO: 1321 - protein, 427 aa, Arabidopsis thaliana
  Clone ID: AT_F11M21.C1.p30.tg
MPSLKSFSAAEEEDDQLGRNSEAERFNPEAVEKEEDPDKMDEKDESGDEEDDVKRDQVEAEDEEALGEEEDSKERSQSSSAGELSESEYMVVDLADICKDVQCSICLGIIRKTRTVMECLHRFCRECIDKSMRLGNNECPTCRKHCASRRSLRDDPNFDALIAALFKNIDKFEEEELNFRQDDEARNKQIQASIAQVSQRQSKALVKRKSVGKGTAILSRSRRSGGGSRRRRNCRNIEQDTSEANDDDDQNKRGKDSSSDEPCERQRKKRSATQPSSSNANNNDNCAGNGTEQTHQRDSRVISPVLVWNSELIAWGRGGTRSNTRQGNNNQGAISKRNARLKRLVEYLGSLEGNSVEYVARHLKLKAEEVELLVSKDGDTVIGNKTSTEKMQSLQDDETVAKLKVDCISSNGYMVLSLILVSIIRLF

SEQ ID NO: 1322 - protein, 310 aa, Arabidopsis thaliana
  Clone ID: AT_K2A18.C1.p24.tg
MRLVVSSCLLVAAPFLSSLLRVSLATVVLNSISASFADLPAKFDGSVTKNGICGALYVADPLDGCSPLLHAAASNWTQHRTTKFALIIRGECSFEDKLLNAQNSGFQAVIVYDNIDNEDLIVMKVNPQDITVDAVFVSNVAGEILRKYARGRDGECCLNPPDRGSAWTVLAISFFSLLLIVTFLLIAFFAPRHWTQWRGRHTRTIRLDAKLVHTLPCFTFTDSAHHKAGETCAICLEDYRFGESLRLLPCQHAFHLNCIDSWLTKWGTSCPVCKHDIRTETMSSEVHKRESPRTDTSTSRFAFAQSSQSR

SEQ ID NO: 1323 - protein, 393 aa, Arabidopsis thaliana
  Clone ID: AT_F11M21.C1.p28.tg
MDVVCTEHQMRKPTVEIPPRKLLLSSKSFPSDSSSPRSPRKHNWNKSNKITSEHEEDNEDNNRENKEYCYDSDSDDPYASDHFRMFEFKIRRCTRSRSHDWTDCPFAHPGEKARRRDPRRFQYSGEVCPEFRRGGDCSRGDDCEFAHGVFECWLHPIRYRTEACKDGKHCKRKVCFFAHSPRQLRVLPPENVSGVSASPSPAAKNPCCLFCSSSPTSTLLGNLSHLSRSPSLSPPMSPANKAAAFSRLRNRAASAVSAAAAAGSMNYKDVLSELVNSLDSMSLAEALQASSSSPVTTPVSAAAAAFASSCGLSNQRLHLQQQQPSSPLQFALSPSTPSYLTNSPQANFFSDDFTPRRRQMNDFTAMTAVRENTNIEDGSCGDPDLGWVNDLLT

SEQ ID NO: 1324 - protein, 352 aa, Arabidopsis thaliana
  Clone ID: AT_F13I12.C1.p170.tg
MNPLTQVKNLQKINARESDLGISDEASWHAKYKNSAYVYVGGIPFDLTEGDLLAVFSQYGEIVDVNLIRDKGTGKSKGFAFLAYEDQRSTILAVDNLNGALVLGRTIKVDHCGAYKKHEEEDEETRRQNREARGVCRAFQRGECTRGDSCKFSHDEKRAANTGWGHEEDRSSKWDHDKNREGRGVCRAFQRGECTRGDSCKFSHDEKRAATTGWGHEEDRSSKWDQDKLNGAKKGGTSFGNRGDFKPDVEEKSYRGRGDGDASYGRPKERERVDREDMGPRSRDAYDMKEQKRSGRYDNAYSRRHNDEIDYVREDKGSRAQDWEKRKAESRRDRNDREEKDRDSLRREDRRR

SEQ ID NO: 1325 - protein, 363 aa, Arabidopsis thaliana
  Clone ID: AT_MOJ9.C1.p23.tg
MSHRDHGADGWESADFPITCESCFGDNPYMRMTRADYDKECKICSRPFTAFRWRPGRNARFKKTEICQTCSKLKNVCQVCLLDLGFGLPVQVRDSALNINSHYSVPMSHVNREYFADEHDPKTRAGLDYESSFGKMQPNDTILKLQRRTPSYEKNRPKICSFYTIGQCKRGAECSFRHEMPETGELSHQNIRDRYYSVNDPVAMKLLRKAGEMGTLEPPEDESIKTLYVGGLNSRIFEQDIHDHFYAYGEMESIRVMAEDGKYDQSGSNQQQQGSIAHTGLISQQQNQHSQMQQYYMQPPPPNEYSHYPSMDTQRMGAAFSTQESDGSSTSENNRAYSSYSYPMPPHQPYPTPPPYIDIYIYI

SEQ ID NO: 1326 - protein, 593 aa, Arabidopsis thaliana
  Clone ID: AT_MHM17.C1.p1.tg
MAPRILLCGDPLGRLNQLFKRVQSVSKSAGPFDALICVGQFFPDSPEILDEFLDYVEGRAQVPIPTYFTGDYGVVAPKILSTTSKKAENQGFKMDGLEVCHNLFWLRGSGKFSLHGLSVAYLSGRQSSESQFGKYSQDDVDALRALAEEPGGCITNEWPAGVTNRAAVSDIPVGISDSSCSDSTVSELVMEVKPRYHIAGSMGVFYAREPYLNAESTHVTRFIGLAQVGNKNKQKFLHALSPTPTSTMSPAELSAKPPKTTLWPYNLQDGAAESKKRPNDSDSDSQYWRYDVPKRQKSGSQGEKLCFKFVCSGSCPRGEDCHFQHNAEAREQCRRGVCLDLIIKGKCEKGPECSYKHEFQDESSIQRKPRSENANRSKECWFCLSSPSVESHLIVSVGESFYCALPKGSLVEDHILIIPIEHLPNTLVLSPEVESELSRYQNGLRNCYKSQGNDAVFFELVSKRVSHANLQVVPVPSSRARLLPNIFSLAAEKLGFKLVTKKFNDSTDGRKYLQKEYNAALGLFYVELPDGTVLSHTLEENEVFPAQFGREVLAGLLKIPDRADWRNCKISQEEEAKLAEDFKKQFQEFDPCQ

SEQ ID NO: 1327 - protein, 381 aa, Arabidopsis thaliana
  Clone ID: AT_K9L2.C1.p1.tg
MDVEHHKSGHISRPTVDIPPRKLLSSAKSPSSVSSPLRDYKEQKDYCYDSDSEDPYAGDHFRMYEFKIRRCTRSRSHDWTDCPFSHPGEKARRRDPRRFHYTGEVCPEFSRHGDCSRGDECGFAHGVFECWLHPSRYRTEACKDGKHCKRKVCFFAHSPRQLRVLPPSPENHISGGCGGSPSSSPASVLSNKNNRCCLFCSHSPTSTLLNLSRSPSSSPPLSPADKADAFSRLSRRRTAVLNELISSLDSLSLTEALAASSSSPVTMPISTATMIASSNLSSNHHHHRLPPWLDVGDRDLQLQQSSPLRFALSPSSTPSYLHGQLQPPPSSFFGDEFTPRGGRLSDFSVAAAAAAQARDKNSFEVGSSGDLDLGWVNDLLT

SEQ ID NO: 1328 - protein, 371 aa, Arabidopsis thaliana
  Clone ID: AT_F11A3.C1.p17.tg
MPPKQQPKADLAKKQKQVEDKTFGLKNKNKSKNVQKYVQSLKQSVQPKPDATKAAAKKKKEEEKAREQELNELFKVAISQPKVPVGVDPKSILCEFFKAGQCQKGFKCKFSHDLNIQRKGEKIDIYSDTRDEDGDMDEWDQETLEKVVESKKNEYNQNKPTDIVCKYFLDAVEKKQYGWFWSCPNGGKECHYRHALPPGYVLKSQMKALLEEESSKKLAVEDEIENERAKLQTATQMTPALFMEWKRKKIAERDAGLAASQAERAKNDRMSGRELFLSNASLFVDDAEACEEYEREREQEETEQKAKNKEAEAGTSKSSGDAEQSSKEVNEEEEDDDDDDDDLDMDELDELEASLSKTSIQIREPNDEGSS

SEQ ID NO: 1329 - protein, 497 aa, Arabidopsis thaliana
  Clone ID: AT_F27C12.C1.p25.tg
MASEENNDLENLLDIQLIEQKESLSSIDEALLSDPSNPELLSVHEELLSAIKEVEEGLLHLKRARLLEEADIVLNGLNHDAGVKPEHLEPEKTEEKKDLDGSKCRFRHTDGRWYNGRIIGFEGSDSAKISFLTPTSESMMICKFFMQQRCRFGSSCRSSHGLDVPISSLKNYEQTEWKQLMVGSKIWAVSGSKYDIWRKAELESWDDELQVGGVVFRDDKSSAKLGSDSLALSEYAQMTDDDGEEEEEEDEQQSASDSEDSVSSDYDEGSPQGIGFLESTNLPRGVQTDTALFAKWENHTRGIASKMMASMGYREGMGLGVSGQGILNPILVKVLPAKRSLDYALEHIRNGECKSEKQKKKRSRGGKRKRGKKFAEAAKAAKQEEESKPDLFSLINEQIFPTRHEKVHSESVKNRQNKGPVDRKALVEYQDEVRDLKLEMLKLEQMVNRNKKDLVVSEAATRRLKEVRKALASTLACQAAASNAIVSKENEKKWLKF

SEQ ID NO: 1330 - protein, 437 aa, Arabidopsis thaliana
  Clone ID: AT_MSG15.C1.p6.tg
MDFDLNGGNKRVFNRLGGGGGSTRPMAPTDTRQKVCFHWRAGRCNRSPCPYLHRELPGPGPGQGQGPGYTNKRVAEESGFAGPSHRRGPGFNGNSSSSWGRFGGNRTVTKTEKVCNFWVDGNCTYGDKCRYLHCWSKGESFALLTQLDGHEKLVSGIALPSGSDKLYTGSKDETLRVWDCASGQCTGVLKLGGEIGCVLSEGPWLLVGMPNLVKAWNIETNADQSLSGPVGQVYSLVVGTDLLFAGTQDGSILAWRYNAATNCFEPSASLTGHTLAVVTLYVGANRLYSGSMDKTIKVWSLDNLQCIQTLTDHSSVVMSLICWDQFLLSCSLDNTVKIWAAIEGGNLEVTYTHKEEHGVLALCGVHDAEAKPVLLCACNDNTLRLYDLPSFTERGKIFAKQEIRAIQIGPGGIFFTGDGTGQVKVWKWCTEPTAALP

SEQ ID NO: 1331 - protein, 472 aa, Arabidopsis thaliana
  Clone ID: AT_MHK7.C1.p11.tg
MGHQSSWMKQTVIDSVVQSSKVGVFSMFSMDYKAPRKYSHGRNFGVARQQDFAADIVTRRPYAPYDNGMKKGPNKLSRNLVWTSKEYKSPEGNRPRQNAANGSAKPQVIGTGHRVSNQPRKNAVYGPRSSSLSDTRGCGPRLNGSPKKSVCNFWKDGNCKKGEKCQFLHSWSCFPGLAMVAALEGHKNDIKGIALPQGSDKLFSVSGDGTLLIWDCNSGQCVRSINLQAEAGSLISEGPWVFLGLPNAVKAFNVQNSKDVHLEGVVGQVHAMTAANGMLFAGTSSGSILVWKATDSESDPFKYLTSLEGHHSGEVTCFVVGGEVLYSGSVDKTIKVWDLNTLQCRMTLKQHIGTVTSLLCWDKCLISSSLDGTIKLWACSENESLKVVQTRKQELSVHTLCGMHDAEAKPIMFCSYQNGAVGIFDLPSFEERGKMFSTQTICTLTIGPGGLLFSGDKSGNLRVWSLASGTKV

SEQ ID NO: 1332 - protein, 536 aa, Arabidopsis thaliana
  Clone ID: AT_F5G3.C1.p6.tg
MNFTESMNVVHARIQQLEPENAAKIFGYLLLMQENGNRDMIRLAFCPDSVMCSVINCVKYELARNSHHYHSPPSDHIPTPKFGSFTGSSPLSVSVSPPMKTGFWENSTEMDTLQNNLQFLNFEDPLTSPEFSNGFFSQERQCLPLRTSRRSPSLPEFPVKICHYFNKGFCKHGNNCRYFHGQIIPERESFAQMFNPNNNLSDEEHVVSPVSLEKLEGEIIELLKLRRGAPISIASLPMMYYEKYGRTLQAEGYLTESQRHGKAGYSLTKLLARLKNTIRLVDRPHGQHSVILAEDASKFVEYTGERNEHGAILAGSRQIYLTFPAESSFTEHDVSIYFTSYGHVEDVRIPCQQKRMYGFVTFASSETVKHILAKGNPHFICNARVLVKPYREKSRSSRYLDNYKPLHGMRYGSKFIERDIEMNTLPPRVSESSRMRKPFLSEPEQSVSKSLPTNYSYLGFSSDDFKLTSNAEQEEQAERLSYLLDYLNTEDNVMNITTNYRDNDRRTHCESLDSQVLNLPESPFSSLSGKEISTVT

SEQ ID NO: 1333 - protein, 240 aa, Arabidopsis thaliana
  Clone ID: AT_MPH15.C1.p13.tg
MDARKRGRPEAAASHNSNGGFKRSKQEMESISTGLGSKSKPCTKFFSTSGCPFGDNCHFLHYVPGGYNAAAQMTNLRPPVSQVSRNMQGSGGPGGRFSGRGDPGSGPVSIFGASTSKISVDASLAGAIIGKGGIHSKQICRETGAKLSIKDHERDPNLKIIELEGTFEQINVASGMVRELIGRLGSVKKPQGIGGPEGKPHPGSNYKTKICDRYSKGNCTYGDRCHFAHGESELRRSGIA

SEQ ID NO: 1334 - protein, 317 aa, Arabidopsis thaliana
  Clone ID: AT_MBK21.C1.p4.tg
MQTRTCKFGESCRFDHPIWVPEGGIPDWKEAPVVPNEEYPERPGEPDCPVSVETQDSLPERPSEPMCTFYMKTGKCKFGLSCKFHHPKDIQLPSSSQDIGSSVGLTSEPDATNNPHVTFTPALYHNSKGLPVRSGEVDCPFYLKTGSCKYGATCRYNHPERTAFIPQAAGVNYSLVSSNTANLNLGLVTPATSFYQTLTQPTLGVISATYPQRPGQSECDYYMKTGECKFGERCKFHHPADRLSAMTKQAPQQPNVKLSLAGYPRREGALNCPYYMKTGTCKYGATCKFDHPPPGEVMAKTTSEADAAGATNTDTTQ

SEQ ID NO: 1335 - protein, 296 aa, Arabidopsis thaliana
  Clone ID: AT_T22C5.C1.p2.tg
MAEHLASIFGTEKDRVNCPFYFKIGACRHGDRCSRLHNRPTISPTLLLSNMYQRPDMITPGVDAQGQPLDPRKIQEHFEDFFEDLFEELGKFGEIESLNICDNLADHMIGNVYVQFKEEDQAAAALQALQGRFYSGRPIIADFSPVTDFREATCRQYEENNCNRGGYCNFMHVKLVSRELRRKLFGRYRRSYRRGSRSRSRSRSISPRNKRDNDRRDPSHREFSHRDRDREFYRHGSGKRSSERSERQERDGSRGRRQASPKRGGSPGGGREGSEERRARIEQWNREREEKEEGGA

SEQ ID NO: 1336 - protein, 850 aa, Arabidopsis thaliana
  Clone ID: AT_T1B3.C1.p3.tg
METSSIEINELPLATKTQTPPASVEPIPMETSSIDELPSSDSNATDNIEAVGEKRKRADEDEKTNLESSDTKITTPSPWWKTSLCSYFRREASCSHGNECKYAHGEAELRMKPDNTWDPTSERGKKAKAMKMSEHEEKEEDEVLFTEQMMESIDGDEGGGGSVSVVDLSLSKCLVHLPNKWQSDELKKFLGEQGVLYKSAKKRRGMIVGFVTFENAEQLQSGVERMLYRNVFNVLQILDGKTVNSSNLKIADVLPRTFDKNDARKSVKSARDAVTPLAYLSYADQLEQKKTSIGQMLKKLVRSFVFLFELVRGMRVKLVQMGIHFHNGSLHRETEGIIESPITNGYRNKCEFSVGLSLQGKPTVGFSLGSFCAGVTAVEEPVDCPNVSKIASQYASIFQKFIENSKFQVWNRFQHSGFWRQLTVREGRKPGVFSNDEDAITRIAEVMLMVQVCVLNGKVATEFEELAKAFAEGARASSPTLPLTVLVVQNHSGISNVAPPDAPLQVLAIPISDNGTDQEQTTNVLTEARIHDHINNLRFSISPTAFFQVNTVTAEKLYSIAGDWADLGPDTLLFDVCCGTGTIGLTLAHRVGMVIGIEMNASAVADAERNATINGISNCKFICSKACILTVTYFVVGSIVLICLHGSSVGFVVQAEDVMSSLLKQYLDVTQMEEAKPLSNANDDLNKQIPSTEEMTNSEHVADQNLPPSNTQVEELQDNEQKDSSSLEPEKTTKPQFKNVVAIVDPPRSGLHPAVIKALRTHPRLKRLVYISCNPETLVANAIELCTPSFDEPDRGNKNYRGRKKIGIAALARHRAKSMPTSEAFRPVKAMAVDLFPHTDHCEMVMLLER

SEQ ID NO: 1337 - protein, 757 aa, Arabidopsis thaliana
  Clone ID: AT_F14N23.C1.p20.tg
MEQANEKEEEERHEEAAGEKESFEESKEKAAEMSRKEKRKAMKKLKRKQVRKEIAAKEREEAKAKLNDPAEQERLKAIEEEDARRREKELKDFEESERAWREAMEIKRKKEEEEEAKREEEERRWKDLEELRKLEASGNDECGEDEDGEYEYIEEGPPEIIFQGNEIILKKNKVRVPKKSVVQVDGHESSNAEFVLQISDRPTSNPLPPGSEASANYQNVSSAQQILESVAQEVPNFGTEQDKAHCPFHLKTGACRFGQRCSRVHFYPNKSCTLLMKNMYNGPGITWEQDEGLEYTDEEAELCYEEFYEDVHTEFLKYGELVNFKVCRNGSFHLKGNVYVHYRSLESAILAYQSINGRYFAGKQVNCEFVNISRWKVAICGEYMKSRLKTCSRGSACNFIHCFRNPGGDYEWADHDRPPPRFWIHKMTSLFGYSDEKHMEHESSGSLNDSISDLSTDSHRQPSRRSRSRDHDHANVGSTPSYRSRKYHGDTQDSTREDKLRRHAENCHDGDDSPSRDGSLEREMYKERRYAKDTLHRDSRWSEHSPGHRVGRKRIHGRYSDDDSADGDDYGRRGTGHKRKPRRGTDSGVQEQMDNEKDRKTHRSSRKHSREGSSADKEEGHEHDRVHTVSDKSHRERSKHRHERSSSRYSHEEDSTESRHHQHKESDKKRSVETSPVGYQSDKDRDRSKQRQRYKSDDPESDQSRKGKRQSEENSDRETHKERRHRHRKRRRTQNSDDQNPKESEEVEEEIERWRPV

SEQ ID NO: 1338 - protein, 553 aa, Arabidopsis thaliana
  Clone ID: AT_F17A22.C1.p24.tg
MTDVSPLSDQTTLLPELASEVRKLSVCHMLATRALSPPKDLTVILVGNYLVRGVFTSIFFTVHQIPKFKDMYARNPPLNGSQSAQAPDWTPADADTGLQGLACALILSNWLGSDSYPERPGAPDCAYYMRTGVCGYGNRCRYNHPRDRASVEATVRATGQYPERFGEPPCQFYLKTGTCKFGASCKFHHPKNAGGSMSHVPLNIYGYPVREGDNECSYYLKTGQCKFGITCKFHHPQPAGTTVPPPPASAPQFYPSVQSLMPDQYGGPSSSLRVARTLLPGSYMQGAYGPMLLTPGVVPIPGWSPYSSLTVSLLLLLQAPVSPALSPGAQHAVGATSLYGVTQLTSTTPSLPGVYPSLSSPTGVIQKEQAFPERPGEPECQYYLKTGDCKFGTSCKFHHPRDRVPPRANCVLSPIGLPLRPGVQRCTFYVQNGFCKFGSTCKFDHPMGTIRYNPSASSLADAPVAPYPVSSLLGALAAAPSSSSTELIAGGAKDAYMTGVPTSRSTSNISAGLIFSQSGGSIPFSELQLSSQSSLPLTGSRITRQGREIRRSF

SEQ ID NO: 1339 - protein, 310 aa, Arabidopsis thaliana
  Clone ID: AT_F4N21.C1.p6.tg
MEKLAASTVTDLACVTAINSSPPPLSPISEQSFNNKHQEEFAASFASLYNSIFSPESLSPSPPSSSSPPSRVDTTTEHRLLQAKLILEYDELNEHYELCLNRLQSLMTELDSLRHENDSLRFENSDLLKLIRISTSSSSSVSPPAPIHNRQFRHQISDSRSAKRNNQERNSLPKSISVRSQGYLKINHGFEASDLQTSQLSSNSVSSSQKVCVVQTKGEREALELEVYRQGMMKTELCNKWQETGACCYGDNCQFAHGIDELRPVIRHPRYKTEVCRMMVTGAMCPYGHRCHFRHSLTDQERMMMMMLTR

SEQ ID NO: 1340 - protein, 448 aa, Arabidopsis thaliana
  Clone ID: AT_T29H11.C1.p40.tg
MVNSEEIADGFEPKPVSRSYSGDSSHDRSLSDLNHAAEDLSDKLKNVGLNEVTKEQSEKMMSVSESNGGLDSNAVVTINQEEEEEEEDRDGYGYGDGWSENESENVYPVRPGAEDCSFYMRTGSCKFGSSCKFNHPLARKFQIARDNKVREKEDDGGKLGLIDCKYYFRTGGCKYGETCRFNHTIPKSGLASAPELNFLGLPLRPGEVECPYYMRNGSCKYGAECKFNHPDPTTIGGTDSPSFRGNNGVSIGTFSPKATFQASSTSWSSPRHVNGTSPFIPVMLSQTHGVTSQNPEWNGYQASVYSSERGVFSPSTTYLMNNSSAETSMLLSQYRHQMPAEEFPERPDQPECSYYMKTGDCKFKFNCKYHHPKNRLPKLPPYALNDKGLPLRPDQNICTYYSRYGICKFGPACRFDHSVQPPYSTESSQAIVEPPQVSANGNESDGWN

SEQ ID NO: 1341 - protein, 248 aa, Arabidopsis thaliana
  Clone ID: AT_T21B14.C1.p106.tg
MDTRKRGRPEAGSFNSNGGGYKKSKQEMESYSTGLGSKSKPCTKFFSTSGCPFGENCHFLHYVPGGYNAVSQMTNMGPPIPQVSRNMQGSGNGGRFSGRGESGPGHVSNFGDSATARFSVDASLAGAIIGKGGVSSKQICRQTGVKLSIQDHERDPNLKNIVLEGTLEQISEASAMVKDLIGRLNSAAKKPPGGGLGGGGGMGSEGKPHPGSNFKTKICERFSKGNCTFGDRCHFAHGEAELRKSGIV

SEQ ID NO: 1342 - protein, 180 aa, Arabidopsis thaliana
  Clone ID: AT_T32F12.C1.p19.tg
MSHRRDYGSDAVHVRITHDPPPENCFPNSGDSSVWATEDDYSRVWAINSDGAESPSKKTRSSSSSEIGKSFFKTKLCFKFRAGTCPYSASSCHFAHSAEELRLPPPPPPNWQETVTEASRNRESFAVSLGPRGNVAQTLKSPNWKTRICNKWQTTGYCPFGSHCHFAHGPSGKATAFFIY

SEQ ID NO: 1343 - protein, 437 aa, Arabidopsis thaliana
  Clone ID: AT_F24P17.C1.p12.tg
MRVFVAPMWRLGLSGGGGGGGGGESYPERPDEPDCIYYLRTGVCGYGSRCRFNHPRDRGAVIGGVRGEAGALPERMGHPVCQHFMRTGTCKFGASCKYHHPRQGGGGGSVAPVSLSYLGYPLRPGEKECSYYLRTGQCKFGLTCRFNHPVPLAVQGPPQQPQQQQPQPQPQLQTIYPTLQSQSIPSSQQYGLVLTRPSFLTGSYLQSPYGPPMVLPPGMVPYSGWNPYQASLSAMPSPGTQPSIGSSSIYGLTPLSPSATAYTGTYQSVPSSNSTSKEFPQRPDQPECQYFMRTGDCKFGSSCRYHHPVDAVPPKTGIVLSSIGLPLRPGVAQCTHFAQHGICKFGPACKFDHSMSSSLSYSPSASSLTDMPVAPYPIGSSSLSGSSAPVSSSNEPTKEAVTPAVSSMVSGLSRPEPAETSGDSASVSGSIEAKTSS

SEQ ID NO: 1344 - protein, 415 aa, Arabidopsis thaliana
  Clone ID: AT_MLD14.C1.p8.tg
MDSSYSDSRPMFVQSPYGGWNQTQMIDSMANPMNNEQGDLHSLSESQSQSQPSQQLQPALKRPRLVDDNLFNPASSFPQPSSSNPWMVPSLNPPPVNKGTANIFYKTRMCAKFRAGTCRNGELCNFAHGIEDLRQPPSNWQEIVGPPPAGQDRERERERERERERPSLAPVVNNNWEDDQKIILRMKLCRKFCFGEECPYGDRCNFIHEDLSKFREDSGKLRESSVISVGATAADQPSDTASNLIEVNRQGSIPVPAPMNNGGVVKTVYWKTRLCMKFDITGQCPFGDKCHFAHGQAVLCIQAISEFSSFDRHLFDLDLVVDYEIAELHNSVGRVEGEAMNAVASVNKQAVVPANEAFAMKPITQVTADSSGLNEEGRRKKCLLKWSDSKKINRIYGDWIDDLPVGQKSTKPVES

SEQ ID NO: 1345 - protein, 453 aa, Arabidopsis thaliana
  Clone ID: AT_T21L14.C1.p13.tg
MSETQQQVQNSTGSIRSPDKIEDTFRRMKVNEDNMEQSSPYPDRPGERDCQFFLRTGQCGYGNSCRYNHPLTNLPQGIIYYRDQLPERVGQPDCETGACKYGPTCKYHHPKDRNGAGPVLFNVLGLPMRQGEKPCPYYMQTGLCRFGVACKFHHPHPHSQPSNGHSAYAMSSFPSVGFPYASGMTMVSLPPATYGAIPRPQVPQSQAYMPYMVAPSQGLLPPQGWATYMTASNPIYNMKTQLDSSSSASVAVTVTSHHHSFSERAECRFFMNTGTCKYGDDCKYSHPKERLLQSPPTLLNPIVLPARPGQPACGNFKAYGFCKFGANCKFDHSMLLNPYNNTGLAMSSLPTPYPYAPPVSTNLRISSPPSPSDMTTLSNGKPAAAEAQSLETEKQDDSPTEPEKSEVEDSLPPNGSDSTSLPNDKPDAETEKQDDDSAELDSSKVQDSSDKST

SEQ ID NO: 1346 - protein, 435 aa, Arabidopsis thaliana
  Clone ID: AT_MDC12.C1.p23.tg
MSKPEETSDPNPTGPDPSRSSSDEVTVTVADRAPSDLNHVSEELSDQLRNVGLDDSAKELSVPISVPQGNVETDSRALFGSDQKEEEEGSEKRMMMVYPVRPDSEDCSFYMRTGSCKYGSSCKFNHPVRRKLQIGRERVRERDEDVENPKLMECKYYFRTGGCKYGESCRFSHMKEHNSPASVPELNFLGLPIRPGEKECPFYMRNGSCKFGSDCKFNHPDPTAIGGVDSPLYRGNNGGSFSPKAPSQASSTSWSSTRHMNGTGTAPFIPSMFPHSRGVTPQASDWNGYQASSAYPPERSPLAPSSYQVNNSLAETSSFSQYQHQMSVEEFPERPDQPECTYYLKTGDCKFKYKCKYHHPKNRLPKQAAFSFNDKGLPLRPDQSMCTHYSRYGICKFGPACRFDHSIPPTFSPSSSQTVEARQVGANGNEDDSWH

SEQ ID NO: 1347 - protein, 831 aa, Arabidopsis thaliana
  Clone ID: AT_K9D7.C1.p13.tg
MGDGDEQSKELGGVSSSSRRCSSGTAGAANAEARMKFAAVDAITELVWSPSNGLSLRCADISFTGKAKLLSPNFFDIGLTNMAIHSNSTSIEDQEDHVDVELRNRDQVNQAMIGGSVEDMKPEMVEDKVETNDDIKNEEAGCSKRSSDSPKAMEGETRDLLVNEQLRMESAGSQEEGDKAHNRVDRLESMDENNLATLAVVACEGKGDYLPEGEAGPSGSYRRREKAKGKEKALSDENFGGDGEDEDEESFGSVESCNSAGLLSRGKKRPGFEEQLIFGSKRLKTLNQECLGSTSKLKQDSSFMNWISNMTKGIWKGNEEDNSPFVALTTTSNANGHGQVNAIVDQQQLSPCCVKENSGCRNTGFQSFFQSIYCPKKQSQDVVDMDFPNDVNAAPLQELPWIPEHCDISKGDDLSSSGNEIGPVAEPNISSGKVVFNQTSKTQSSENKREDKEPNISLMSLSKSKPNEEPKTCGEADGKVSPCLTNRNSGLKSLWISRFSSKGSFPQKKASETAKEANASASDAAKTRDSRKMLADKNVIRPSISSVDGPDKPDTVLPIVSSMRIESSEAMASLFARRLEAMKSIMPSGSLAENAEEEQRDLICFYCGKKGHCLRDCLEVTDTELRDLVQNISVRNGREEASSLCIRCFQLSHWAATCPNAPLYGSGAEGRAMKNALASTSGMKLPISGFTDVPRAVFDAVQVLRLSRTDVLKWINTKKSVSGLEGFFLRLRLGKWEEGLGGTGYYVARIDGDTEGQSSRRHSEKSLISVKVKGVTCLVESQFISNQDFLEEELKAWWQSAGKSARTSGYDGIPSAEELSRKIQQRKMLGF

SEQ ID NO: 1348 - protein, 1308 aa, Arabidopsis thaliana
  Clone ID: AT_T6K22.C1.p90.tg
MAMSTKVEIKTFNGDRDFSLWKIRIEAQLGVLGLKPALSDFTLTKTILVVKSEKKESESEDDETDSKKTEEVPDPIKFEQSDQAKNFIINHITDTVLLKVQHCVTAAELWATLNKLFMETSLPNRIYTQLRLYSFKMVDNLSIDQNTDEFLRIVAELGSLQIQVGEEVQAILILNSLPPSYIQLKHTLKYGNKTLSVQDVVSSAKSLERELSEQKETIRAPASTALYTAERGRPQTKNTQGQGKGRGRSNSKSRLTCWFCKKEGHVKKDCYAGKRKLENEGQGKAGVITEKLVYSEALSMYDQEAKDKWVIDSGCTYHMTSRMDWFSEFNENETTMILLGDDHTVESKGSGTVKVNTHGGSIRVLKNVRFVPNLRRNLISTGTLDKLGYKHEGGDGKVRFYKENKTALCGNLVNGLYVLDGHTVVNENCNVEGSNEKTELWHCRLGHMSLNNMKILAEKGLLEKKDIKELSFCENCVMGKSKKLSFNVGKHITDEVLGYIHADLWGKQYFLSIIDDKSRKVWLMFLKTKDETFERFCEWKELVENQVNKKVKILRTDNGLEFCNLKFDEFCKQNGIERHRTCTYTPQQNGVAKRMNRTLMEKVRCLLNESGLEEVFWAEAAATAAYLVNRSPASAVDHNVPEELWLDKKPGYKHLRRFGCIAYVHLDQGKLKPRALKGVFLGYPQGTKGYKVWLLDEEKCVISRNIVFNENQVYKDIRESSEQSVKDISDLEGYNEFQVSVKEHGECSKTGGVTIEEIDQESDSENSVTQEPLIASIDLSNYQSARDRERRAPNPPQKLADYTHFALALVMAEEIESEEPQCYHDAKKDKHWIKWNGGMKEEIDSLLKNGTWDIVEWPKEQKVISCRWLFKLKPGIPGVEAQRYKARLVARGFTQQKGIDYEEVFAPVVKHISIRILMSAVVKDDMELEQMDVKTTFLHGELDQVLYMEQPEGFEVNPEKDQVCLLKKSLYGLKQAPRQWNKKFHAFMLSLQFARSEHDSCVYVKEVNPGEFVYLLLYVDDMLLAAKSKSEISKLKEALSLKFEMKDMGAASRILGIDIIRNRKEGTLRLSQTRYVDKVIQRFRMADAKVVSTPMGAHFKLTSLIDEIGSVDPEVVPYSSAVGSVMYAMIGTIPDVAYAMGLVSRFMSRPGANLEVQGYCDSDHAADLDKRRSISGYVFTVGGNTVSWKSSLQHVVALSSTQAEFIALTEAVKEAIWIRGLLEDMGLQPKPATVWCDSQSAICLSKNNAFHDRTKHVEVKFYFIRDIIEAGEVKVRKIHTSVNPADMLTKCIPVKKFEEALDVLKLQR

SEQ ID NO: 1349 - protein, 396 aa, Arabidopsis thaliana
  Clone ID: AT_F14C21.C1.p12.tg
MSSGDCFHCHQPGHWAKNCPLKTTTKPTAAAAPSPPDIHCPCNAGPCNTVTSKTEKNPNRRFYTCPSCGYFKWCDQVSIKSEPLSVLPTCPCGAGPCKRVTFIHGPNTQRSYFACCVKKGLGDCGFFKWEDGESLLHETELDSDGNVKRNRLGVVVELELNPASSSESNTLGNRIVDTLPVNPVTVGKESIPVFAGFNDQGSVSNSIVPSFDLITLYDDAVRLETKEPVLPSVAPKHLDTQVETLCGNALEAVESSSQNTSDLVLNANNKPEHIHQRAATSGETEASYSGSSSMMVLIEQYKSEKLYLESISMKHVEALTAYTGSYKQLESLRDRAHSLKKQLLEVEKQVKLCEAETSEFAASVQEVSGEMAKSQKKMVEIAGKVAKEVRVDKQRD

SEQ ID NO: 1350 - protein, 1363 aa, Arabidopsis thaliana
  Clone ID: AT_F9K21.C1.p100.tg
MSGARIEVEKFDGRGDYTMWKEKLLAHIDMLGLSAVLRESETPMGKERDSEKSDEDEKEEREKMEAFEEKKRKARSTIVLSVSDRVLRKIKKETSAAAMLEALDRLYMSKALPNRIYLKQKLYSFKMSENLSIEGNIDEFLHIVADLENLNVLVSDEDQAILLLMSLPKPFDQLKDTLKYSSGKTVLSLDEVAAAIYSRELEFGSVKKSIKGQAEGLYVKDKAENRGRSEQKDKGKGKRSKSKSKRGCWICGEDGHLKSTCPNKNKPQFKNQGSNKGESSGGKGNLVEGSVNFVESAGMFVSEALSSTDIHLEDEWIMDTGCIYHMTHKREWLEDFDEEAGGSVRMGNKSISRVKGVGTVRIVNDNGLTVTLQNVRYIPDMDRNLLSLGTFEKAGHKFESENGMLRIKSGNQVLLEGRRYDTLYILHGKPATDESLAVARANDDTVLWHRRLCHMSQKNMSLLIKKGFLDKKKVSMLDTCEDCIYGRAKKIGFNLAQHDTKKKLEYVHSDLWGAPTVPMSLGNCQYFISFIDDYTRKVWVYFLKTKDEAFEKFVSWISLVENQSGERVKTLRTDNGLEFCNRMFDGFCEEKGFQRHRTCAYTPQQNGVVERMNRTIMEKVRSMLCDSGLPKRFWAEATHTAVLLINKTPCSAINFEFPDKRWSGKAPIYSYLRRYGCVTFVHTDGGKLNLRAKKGVLIGYPSGVKGYKVWLIEEKKCVVSRNVSFQENAVYKDLMQRKEQVSCEEDDHAGSYIDLDLEADKDNSSGGEQSQAQVTPATRGAVTSTPPRYETDDIEETDVHQSPLSYHLVRDRERREIRAPRRFDDEDYYAEALYTTEDGDAVEPADYKEAVRDENWDKWRLAMNEEIESQLKNDTWTTVTRPEKQRIIGSRWIYKYKQGIPGVEEPRFKARLVAKGYAQREGVDYHEIFAPVVKHVSIRILLSIVAQENLELEQLDVKTAFLHGELKEKIYMMPPEGCESLFKENEVCLLNKSLYGLKQAPRQWNEKFNHYMTEIGFKRSDYDSCAYTKKLSDDSTMYLLFYVDDMLVAANNMQAIDALKKELSIKFEMKDLGAAKKILGIEIIIDREAGVLWLSQESYLNKVLKTFNMLESKPALTPLGAHLKMKSATEEKLSTEEEYMNSVPYSSAVGSIMYAMIGTRPDLAYPVGVVSRFMSQPAKEHWLGVKWVLRYIKGTVDTRLCYKRNSDFSICGYCDADYAADLDKRRSITGLVFTLGGNTISWKSGLQRVVAQSSTECEYMSLTEAVKEAIWLKGLLKDFGYEQKNVEIFCDSQSAIALSKNNVHHERTKHIDVKFHFIREIIADGKVEVSKISTEKNPADIFTKVLPVNKFQTALDFLRVKSE

SEQ ID NO: 1351 - protein, 746 aa, Arabidopsis thaliana
  Clone ID: AT_K16E1.C1.p1.tg
MGVPSFYRWLIQRYPLTIQEVIEEEPLEVNGGGVTIPIDSSKPNPNGYEYDNLYLDMNGIIHPCFHPEDKPSPTTFTEVFQCMFDYIDRLFVMVRPRKLLFMAIDGVAPRAKMNQQRARRFRAAKDAAEAAAEEEQLREEFEREGKKLPPKVDSQVFDSNVITPGTEFMATLSFALRYYIHVRLNSDPGWKNIKVILSDANVPGEGEHKIMSYIRCNKNHPGYNPNTHHCLYGLDADLIMLSLATHEIHFSILREVFFPGEEGKCFLCGQEGHRAADCEGKIKRKTGEMLDNTEADVVVKKPYEFVNIWILREYLEHDMQIPGAKKNLDRLIDDFIFICFFVGNDFLPHMPTLEIREGAIELLMSVYKNKFRSAKKYLTDSSKLNLRNVERFIKAVGMYENQIFQKRRQSERFRRDKARDKARDNARDNAQASRQFSGKLVQLDSLDEVSDSLHSSPSRKYLRLSLDDNIGVANVETENSLKAECTKVHSGFQELDNEEDLKFKLKKLLRDKGDGFRSGNGEQDKVKLNKVGWRERYYEEKFAAKSVEEMEQIRRDVVLKYTEGLCWIMHYYYHGVCSWNWFYPYHYAPFASDLKGLEKLDIKFELGSPFKPFNQLLAVLPSASAHALPECYRSLMTNPDSPIADFYPADFEIDMNGKRYSWQGISKLPFVEEKRLLEAAAQVEKSLTNEEIRRNSALFDMLFVVASHPLGELIRSLNSRTNNLSNEERATIIEKIDPGLRFVSES

SEQ ID NO: 1352 - protein, 524 aa, Arabidopsis thaliana
  Clone ID: AT_F17L24.C1.p5.tg
MVTEEVVVHKQSRQPLLESSGEQKQCKSSNLSKSRGVTCYNCRKKGHLVATCPEKLELTNTSLESKLSSPNSSSEVVSQGLKNSSSCVMHLFLSKDVDSGHTMEHENDKTEGSTKEETHHLVSTTSQACRADYVSKITILNKKGPPYVSQPVLNRELPKEEPHELGGFTQVEAVMVHKQSPRAECNIFSRINHQMLHHHLKLEWRQGELLDSSREEELVTNNALIQKELPDPTPLPLVMMIPSTEHIVNLTQVRNIEKELDLSKEYLESNSCLRIKVKHEHFKNDALIKAEPCLLVYSDFMTMITHLLFAKGVDNIVGVNEEPPNLEFLSSNLFKRTGIGVVLMPKIDYPSNRTRRKSKNAYELELQGELDLRSNPFQVGEDDVIMEITKDLEFDQELVAEEELKAEEQLEPEEHFETENVLIAMKEYVKDVILTSLVLIHDHQMGMCLICTLFPLSSFVPMGFLDKVFNEANDSHSNHPFDDPNHGITFRSWPNRIYMKSNKFYDHHKKKIKKNSHDMILMRN

SEQ ID NO: 1353 - protein, 1011 aa, Arabidopsis thaliana
  Clone ID: AT_T19B17.C1.p2.tg
MESTKDMEFDQELVAAEELEAEEQLEPEEHFETENELITEKESWIHFRMSNFDLSRLIKRIFRILLWRHSIHHLVFESCVVSISRISTPDLPSAEIGIDSSPGSYHVVSEHTWSVRSSQTVVIRVLGEFCVAMSTTEERSSHNRNKHLIEALTTEMGQIFDIHLNQIHQGHHKARKKKEQELKSKPPDNSLRSIQSSPQKITHTPKSKSVFHFDYKPTNALLKFSGKQDYLEWEKNMDEWFSYKNFLSEMRFVCALSHLTGDAYKWWLQEVDDRLYYKEPPITLWRDFKKLLRNKYAPQALECTPKGNPKIQGLAAQEKEQGLAPYSKKNPIAEQQLKDEILKILNAYNKPKKVKSTSQPKMVTEEVVVHKQNRQPSLASSGEQKQCKSSNLSKSRGVTCYNCRKKGHLVATCPEKFELTNTSLESKLSSPNSSSEVVSQGLENSSSCVTHLFLSKDVDSGHTMEHENDKTEGSTKEENHHLVSTTSQACRADYVSKITILNMKGPPYVSQPILNRELRKQEPRELGGFTQVEAVMVHKQSPRAECNIFFKDKPPDATPPFKTRGIYLNSQNRMKANLRSLGEGCTLWGAIKKTNDREISTHHMSQSRDPREDYQNQLRLKNMEECIEEPEMDISSFSTFHTYQWRPGELLDSSREEELVTNNALIQKEPPDPTPLPLVMMIPSTEHTVNLTQVSNSLTRFVSHVSIIVTMSLSYLGNIEKELDLFKEYLESNSCLRIKVKHEHFKNGALIKVEPCLLVYNDFMTMIMHLLFAKGVDNIAGIKEEPPDLEFLMSNLFKRTGIGVVLKPKVDYPSNRTRRKNDNAYELELQGELDLRSNPFQVGEDDVIMESTKDMEFDQELVAAEELEAEEQLEPEEHFKTENELITEKEYGKDVILTSLILIHDHQMGMCLICSLFPLSSFVPMGFLDKVFNEANDSHSNHPFDDPNHGITFRSWPNGIYMKSNQFYDHHKPKKSPNQVGNLLVKRSDENSISRVILEPRSGRVIFKLSN

SEQ ID NO: 1354 - protein, 967 aa, Arabidopsis thaliana
  Clone ID: AT_F10A5.C1.p11.tg
MGVPSFYRWLAEKYPLLVADVIEEEPVEIEGIKIPVDTSKPNPNNLEYDNLYLDMNGIIHPCFHPEDRPSPTTFEEVFQCMFDYIDRLFVMVRPRKLLYMAIDGVAPRAKMNQQRSRRFRSAKDASDAAAEEERLREEFEREGRRLPPKVDSQVFDSNVITPGTEFMGVLSIALQYYVHLRLNHDVGWKNIKVILSDANVPGEGEHKIMSYIRLQRNLPGFDPNTRHCLYGLDADLIMLGGQQERCFLCGQMGHFASNCEGKPKKRAGESDEKGDGNDFVKKPYQFLHIWVLREYLELEMRIPNPPFEIDLERIVDDFIFICFFVGNDFLPHMPTLEIREGAINLLMAVYKKEFRSFDGYLTDGCKPNLKRVEQFIQAVGSFEDKIFQKRAMQHQRQAERVKRDKAGKATKRMDDEAPTVQPDLVPVARFSGSRLASAPTPSPFQSNDGRSAPHQKVRRLSPGSSVGAAIVDVENSLESDERENKEELKTKLKELIREKSDAFNSDTTEEDKVKLGQPGWRERYYEEKFSVVTPEEMERVRKDVVLKYTEGLCWVMHYYMEGVCSWQWFYPYHYAPFASDLKDLGEMDIKFELGTPFKPFNQLLGVFPAASSHALPERYRTLMTDPNSPIIDFYPTDFEVDMNGKRFSWQGIAKLPFIDERRLLEAVSEVEFTLTDEEKRRNSRMCDMLFIATSHRLAELVFSLDNHCRQLSARERVDFKVKIKPKLRCCIYRLPDAHEHITRPPPGVIFPKKTVDIGDLKPPPALWHEDNGRRPMHNNHGMHNNHGMHNNQGRQNPPGSVSGRHLGNAAHRLVSNSLQMGTDRYQTPTDVPAPGYGYNPPQYVPPIPYQHGGYMAPPGAQGYAQPAPYQNRGGYQPRGPSGRFPSEPYQSQSREGQHASRGGGYSGNHQNQHQQQQWHGQGGSEQNNPRGYNGQHHHQQGGDHDRRGRGRGSHHHHDQGGNPRHRY

SEQ ID NO: 1355 - protein, 509 aa, Arabidopsis thaliana
  Clone ID: AT_F22G10.C1.p24.tg
MSVLIVTSLGDIVIDLHSDKCPLTCKNFLKLCKIKYYNGCLFHTVQKDFTAQTGDPTGTGAGGDSIYKFLYGEQARFYKDEIHLDLKHSKTGTVAMASGGENLNASQFYFTLRDDLDYLDGKHTVFGQIAEGFDTLTRINEAYVDPKNRPYKNIRIKHTHILDDPFDDPPQLAEMMPDASPEGKPKEEVKDDVRLEDDWVPMDEELGAQELEEVIREKAAHSSAVVLESIGDIPEAEVKPPDNVLFVCKLNPVTEDEDLHTIFSRFGTVVSADVIRDFKTVVVLTESFVSVLEFENKESCEQAYFKMDNALIDDRRIHVDFSQSVSKLWSQFRQKDSQKGKGNGCFKCGSTDHIAKDCVGGPSSKFIVKDQNRQHGGGEGYEMVFEGDVHETPKHNSHERERSEKIQRRSPHGNGEGKRQHRDERDDGRRQHDREDARELERKHRERKERESREDEDRRRRRRREESRDKESRRERDEDDHRSHRDYKERRRERDDRHGREARHERRDR

SEQ ID NO: 1356 - protein, 804 aa, Arabidopsis thaliana
  Clone ID: AT_MWD22.C1.p25.tg
MESVEMNNPNSQTLDQPPPSSNGDTAPLALDHMNPQNSESVALNGSSTPIPDTNGSSAKPELLRPLLSENGVSKTLSGNDKDQSGGEEETTSRRKRRSRWDPPPSESINNPSAEGGTDSGTGTRKRKSRWADDEPRTQIQLPDFMKDFTGGIEFDPEIQALNSRLLEISRMLQSGMPLDDRPEGQRSPSPEPVYDNMGIRINTREYRARERLNRERQEIIAQIIKKNPAFKPPADYRPPKLHKKLFIPMKEFPGYNFIGLIIGPRGNTQKRMERETGAKIVIRGKGSVKEGRHQQKKDLKYDPSENEDLHVLVEAETQEALEAAAGMVEKLLQPVDEVLNEHKRQQLRELATLNGTIRDEEFCRLCGEPGHRQYACPSRTNTFKSDVLCKICGDGGHPTIDCPVKGTTGKKMDDEYQNFLAELGGTVPESSLKQSATLALGPGSSGSNPPWANNAGNGASAHPGLGSTPTKPPSKEYDETNLYIGFLPPMLEDDGLINLFSSFGEIVMAKVIKDRVTGLSKGYGFVKYADVQMANTAVQAMNGYRFEGRTLAVRIAGKSPPPIAPPGPPAPQPPTQGYPPSNQPPGAYPSQQYATGGYSTAPVPWGPPVPSYSPYALPPPPPGSYHPVHGQHMPPYGMQYPPPPPHVTQAPPPGTTQNPSSSEPQQSFPPGVQADSGAATSSIPPNVYGSSVTAMPGQPPYMSYPSYYNAVPPPTPPAPASSTDHSQNMGNMPWANNPSVSTPDHSQGLVNAPWAPNPPMPPTVGYSQSMGNVPWAPKPPVQPPAENPSSVGESEYEKFMAEMK

SEQ ID NO: 1357 - protein, 411 aa, Arabidopsis thaliana
  Clone ID: AT_MSA6.C1.p7.tg
MAASLPDGVSDDFDYEDWSPMVKTRLVENGVWDVVQNGVSPNPTTNPELAATIKAVDLAQWRNLVVKDNKALKIMQSSLPDSVFRKTISIASAKELWDLLKKGNDTKEAKLRRLEKQFENLMMYEGERMKLYLKRLEKIIEELFVLGNPISDDKVIAKLLTSLPRSYDDSVPVLKEFMTLPELTHRDLLKAFEMFGSDPKTMPQELMKFIMILRRAWSERMWCSACETYNHNQEDCYYNPRVVYLGGGRGQCFQCGERGHFARDCCNTRNLQPIDRKREVKDDFTYDEDMWMLYTTSENHMSPYEKFFTSLDRTYKAGVQLPNGNVVMVEGIGDVKFMMEGVRMTIKDVLFVPWINKNILSFSRMKKRGYSMEVDDGEWIIRDRTGKVFVKTLREERGIALRLQMIERYSL

SEQ ID NO: 1358 - protein, 438 aa, Arabidopsis thaliana
  Clone ID: AT_MSA6.C1.p5.tg
MAAANIHDAVVSDDLNYEIWAPIAKTTLTEKGLWDVVENGVPPDPSKVPELAATIQAEEFSKWRDLAEKDMKALQILQSSLTDSAFRKTLSASSAKDLWDSLEKGNNEQAKLRRLEKQFEELSMNEGEPINPYIDRVIEIVEQLRRFKIAKSDYQVIEKVLATLSGSYDDVAPVLGDLVDLKNMSLKSFVELFYVYDSITEESIHLMLKANRLRSMAEEESCVLCNKNNHKQEDCSSSIPKAGKSSGARQSKPKKGKCFQCGERGHKAKDCNKKIQQPAVTEDQIEIVEEKEIEVDFLLLAALNLNEFTYDENMWMIYGHATNHMTPYEKLFTTLDRTYKAKVGLVDGTIIMVEGIGDVKIKMKEGKQKTINNVIFVPGLNRNVLSVQQMKSRGCSFINGARGECIVHDRTGKEFGDTLWDKRGLSLRLQVIEGNATS

SEQ ID NO: 1359 - protein, 1138 aa, Arabidopsis thaliana
  Clone ID: AT_F5K24.C1.p1.tg
MEAITATLTATLTTNMAKMMDERFEAARSNQERKNRTMRNNSDREATLSYYSQSSTRTSHRRQRRGQEERHPPRDNLANLKLRIPPFHEYTEANKVKVAATEFYDYALSWWDQVVTTKRRLGDDSIETWNQLKNIMKRRFVPSHYHRELHQRLRNLVQGNRTVEEYFKEMETLMLRADVQEECEATMSRFMGGLNRDILDRFEVIHYENLEELFHKAVMFEKQIKRRSAKPSYNSSKPSYQREEKSGFQKEYKPFVKPKVEEISSKGKEKEVTRTRDLKCFKCHGLGHYASECSNKRIMIIRDSGEVESEDEKPEESDVEEAPKGELLVTMRVLSVLNKAEEQAQRENLFHTRCLIKGKVCSLIIDGGSCTNVASETMVQKLGLEEFPHPKPYKLQWLNESGEMAVTRQVQVPLAIGKYEDEILCDILPLEASHVLLGRPWQSDRKDYQDVFPEENPEGLPPIRGIEHQIDFVPGASLPNRPAYRTNPVETKELEKQVNELMERGHICESMSPCAVPVLLVPKKDGSWRFVASTDGVKVDEEKVKAIREWPSPKSVGKVRSFHGLAGFYRRFVRDFSTLAAPLTEVIKKNVGFKWEQAPEDAFQALKEKLTHAPVLSLPDFLKTFEIECDAPGVGIGAVLMQDKKPIAYFSEKLGGATLNYPTYDKELYALVRALQTWQHYLWPKEFVIHTDHESLKHLKGQQKLNKRHARWVEFIETFPYVIKYKKGKDNVVADALSRRHEGFLFYDNRLCIPNSSLRELFIREAHGGGLMGHFGVSKTLKVMQDHFHWPHMKRDVERMCERCTTCKQAKAKSQPHGLCTPLPIPLHPWNDISMDFVVGLPRTRTGKDSIFVVVDRFSKMAHFIPCHKTDDAMHIANLFFREVVRLHGMPKTIVSDRDTKFLSYFWKTLWSKLGTKLLFSTTCHPQTDGQTEVVNRTLSTLLRALIKKNLKTWEDCLPHVEFAYNHSVHSATKFSPFQIVYGFNPITPLDLMPLPLISIHLRKERFPNKRKSKLMPRMDGSFKVLKRINDNAYSLDLQDETDLRSNPFQVGEDDVIMGSLDHGAKEQLEPEEFGERKQLEDGELGAKKDEALHVLEGPITRSKTKLLNQAITTLLQKIEGSLKQEACPTTLVVIQAV

SEQ ID NO: 1360 - protein, 1104 aa, Arabidopsis thaliana
  Clone ID: AT_T27D20.C1.p5.tg
MKVEIKTFNGDRDFSFWKIRIEAQLGVLGLKNSLTDFKLTKTVPVAKKEEKESEYEDDASDIKQATEEPDPIKFEQSEQAKNFIINHITDTVLLKVQHCKTAAEIWATLNKLFMETSLLNRIYTQLKLYSFKMVDTLSIDQNVDEFLRILADCLDQNLLPSSYIQLKHTLNTDVVSSAKSLERKLSETQESNKNVSMALYTTDRGRPQVRNQDKQGQGKNRGRSNSKTRVTCWFCKKEAHVKRDCFARKKKLENENRATMILLGDDHTVESRGCGTIKLNTHGGLIRMLKNVRYVPNLRRNLISTGTLHSLGYKHEGGEGKLRFYKNGKTALCGYLMNGLYILDGHTVATETCNAESAKNSTKLLIEKKEFKDLDFCEHYVMGKSKKLSFNVGKHVTEDILGYVHADLWGSPNVTPSISGKQYFLSIIDDKSRKVWLMFLKSKDETFDKFCEWKEIVENHVGKKVKTLRTDNGLEFCNNRFNDYCAKTGIERHRTCTYTPQQNGVTKRMNRTIMEKVRSPASAVDHNVPEQLWLNREPGYKHLRRFSSIAYVHQEQGKLKPRVLKGVFLGYPQGTKGYKVWLIDEEKCVISRNVVFNEDSVFKDLQSGSKDEDETVTQESQIEIETPPKSELETQNQVQGGATQVQLNDSEDEYNDVEGFAFALVMAEEVESEEPVCFHDVKEDKDWEKWHGGMIEEMDSLLKNATWDIVDKPKNQKVISCHWLYKKKLGIPGVELPRYKARLVARGFSHREGIDYQEVFSPVVKHTSIRILLSLMVKEDMELEQMDVKTAFLHGELDQTLFMEQPEGFEAPRQWNKRFNAFMMDQKFSRSVSDSCVYVKEVSNAKSMTEIKKLKKVLSREFEMKDMGAASRKLGIDIIRNRSEGTLCLSQTSYLERVIQKFRMDGAKVVNTPIGAHFKLSSVHNDDERVGSEKVPYSSVVGSLMFMSKQGEVHWTAVKWLLRYLKWSIGLNLMYTKGFDFKVQGYCDSDHAADLDKNMSISGYVFTVGGNIVSWKSCLQPVVALSTTEAEYIALTKAVKEAMWIRNLLDDMMLGTETAEVDIIEAGEVEVHKIHTTRNPADMLTKGIPVSKFEAALEFLKLLR

SEQ ID NO: 1361 - protein, 1339 aa, Arabidopsis thaliana
  Clone ID: AT_T2O9.C1.p150.tg
MSSSEKFVQPAIPRFDGYYDFWSMTMENFLRSRELWRLVEEGIPAIVVGTTPVSEAQRSAVEEAKLKDLKVKNFLFQAIDREILETILDKSTSKAIWESMKKKYQGSTKVKRAQLQALRKEFELLAMKEGEKIDTFLGRTLTVVNKMKTNGEVMEQSTIVSKILRSLTPKFNYVVCSIEESNDLSTLSIDELHGSLLVHEQRLNGHVQEEQALKVTHEERPSQGRGRGVFRGSRGRGRGRGRSGTNRAIVECYKCHNLGHFQYECPEWEKNANYAELEEEEELLLMAYVEQNQANRDEVWFLDSGCSNHMTGSKEWFSELEEGFNRTVKLGNDTRMSVVGKGSVKVKVNGVTQVIPEVYYVPELRNNLLSLGQLQERGLAILIRDGTCKVYHPSKGAIMETNMSGNRMFFLLASKPQKNSLCLQTEEVMDKENHLWHCRFGHLNQEGLKLLAHKKMVIGLPILKATKEICAICLTGKQHRESMSKKTSWKSSTQLQLVHSDICGPITPISHSGKRYILSFIDDFTRKTWVYFLHEKSEAFATFKIFKASVEKEIGAFLTCLRTDRGGEFTSNEFGEFCRSHGISRQLTAAFTPQQNGVAERKNRTIMNAVRSMLSERQVPKMFWSEATKWSVHIQNRSPTAAVEGMTPEEAWSGRKPVVEYFRVFGCIGYVHIPDQKRSKLDDKSKKCVFLGVSEESKAWRLYDPVMKKIVISKDVVFDEDKSWDWDQADVEAKEVTLECGDEDDEKNSEVVEPIAVASPNHVGSDNNVSSSPILAPSSPAPSPVAAKVTRERRPPGWMADYETGEGEEIEENLSVMLLMMMTEADPIQFDDAVKDKIWREAMEHEIESIVKNNTWELTTLPKGFTPIGVKWVYKTKLNEDGEVDKYKARLVAKGYAQCYGIDYTEVFAPVARLDTVRTILAISSQFNWEIFQLDVKSAFLHGELKEEVYVRQPEGFIREGEEEKVYKLRKALYGLKQAPRAWYSRIEAYFLKEEFERCPSEHTLFTKTRVGNILIVSLYVDDLIFTGSDKAMCDEFKKSMMLEFEMSDLGKMKHFLGIEVKQSDGGIFICQRRYAREVLARFGMDESNAVKNPIVPGTKLTKDENGEKVDETMFKQLVGSLMYLTVTRPDLMYGVCLISRFMSNPRMSHWLAAKRILRYLKGTVELGIFYRRRKNRSLKLMAFTDSDYAGDLNDRRSTSGFVFLMASGAICWASKKQPVVALSTTEAEYIAAAFCACQCVWLRKVLEKLGAEEKSATVINCDNSSTIQLSKHPVLHGKSKHIEVRFHYLRDLVNGDVVKLEYCPTEDQVADIFTKPLKLEQFEKLRALLGMVNMSEVS

SEQ ID NO: 1362 - protein, 1307 aa, Arabidopsis thaliana
  Clone ID: AT_F16J10.C1.p6.tg
MEATLRVHKVWETIDPGSDDMEKNDMARALLFQSVPESTILQVGKHKTSKAMWEAIKTRNLGAERVKEAKLQTLMAEFDRLNMKDNETIDEFVGRISEISTKSESLGEEIEESKIVKKFLKSLPRKKYIHIIAALEQILDLNTTGFEDIVGRMKTYEDRVCDEDDSPEEQGKLMYANSESSYDTRGGRGRGRGRSSGRGRGGYGYQQRDKSKVICYRCDKTGHYASECLDRLLKLIKAQEQQQNNEDDDEIESLMMHEVVYLNERSVKPKEFEACSDNSWYLDNGASNHMTGNLQWFSKLNEMITGKVRFGDDSRIDIKGKGSIVLITKGGIRKTLTDVYFIPDLKSNIISLGQATEAGCDVRMKDDQLTLHDREGCLLLRATRSRNRLYKVDLNVENVKCLQLEAATMVRKELVIGISNIPKEKETCGSCLLGKQARQPFPKATTYRASQVLELVHGDLCGPITQSTTAKKRYILVLIDDHTRYMWSMLLKEKSEAFEKFRDFKTKVEQESGVKIKTFRTDKGGEFVSQEFQDFCAKEGINRHLTAPYTPQQNGVVERRNRTLLGMTRSILKHMKMPNYLWGEAVRHSTYIINRVGTRSLQNQTPYEVFKQRKPNVEHLRVFGCIGYAKIEGPHLRKLDDRSKMLVYLGTEPGSKAYRLLDPTNRKIIKWNNSDSETRDISGTFSLTLGEFGNNGIQESDDIETEKNGEESENSHEEEGENEHNEQEQIDAEETQPSHATPLPTLRRSTRQVGKPNYLDDYVLMAEIEGEQVLLAINDEPWDFKEANKLKEWRDACKEEILSIEKNKTWSLIDLPVRRKVIGLKWVFKIKRNSDGSINKYKARLVAKGYVQRHGIDYDEVFAHVARIETIRVIIALAASNGWEVHHLDVKTAFLHGELREDVYVTQPEGFTNKDNEGKVYKLHKALYGLKQAPRAWNTKLNKILQELNFVKCSKEPSVYRRQEEKKLLIVAIYVDDLLVTGSSLDLILCFKKDMAGKFEMSDLGQLTYYLGIEVLHRKNGIILRQERYAMKIIEEAGMSNCNPVLIPMAAGLELCKAQEEKCITERDYRRMIGCLRYIVHTRPDLSYCVGVLSRYLQQPRESHGNALKQVLRYLKGTMSHGLYLKRGFKSGLVGYSDSSHSADLDDGKSTAGHIFYLHQCPITWCSQKQQVVALSSCEAEFMAATEAAKQAIWLQDLFAEVCGTTSEKVMIRVDNKSAIALTKNLVFHGRSKHIHRRYHFIRECVENNLVEVDHVPGVEQRADILTKPLGRIKFREMRELVGVQCVLEDDFKLKGEFVGISMKSIN

SEQ ID NO: 1363 - protein, 415 aa, Arabidopsis thaliana
  Clone ID: AT_MAC12.C1.p12.tg
MLNGTMQTGDCFRCRQAGHWINDCPLKSYTDDPPPAIQCPCGGGFCEIKVANTRENPGRKFYKCPTAQNCCFFKWCDKVTDEDIKFRPAFTIPICSCGAGPCRRVKDVSGRAYLICCIKKGFGACGFFKWEDVEMIPSCDVMDEIDFWVEADQILSDVESSLQARGGVIPEIANQMASEKECQASVSGIEDDCVVECQDSVSAEDDSTLENLDSISMSVSDVHSTALNQGISLFDPVTSEPEEPWKKTQNGDQPTNSALSKLSVDEAMSDLIRDTVSSGSVVIHGRTNHEQPEIDGAEWSFPCLQNLIDQYNSEKLQLESISGKHVQMLSEFMASYRRLRLLHEKTSHLRKTLLETEKEMVCCEAETLKFGASCREVAGEMAESQKRMQETADKLGKEVEVFKQNEFVGLKRRRT

SEQ ID NO: 1364 - protein, 591 aa, Arabidopsis thaliana
  Clone ID: AT_MWD22.C1.p23.tg
MESIMEEADSYIEYVSVAERRAIAAQKILQRKGKASELEEEADKEKLAEAKPSLLVQATQLKRDVPEVSATEQIILQEKEMMEHLSDKKTLMSVRELAKGITYTEPLLTGWKPPLHIRKMSSKQRDLIRKQWHIIVNGDDIPPPIKNFKDMKFPRPVLDTLKEKGIVQPTPIQVQGLPVILAGRDMIGIAFTGSGKTLVFVLPMIMIALQEEMMMPIAAGEGPIGLIVCPSRELARQTYEVVEQFVAPLVEAGYPPLRSLLCIGGIDMRSQLEVVKRGVHIVVATPGRLKDMLAKKKMSLDACRYLTLDEADRLVDLGFEDDIREVFDHFKSQRQTLLFSATMPTKIQIFARSALVKPVTVNVGRAGAANLDVIQEVEYVKQEAKIVYLLECLQKTSPPVLIFCENKADVDDIHEYLLLKGVEAVAIHGGKDQEDREYAISSFKAGKKDVLVATDVASKGLDFPDIQHVINYDMPAEIENYVHRIGRTGRCGKTGIATTFINKNQSETTLLDLKHLLQEAKQRIPPVLAELNDPMEEAETIANASGVKGCAYCGGLGHRIRDCPKLEHQKSVAISNSRKDYFGSGGYRGEI

SEQ ID NO: 1365 - protein, 331 aa, Arabidopsis thaliana
  Clone ID: AT_F1N21.C1.p3.tg
MEEDMDLTEDDFRNVSGQFSGQASIVEVGDAVDVRVETVKVDDQEQVLEAGDETYFPALRVGLQKTSSVSFWFDYQTGHSSSKKSVPVESSTTPLYNRGFTIGLDSGSNNVEGGLEIIDDPPRCFNCGAYSHSIRECPRPFDRSAVSNARRQHKRKRNQTPGSRLPSRYYQSLQRGKYDGLKPGSLDAETRKLLGLKELDPPPWLNRMREIGYPPGYFAVEEDDDDHSRITIFGEEETKEEEEVKTEEGEILEKASPQEPRKIMTVGFPGINAPIPENADSWLWEQRNSNTGHTNYHNHLRPQYEMGPLGIQLSSSFPPMHGIRYDHRFGL

SEQ ID NO: 1366 - protein, 1501 aa, Arabidopsis thaliana
  Clone ID: AT_F9B22.C1.p5.tg
MSEKEGEITSGSTTKMGASGGSRVDSLMVSPYTLASSDNPGAVISSVELNGDNYNQWATEMLNALQAKRKTGFINGTIPRPPPNDPNYENWTAVNSMIVGWIRTSIEPKVKATVTFISDAHLLWKDLKQRFSVGNKVRIHQIRAQLSSCRQDGQAVIEYYGRLSNLWEEYNIYKPVTVCTCGLCRCGATSEPTKEREEEKIHQFVLGLDESRFGGLCATLINMDPLPSLGEIYSRVIREEQRLASVHVREQKEEAVGFLARREQLDHHSRVDASSSRSEHTGGSRSNSIIKGRVTCSNCGRTGHEKKECWQIVGFPDWWSERNGGRGSNGRGRGGRGSNGGRGQGQVMAAHATSSNSSVFPEFTEEHMRVLSQLVKEKSNSGSTSNNNSDRLSGKTKLGDIILDSGASHHMTGTLSSLTNVVPVPPCPVGFADGSKAFALSVGVLTLSNTVSLTNVLFVPSLNCTLISVSKLLKQTQCLATFTDTLCFLQDRSSKTLIGSGEERGGVYYLTDVTPAKIHTANVDSDQALWHQRLGHPSFSVLSSLPLFSKTSSTVTSHSCDVCFRAKQTREVFPESINKTEECFSLIHCDVWGPYRVPASCGAVYFLTIVDDYSRAVWTYLLLEKSEVRQVLTNFLKYAEKQFGKTVKMVRSDNGTEFMCLSSYFRENGIIHQTSCVGTPQQNGRVERKHRHILNVARALLFQASLPIKFWGESILTAAYLINRTPSSILSGRTPYEVLHGSKPVYSQLRVFGSACYVHRVTRDKDKFGQRSRSCIFVGYPFGKKGWKVYDIERNEFLVSRDVIFREEVFPYAGVNSSTLASTSLPTVSEDDDWAIPPLEVRGSIDSVETERVVCTTDEVVLDTSVSDSEIPNQEFVPDDTPPSSPLSVSPSGSPNTPTTPIVVPVASPIPVSPPKQRKSKRATHPPPKLNDYVLYNAMYTPSSIHALPADPSQSSTVPGKSLFPLTDYVSDAAFSSSHRAYLAAITDNVEPKHFKEAVQIKVWNDAMFTEVDALEINKTWDIVDLPPGKVAIGSQWVFKTKYNSDGTVERYKARLVVQGNKQVEGEDYKETFAPVVRMTTVRTLLRNVAANQWEVYQMDVHNAFLHGDLEEEVYMKLPPGFRHSHPDKVCRLRKSLYGLKQAPRCWFKKLSDSLLRFGFVQSYEDYSLFSYTRNNIELRVLIYVDDLLICGNDGYMLQKFKDYLSRCFSMKDLGKLKYFLGIEVSRGPEGIFLSQRKYALDVIADSGNLGSRPAHTPLEQNHHLASDDGPLLSDPKPYRRLVGRLLYLLHTRPELSYSVHVLAQFMQNPREAHFDAALRVVRYLKGSPGQGILLNADPDLTLEVYCDSDWQSCPLTRRSISAYVVLLGGSPISWKTKKQDTVSHSSAEAEYRAMSYALKEIKWLRKLLKELGIEQSTPARLYCDSKAAIHIAANPVFHERTKHIESDCHSVRDAVRDGIITTQHVRTTEQLADVFTKALGRNQFLYLMSKLGVQNLHTPT

SEQ ID NO: 1367 - protein, 477 aa, Arabidopsis thaliana
  Clone ID: AT_MBB18.C1.p15.tg
METEDVLDIPASSNFGSEVKKNSLESGNGSPEANSLVGNDENVKGNLDLDLTEENLRIVGGQESGEILTEQVSDVFNASVESVAVDEKLGIQKETLVHSTTLDDQEQLFESGEETCFPAIRVGLQKTSSVSFWIDNQTGHKPLEDFVLVESSTTPLYDRKFAIGLNSADGSRNVEGGLEIIDDDPPRCFNCGGYSHSLRECPRPFDRSAVNSARKLQKSKRNQNSSGPRLPSRYYQKTQTGKYDGLKPGTLDAETRQLLNLGELDPPPWLNRMREIGYPPGYLAPEDDHLSGITIFGEEVETREEIESEDGEILEKANHPPEPQMKKTVEFPGINAPFPENADEWLWEAAPSHRNSSRSGRWQQQKTSRGHDYRDDGPLGVEPSSYPPRYGSRYDYGYGSNEYGSRSRSPGIDRSLSERSKRDYSSYDADFRERDRDRDRNRDRDRDRDWDRDRDRDCDRDRDRDDRDWSYRLSSRR

SEQ ID NO: 1368 - protein, 463 aa, Arabidopsis thaliana
  Clone ID: AT_T24M8.C1.p9.tg
MGKQKRRKGSLAPDPSPPRSVGSSSLASVSSVALPISQIQPSATLPDAQAAVPQTALAIPSPPVPRSGSDLETLPIIDVTSAVTPVPAGAPSAATSVPAVAPSVPCEVTPSRGPSPSPATAPATPVKVVVADPVNKPESNTAEQAIPGITVSRMEGNAFLFCIPNVQTRTRVLSQRLWQIDGQTMFVAKWEPGLTPVKPELTTAPIWLELRHVPFQFFNDNGLEHIASLVGEPKFLHPSTANKTNLEVARVFTIIDPRKPLPEAVNVHFASGDIRRIEVSSPWMPPVCAHCKEVGHSLRKCKVAPITCKACNSTLHLADACPRDQPQGVKKRHRRRRSKTPKPVVEEGDWNTVAPRNRRSTRSSVVLTIGPPLSVPDANAAAMAGSSKEAQRPNPITGKAASFKGKGKSIVVAKSTTVSEADYDSSDVPSDDVDSDLENEEQFTEVLSKRQQRSARGKGPKSH

SEQ ID NO: 1369 - protein, 718 aa, Arabidopsis thaliana
  Clone ID: AT_T13B17.C1.p100.tg
MGAAAGGAQVPVQAPVAPRVAEVQQRAAVAEEVPSYLRMMEQLQRIGIGYFSGGTSPEEADSWRSRVERNFGSSRCPVEYRVDLAVHFLEGDAHLWWKSVTTRRRQANMSWADFVAEFNAKYFPQEALDRMEAHFLELTQGERSVREYDREFNRLLVYAECRSTRIPVVQPKKTHQQVAPSKGGKPAQGQKRSWDHPSRAGQGGRAGCFFCGSLDHKVADCTQRAETREYYHCRKRRHLRPNCPKLQRMAVAVVHAAVQQGAQVQQNVQQLAHIAPAPQGYTTREIGVTNNRAITAVKVVGGQFLAVLGRAKGVDIQIARESMPANLFLSPEELYDVILGMDWLDYYRVHLDCHRGRVSFERPKGRLIYQAVRPTLGSLVISAVQAEKMIKKDCEAYLVTISMKSDGEATGAEAGVSVDLEKIEAIKDWPRPTNATEIRSFLGLAGYYRRFVKGFASMAPPLTKLTGKNVPFVWSPECEEGFVSLKEILTSTPVLALPEHGESYMVYTDASRVGLGCVLMQRGKVIAYASRQLRKHEGNYPTHDLEMSAVFTDHKSLKYIITQPELNLRQRRWMELVADYDLEIAYHHGKASVVADALSRKRVGVAPGQSVEALVSEIRALRLCAVAREPLGLEAVDRVDLLSRVRLAQEKDEGLIAASKAEGSKYQFAANGTILVHGRVCVLNDEELRREILSEAHASMFSIHPGATKMYRDLKEYY

SEQ ID NO: 1370 - protein, 585 aa, Arabidopsis thaliana
  Clone ID: AT_T12C24.C1.p19.tg
MLKRSTIAALFEERLRVNPKMTKYEMVAEIKREYKLEVTPDQCAKAKTKVLKARNASHDTHFSRIWDYQAEVLNRNPNSDFDIETTARTFIGSKQRFFRLYICFNSQKVSWKQHCRPVIGIDGAFLKWDIKGHLLAAVGRDGDNRIVPLAWAVVEIENDDNWDWFLKKLSESLGLCEMVNLALISDKQSGLVKAIHNVLPQAEHRQCSKHIMDNWKRDSHDMELQRLFWKISRSYTIEEFNTHMANLKSYNPQAYASLQLTSPMTWTIRQARRKPLLDMLEDIRRQCMVRTAKRFIIAERLKSRFTPRAHAEIEKMIAGSAGCERHLARNNLHEIYVNDVGYFVDMDKKTCGCRKWEMVGIPCVHTPCVIIGRKEKVEDYVSDYYTKVRWRETYRDGIRPVQGMPLWPRMSRLPVLPPPWRRGNPGRQSNYARKKGRYETASSSNKNKMSRANRIMTCSNCKQEGHNKSSCKNATVLLPPPRPRGRPSLNQEHNLIKNKQFQVMDHKNKQLRVMDHKDMVHKDMDHKNKQLLVMDHKDMGHKDQELMDRRDKGHHKDKDQELMLDQKHKHNLNHKRKPKNKDLLG

SEQ ID NO: 1371 - protein, 253 aa, Arabidopsis thaliana
  Clone ID: AT_T32A11.C1.p20.tg
MHRSVSTNNPNRYICSRRQQTPRRMAEQTCSQNLESIVGFKKKGPSTNFHMPAGILAKIVSYIAEGEIGELKNWIISGREGMVAVSSPDSQKSVISMTEFHIPPPLMEIIVSKVGEDVVDALKNFLLAGREGRDAVLSKKTLASVRIDKNHHFMWWSMPHSKYYTFFKKCLDANNLYAKFVDNHKGLAYESTIGYFQMRCRWKVCHGKRNGGLLDLNEMKVCVVQPPYQPNRVGRPRCRRCKKVGHMLSTCTE

SEQ ID NO: 1372 - protein, 341 aa, Arabidopsis thaliana
  Clone ID: AT_T13B17.C1.p102.tg
MSKLTNLMYAALLASGDNYLQWALDTKIELKSKGLAECIVEGNEKTERSKYQAISIIRHHIAESLKNQYLTVEDPLELWLELKNRYDHQKTIQLPKAQHDWLNLRIQDYKSVEEYNSELFKIVSILRLCGEKVTENDMLEKTFSTFHANNVLLQQQYRAKGFTTYTSLASCLLLAEKNNELLLMNSALRPPGSTAVPEANRAEMAKAPNEPQATKESNYVHRGNPHGRGRGRGRGGRGRGNFYGQGNHYGGRGRGNYGRGRGRGRGVNKPRGKAKSVCYRCGMDDHWAKTCRTSKHLIEAYQEMIKQKGPEANLVHLDGEGDFDHENDDLMDYETSDILGE

SEQ ID NO: 1373 - protein, 735 aa, Arabidopsis thaliana
  Clone ID: AT_C6L9.C1.p40.tg
MGKIKDQKGKEHDHSQCRRYVLQSYLLRTEHISPNSTRNINMITQDDSLCLLSISIYTLNSSHASLWLFTRSEEESADFGESEDPSKTVRKRKKLSSSKLGFRRLDNQSKKDQLFNEPLFTGFSNVLLSVFKKDCVAKSYFAAPKEPASVPVSSPTREAETEINSASPVTQSTVPDSTNQESTVQRSSGQQTEHFQGVALKFVLPGLNILEYMLSPPPRSSPFRTNGFTIHPETWETGSYRTQPSTSNNTEELHFLEEGVNTPVRSPVTQDSGGFSGRTRALAQHLKERYSGYLSLNKILEGKTRKIAARMFYETLGEVPEIVQKIIQEVRQSLKSRLMEILRLPFKKRFSWNERNRALHEFKVDGNKEVLYKSSKGKRCFECKGFRHMCSECANLMKEKEKKFIMSDSEIDSDDGEELKNLVAFTTFESSIASASASGPTSASATGSTSASATGPATGSDNDQSDDDDLSISDEEFAENYKALYEHCVKVVEENSVLTKEKLKLEAKVVKTLKFAAEKEEEASQLEETQKNLRMLNNGTKKLGHILSIGKTDKCGLGFKGNPSKSDPVFVYGGKITSASGTVKETATVAEIASDTRTDSRTDTETTSGTRKVQKLQSEPRRVFRPVCHHCGVVGHIRPRCFRLLREKNRLMNAYDVRFHGPKCYHYGVQGHIKRNCFRFIRECSHEGLRRNKVWVRKDDFHGSGGENDDVFGDVVLELELMSSQHSQKGGDLKM

SEQ ID NO: 1374 - protein, 332 aa, Arabidopsis thaliana
  Clone ID: AT_F8N16.C1.p20.tg
MPATAGRVRMPANNRVHSSAALQTHGIWQSAIGYDPYAPTSKEEPKTTQQKTEDPENSYASFQGLLALARITGSNNDEARGSCKKCGRVGHLTFQCRNFLSTKEDKEKDPGAIEAAVLSGLEKIRRGVGKGEVEEVSSEEEEESESSDSDVDSEMERIIAERFGKKKGGSSVKKTSSVRKKKKRVSDESDSDSDSGDRKRRRRSMKKRSSHKRRSLSESEDEEEGRSKRRKERRGRKRDEDDSDESEDEDDRRVKRKSRKEKRRRRSRRNHSDDSDSESSEDDRRQKRRNKVAASSDSEANVSGDDVSRVGRGSSKRSEKKSRKRHHRKERE

SEQ ID NO: 1375 - protein, 754 aa, Arabidopsis thaliana
  Clone ID: AT_T11J7.C1.p3.tg
MTNNELIMSGNHDISFRQEQYMEARQNNELFTSHDYNFALEPLQETNLQIGVSREQNEVWNHGQEHALALQNSGTHSEEIHEKQLVEGKDEVDSQENQNESYDHTFDLSFPDNDDSGTSENDKLALLVSQDLNDNLQLAVGHCMNRDPLPGLNISLSQQLELAPPILQCRSLQTAPEHNLIVGMEFSDVLACRRALRDAAIALRFEMQTVKSDKTRFTAKCNSEGCPWRIHCAKLPGLPTFTIRTIHGSHTCGGISHLGHHQASVQWVADAVTERLKVNPHCKPKEILEQIHQVHGITLTYKQAWRGKERIMAAVRGSYEEDYRLLPRYCDQIRRTNPGSVAVVHGSPVDGSFQQFFISFQASICGFLNACRPLIGLDRTVLKSKYVGTLLLATGFDGEGAVFPLAFAIISEENDSSWQWFLSELRQLLEVNSENMPKLTILSSRDQSIVDGVDTNFPTAFHGLCVHCLTESVRTQFNNSILVNLVWEAAKCLTDFEFEGKMGEIAQISPEAASWIRNIQHSQWATYCFEGTRFGHLTANVSESLNSWVQDASGLPIIQMLESIRRQLMTLFNERRETSMQWSGMLVPSAERHVLEAIEECRLYPVHKANEAQFEVMTSEGKWIVDIRCRTCYCRGWELYGLPCSHAVAALLACRQNVYRFTESYFTVANYRRTYAETIHPVPDKTEWKTTEPAGESGEDGEEIVIRPPRDLRQPPRPKKRRSQGEDRGRQKRVVRCSRCNQAGHFRTTCTAPI

SEQ ID NO: 1376 - protein, 241 aa, Arabidopsis thaliana
  Clone ID: AT_T13P21.C1.p20.tg
MSKFSYFPSGSEDHNRKELCGDYDVAEMINNTYELESMNLYVVRVDDPYLDDVLVGEEEEEEEPKNEDEPIDLLFQDAVSCTCRAYDVSGIPCCHIMSAMWEEYKETKLPETVVSDWYSIEKWKLCYSSLFFPVNGMELWKTHIDVVVMPPPDRIMPGRPKNNDRIRDPTEDRPPQKVPSTREKLQMTCSNCQQIGHNKRSCKRKAVPKPSKKPQGRPRKKQKTMAEENPITQPIQSSLQS

SEQ ID NO: 1377 - protein, 1413 aa, Arabidopsis thaliana
  Clone ID: AT_T4E14.C1.p12.tg
MSIPEEVSSATHPRTNQQPDVTKVSPYTLASSDNPGAMISSVMLTGDNYNEWSTKMLNALQAKRKTGFINGSISKPPLDNPDYENWQAVNSMIVGWIRASIEPKVKSTVTFICDAHQLWSELKQRFSVGNKVHVHQIKTQLAACRQDGQPVIDYYGRLCKLWEEFQIYKPITVCKCGLCTCGATLEPSKEREEEKIHQFVLGLDDSRFGGLSATLIAMDPFPSLGEIYSRVVREEQRLASVQIREQQQSAIGFLTRQSEVTADGRTDSSIIKSRDRSVLCSHCGRSGHEKKDCWQIVGFPDWWTERTNGGGRGSSSRGRGGRSSGSNNSGRGRGQVTAAHATTSNLSPFPEFTPDQLRVITQMIQNKNNGTSDKLSGKMKLGDVILDTGASHHMTGQLSLLTNIVTIPSCSVGFADGRKTFAISMGTFKLSETVSLSNVLYVPALNCSLISVSKLVKQIKCLALFTDTICVLQDRFSRTLIGTGEERDGVYYLTDAATTTVHKVDITTDHALWHQRLGHPSFSVLSSLPLFSGSSCSVSSRSCDVCFRAKQTREVFPDSSNKSTDCFSLIHCDVWGPYRVPSSCGAVYFLTIVDDFSRSVWTYLLLAKSEVRSVLTNFLAYTEKQFGKSVKIIRSDNGTEFMCLSSYFKEQGIVHQTSCVGTPQQNGRVERKHRHILNVSRALLFQASLPIKFWGEAVMTAAYLINRTPSSIHNGLSPYELLHGCKPDYDQLRVFGSACYAHRVTRDKDKFGERSRLCIFVGYPFGQKGWKVYDLSTNEFIVSRDVVFRENVFPYATNEGDTIYTPPVTCPITYDEDWLPFTTLEDRGSDENYLSDPPVCVTNVSESDTEHDTPQSLPTPVDDPLSPSTSVTPTQTPTNSSSSTSPSTNVSPPQQDTTPIIENTPPRQGKRQVQQPARLKDYILYNASCTPNTPHVLSPSTSQSSSSIQGNLQYPLTDYISDECFSAGHKVFLAAITANDEPKHFKEDVKVKVWNDAMYKEVDALEVNKTWDIVDLPTGKVAIGSQWVYKTKFNADGTVERYKARLVVQGNNQIEGEDYTETFAPVVKMTTVRTLLRLVAANQWEVYQMDVHNAFLHGDLEEEVYMKLPPGFRHSHPDKVCRLRKSLYGLKQAPRCWFKKLSDALKRFGFIQGYEDYSFFSYSCKGIELRVLVYVDDLIICGNDEYMVQKFKEYLGRCFSMKDLGKLKYFLGIEVSRGPDAPREAHLEAAMRIVRYLKGSPGQGILLSANKDLTLEVYCDSDFQSCPLTRRSLSAYVVLLGGSPISWKTKKQDTVSHSSAEAEYRAMSVALKEIKWLNKLLKELGITLAAPTRLFCDSKAAISIAANPVFHERTKHIERDCHSVRDAVRDGIITTHHVRTSEQLADIFTKALGRNQFIYLMSKLGIQNLHTPT

SEQ ID NO: 1378 - protein, 143 aa, Arabidopsis thaliana
  Clone ID: AT_F7F22.C1.p13.tg
MQENKKIDENIDDFLKIVVDLNHIQIEVRDEVQAILLLSSLPSRYDGLVETMKYSNSREKLRLNDVMVAARDKEREMSQNNRLIAEGHYARRRPVGKNNNQGNKGKNRSWSKSADGKRVCWICGKEKHFNEQCYKWLERNKPK

SEQ ID NO: 1379 - protein, 516 aa, Arabidopsis thaliana
  Clone ID: AT_T2L5.C1.p20.tg
MSSSKGSNTVSLLHSVNVPNLENSAPSSSTDDESLFVAMNDQFMAEDSDSTESDTSIESDPSDVWKLFAVPTENATEEQVNDSLNNMLTQFYVPSTDEEGSFGVPNLGTIGEHGLKLEELNADLFDVPVIHANGAFGAMNEYGANDEYEMLMLMGNNKEDENEAIENELEHAIDQLIAECAQDFGLIGEKGGGNGNDGGDSSSDSFESLTLEPKSPSVINISSDSSQPIVMMLNPSKPESCWEIEMFKGDEPSEEEGRGRWDPMLLEQELNHEYLMNRLKLDEERSKEKMAQRIVGVNLHPLRIGYGINSKVKPRIRATARKSVRRKLPTPAKRPWEICGYIDHPTEQCLHPPQAMPYMVDCAKCYSCGGVGHVSMYCPYLAPNAGEGSSRDALVFMGKGETSHERRHEGDSKTFVKMSEEFVGDRMRKSCLNAWPIDRMCPESTKPAKGKDGQEWARMGKDGKSWACRGRNFPCRVQNRHVWTPHLRCLAAQVTNLGAKVGLVLEPKLAESWSRS

SEQ ID NO: 1380 - protein, 1911 aa, Arabidopsis thaliana
  Clone ID: AT_F1M23.C1.p14.tg
MSAGGDSRVLMHGQDATMVDVGGKDRPPEDPPDKPESWARKVIGTGLGGMPIPEEILDDEFVKSRVTLKFPNGVDGEPVITIGQEVIDAMNGLWKQCMFVKVLGRKVSLAAVSHRLREMWKPSGAMYVLDLPRHFFMVRFEKEEEFLTALTGGPWRAFGSCLLVKAWSPEFNPLKDEIVTTPIWVRIADMPVSFYHKSILMSVAQGLGRPLKVDLTMLHFERGRFARVCVEVDLKRPLQGALLVNGDRYYVAYEGLTNICSKCGIYGHLVHNCPKELSEQAAAVVNQLRVSEVDVANTVPQGDGFIMVNKAGRREESGLRNSGVPAGGDRGVGGNQRRELYRRKGAENIALSNSCGRLADDLATKEVRKVANQSESNKENENIQPRAPREQSVEQGKAVVFGALLENRISGPYGGSKEKRPVNKKAGEANGSKPNHVRNNRPTRSLVFGPTKGDYEKLTNGKQIRVEKESFGRVTNGTRTVVDGGAATAMEVGVTALNEQECMGQGIVRSGSGVVAQERSPTVAESDLVGQKSRSPGPGVVTHERPPTSPNRVIMGMNLVLSGAGVITHERPPAEMDSHALELRSITLGSVYITDVLAIFETHAGGDQASRICQGLGFENSFRVDAVGHSGGLWLLWRTGIGEVSVVDSTDQFIHAKDVNGKDNVNLVVVYAAPTASRRSGLWDRLGDVIRSMDGPVVIGGDFNTIVRLDERSGGNGRLSSDSLAFGEWINDHSLIDLGFKGNKFTWKRGREERFFVAKRLDRVLCCAHARLKWQEASVLHLPFLASDHAPLYVQLTPEVSGNRGRRPFRFEAAWLSHPGFKELLLTSWNKDISTPEALKVQELLDLHQSDDLLKKEEELLKDFDVVLEQEEVVWMQKSREKWFVHGDRNTKFFHTSTIIRRRRNQIEMLQDNDGRWLSNAQELETHAIDYYKRLYSLDDLDAVVEQLPQEGFTALSEADFSSLTKPFSPLEVEGAIRSMGKYKAPGPDGFQPVFYQQGWEVVGESVTKFVMDFFSSGSFPQETNDVLVVLIAKVLKPEKITQFRPISLCNVLFKTITKVMVGRLKGVINKLIGPAQTSFIPGRLSTDNIVVVQEVVHSMRRKKGVKGWMLLKLDLEKAYDRIRWDLLEDTLKAAGLPGTWVQWIMKCVEGPSMRLLWNGEKTDAFKPLRGLRQGDPLSPYLFVLCIERLCHLIESSIAAKKWKPIKISQSGPRLSHICFADDLILFAEASIDQIRVLRGVLEKFCGASGQKVSLEKSKIYFSKNVLRDLGKRISEESGMKATKDLGKYLGVPILQKRINKETFGEVIKRFSSRLAGWKGRMLSFAGRLTLTKAVLTSILVHTMSTIKLPQSTLDGLDKVSRAFLWGSTLEKKKQHLVAWTRVCLPRREGGLGIRSATAMNKALIAKVGWRVLNDGSSLWAQVVRSKYKVGDVHDRNWTVAKSNWSSTWRSVGVGLRDVIWREQHWVIGDGRQIRFWTDRWLSETPIADDSIVPLSLAQMLCTARDLWRDGTGWDMSQIAPFVTDNKRLDLLAVIVDSVTGAHDRLAWGMTSDGRFTVKSAFAMLTNDDSPRQDMSSLYGRVWKVQAPERVRVFLWLVVNQAIMTNSERKRRHLCDSDVCQVCRGGIESILHVLRDCPAMSGIWDRIVPRRLQQSFFTMSLLEWLYSNLRQGLMTEGSDWSTMFAMAVWWGWKWRCSNIFGENKTCRDRVRFIKDLAVEVSIAYSREVELRLSGLRVNKPIRWTPPMEGWYKINTDGASRGNPGLASAGGVLRNSAGAWCGGFAVNIGRCSAPLAELWGVYYGLYMAWAKQLTHLELEVDSEVVVGFLKTGIGETHPLSFLVRLCHNFLSKDWTVRISHVYREANSLADGLANHAFSLSLGLHVFDEIPISLVMLLSEDNDGPARLRRVCL

SEQ ID NO: 1381 - protein, 1415 aa, Arabidopsis thaliana
  Clone ID: AT_F25O24.C1.p20.tg
MADNSDSSSALCFSHYVTLKLSTANYLLWKIQFETWLNNQRLLGFVTGANPCPNATRSIRNGDQVTEATNPDFLTWVQNDQKIMGWLLGSLSEDALRSVYGLHTSREVWFSLAKKYNRVSASRKSDLQRRLNPVSKNEKSMLEYLNCVKQICDQLDSIGCPVPENEKIFGVLNGLGQEYMLVSTMIKGSMDTYPMSFEDVVFKLINFDDKLQNGQSGGNRGRNNYTTKGRGFPQQISSGSPSDSGTRPTCQICNKYGHSAYKCWKRFDHAFQSEDFSKAFAAMRVSDQKSNPWVTDSGATSHITNSTSQLQSAQPYSGEDSVIVGNSDFLPITHIGSAVLTSNQGNLPLRDVLVCPNITKSLLSVSKLTSDYPCVIEFDSDGVIVKDKLTKQLLTKGTRHNDLYLLENPKFMACYSSRQQATSDEVWHMRLGHPNQDVLQQLLRNKAIVISKTSHSLCDACQMGKICKLPFASSDFVSSRLLERVHCDLWGPAPVVSSQGFRYYVIFIDNYSRFTWFYPLRLKSDFFSVFLTFQKMVENQCQQKIASFQCDGGGEFISNQFVSHLAECGIRQLISCPYTPQQNGIAERKHRHITELGSSMMFQGKVPQFLWVEAFYTSNFLCNLLPSSVLKDQKSPYEVLMGKAPVYTSLRVFGCACYPNLRPYASNKFDPKSLLCVFTGYNEKYKGYKCFHPPTGKIYINRHVLFDESKFLFSDIYSDKVSGTNSTLVSAWQSNFLPKSIPATPEVLDISNTAASFSDEQGEFSGAVGGGGCGCTADLDSVPIGNSLPSSPVTQQNSPQPETPISSAGSGNDAEDSELSENSENSESSVFSEATTETEAADNTNDQSHPMITRSKSGIFKPNPKYAMFTVKSNYPVPKTVKTALKDPGWTDAMGEEYDSFEETHTWDLVPPDSFITPLGCRWVFKTKLKADGTLDRLKARLVAKGYEQEEGVDYMETYSPVVRTATVRTILHVATINKWEIKQLDVKNAFLHGDLKETVYMYQPPGFENQDRPDYVCKLNKAIYGLKQAPRAWFDKFSTFLLEFGFICTYSDPSLFVFLKGRDLMFLLLYMDDMLLTGNNKKYAMDLLVAAGMADCAPMPTPLPLQLDKVPGQQESFADPTYFRSLAVNLVCQKMHSPTVADFNLLKRVLRYLKGKVQMGLNLHNNTDITLRAYSDSDWANCKETRRSVGGFCTFLGTNIISWSAKRHPTVSRSSTEAEYRTLSIAATEVKWISSLLREIGIYQPAPPELYCDNLSAVYLTANPAMHNRSKAFDVDFHYVRERVALGALVVKHVPASHQLADIFTKSLPQRPFFDLRYKLGVVLPPTPSLRGCVNQREPPLQSEALLSANGPATLNNTLGLSQSVKPINLKSSLPCNGNKIPQFPAHQRTGFTANHLSLHNKFDPLCSSVVMCS

SEQ ID NO: 1382 - protein, 717 aa, Arabidopsis thaliana
  Clone ID: AT_T18B16.C1.p100.tg
MMEVSLTAGAIGKIMNGEVTTEADMIPVLQVTDLKQIMAQQDPTRERFRMVLSDGTYLHQGMLGTDLNNLVKEGTLQPGSIVRLTRFVGDVIKGRRIVIVPQLEVLKQISDIIGHPVPGGKHNDQRGADSGIKFNTTEQQGSGIRQVNNIEPGRSNAAISPQVGAPPKIIPVNALSPYSGRWTIKARVTNKAALKQYSNPRGEGKVFNFDLLDADGGEIRVTCFNAVADQFYDQIVVGNLYLISRGSLRPAQKNFNHLRNDYEIMLDNASTIKQCYEEDAAIPRHQFHFRTIGDIESMENNCIVDVIGIVSSISPTVTITRKNGTATPKRSLQLKDMSGRSVEVTMWGDFQSLCDSGVFPVLAVKAGRISEFNGKTVSTIGSSQLFIDPDFVEAEKLKNWFEREGKSVPCISLSREFSGSGKVDVRKTISQIKDEKLGTSEKPDWITVSATILYLKFDNFCYTACPIMNGDRPCSKKVTDNGDGTWRCEKCDKSVDECDYRYILQLQIQDHTDLTCVTAFQEAGEEIMGISAKDLYYVKNEHKDEEKFEDIIRKVAFTKYNFKLKVKEETFSDEQRVKATVVKVDKLNYSADTRTMLGAMDKLRTRDANSLPINPEGSDYNADVVNTGIGSSGTRDPSSVQRRDFGLHAHQSGQSGNHYSGGGATTSCNVCGNSGHVSAKCPGATKPQEQGQYMGGSYRGTTGSYGGGLPRQHVGSY

SEQ ID NO: 1383 - protein, 358 aa, Arabidopsis thaliana
  Clone ID: AT_T13H18.C1.p12.tg
MSDVVVVTEKQASGGGGAPSSIQCPMLNSSNYTVWAMRMRSFEDIVGRRKVYEERIFDEEDVQDKQSKLMYANTENQTSQYNREYHGDSKGRGRGGCSYYKGRGRGRFNGGRDTSKIMYYRCDKLGHYASDCPDRLLKLQETQENEKDDTQTADELMVHEVVYLNEKNCIPSNYETNTGEDVFGDQRYFTSTDDSVTGKVRFGDDSRIDIKRKGSILFFDKNGEHRKMLDVYFIPNLKSNIIRLGQATEPGCDIRMKDDILTMHDQEGKLLVHATRSKNRLYNVRMARNGTTMEMRRHFGAKSTEKDAKDDFSPRFSESVNRYTPSVDRHQFRPSKVHYAFKFTEEEICPRRLPYLYY

SEQ ID NO: 1384 - protein, 542 aa, Arabidopsis thaliana
  Clone ID: AT_F17M5.C1.p130.tg
MEVDDGYVEYVPVEERLAQMKRKVVEEPGKGMMEHLSDKKKLMSVGELARGITYTEPLSTWWKPPLHVRKMSTKQMDLIRKQWHITVNGEDIPPPIKNFMDMKFPSPLLRMLKDKGIMHPTPIQVQGLPVVLSGRDMIGIAFTGSGKTLVFVLPMIILALQEEIMMPIAAGEGPIALVICPSRELAKQTYDVVEQFVASLVEDGYPRLRSLLCIGGVDMRSQLDVVKKGVHIVVATPGRLKDILAKKKMSLDACRLLTLDEADRLVDLGFEDDIRHVFDHFKSQRQTLLFSATMPAKIQIFATSALVKPVTVNVGRAGAANLDVIQEVEYVKQEAKIVYLLECLQKTTPPVLIFCENKADVDDIHEYLLLKGVEAVAIHGGKDQEDRDYAISLFKAGKKDVLVATDVASKGLDFPDIQHVINYDMPGEIENYVHRIGRTGRCGKTGIATTFINKNQSEITLLDLKHLLQEAKQRIPPVLAELNGPMEETETIANASGVKGCAYCGGLGHRILQCPKFEHQKSVAISSSRKDHFGSDGYRGEV

SEQ ID NO: 1385 - protein, 1415 aa, Arabidopsis thaliana
  Clone ID: AT_F28K20.C1.p17.tg
MATSYPFPDNVHVTSSVTLKLTDSNYLLWKTQFESLLSSQKLIGFVNGAVNAPSQSRLVVNGEVTSEEPNPLYESWFCTDQLVRSWLFGTLSEEVLGHVHNLSTSRQIWVSLAENFNKSSVAREFSLRQNLQLLSKKEKPFSVYCREFKTICDALSSIGKPVDESMKIFGFLNGLGRDYDPITTVIQSSLSKLPTPTFNDVVSEVQGFDSKLQSYEEAASVTPHLAFNIERSESGSPQYNPNQKGRGRSGQNKGRGGYSTRGRGFSQHQSSPQVSGPRPVCQICGRTGHTALKCYNRFDNNYQAEIQAFSTLRVSDDTGKEWHPDSAATAHVTSSTNGLQSATEYEGDDAVLVGDGTYLPITHTGSTTIKSSNGKIPLNEVLVVPNIQKSLLSVSKLCDDYPCGVYFDANKVCIIDLQTQKVVTTGPRRNGLYVLENQEFVALYSNRQCAATEEVWHHRLGHANSKALQHLQNSKAIQINKSRTSPVCEPCQMGKSSRLPFLISDSRVLHPLDRIHCDLWGPSPVVSNQGLKYYAIFVDDYSRYSWFYPLHNKSEFLSVFISFQKLVENQLNTKIKVFQSDGGGEFVSNKLKTHLSEHGIHHRISCPYTPQQNGLAERKHRHLVELGLSMLFHSHTPQKFWVESFFTANYIINRLPSSVLKNLSPYEALFGEKPDYSSLRVFGSACYPCLRPLAQNKFDPRSLQCVFLGYNSQYKGYRCFYPPTGKVYISRNVIFNESELPFKEKYQSLVPQYSTPLLQAWQHNKISEISVPAAPVQLFSKPIDLNTYAGSQVTEQLTDPEPTSNNEGSDEEVNPVAEEIAANQEQVINSHAMTTRSKAGIQKPNTRYALITSRMNTAEPKTLASAMKHPGWNEAVHEEINRVHMLHTWSLVPPTDDMNILSSKWVFKTKLHPDGSIDKLKARLVAKGFDQEEGVDYLETFSPVVRTATIRLVLDVSTSKGWPIKQLDVSNAFLHGELQEPVFMYQPSGFIDPQKPTHVCRLTKAIYGLKQAPRAWFDTFSNFLLDYGFVCSKSDPSLFVCHQDGKILYLLLYVDDILLTGSDQSLLEDLLQALKNRFSMKDLGPPRYFLGIQIEDYANGLFLHQTAYATDILQQAGMSDCNPMPTPLPQQLDNLNSELFAEPTYFRSLAGKLQYLTITRPDIQFAVNFICQRMHSPTTSDFGLLKRILRYIKGTIGMGLPIKRNSTLTLSAYSDSDHAGCKNTRRSTTGFCILLGSNLISWSAKRQPTVSNSSTEAEYRALTYAAREITWISFLLRDLGIPQYLPTQVYCDNLSAVYLSANPALHNRSKHFDTDYHYIREQVALGLIETQHISATFQLADVFTKSLPRRAFVDLRSKLGVSGSPTPSLRGSVSNKQVTGPTTTKGPSQPSQIEEDKIDSSSKQSNDRTEEGRFA

SEQ ID NO: 1386 - protein, 1149 aa, Arabidopsis thaliana
  Clone ID: AT_T26I20.C1.p9.tg
MDQSMDLYTLPSLNISNCVTVKLTDRNYILWKSQFESFLSGQGLLGFVNGAYAAPTGTVSGPQDAGVTEAIPNPDYQAWFRSDQVVMSEDILSVVVGSKTSHEVWMNLAKHFNRISSSRIFELQRRLHSLSKEGKTMEEYLRYLKTICDQLASVGSPVAEKMKIFAMVHGLTREYEPLITSLEGTLDAFPGPSYEDVVYRLKNFDDRLQGYTVTDVSPHLAFNTFRSSNRGRGGRNNRGKGNFSTRGRGFQQQFSSSSSSVSASEKPMCQICGKRGHYALQCWHRFDDSYQHSEAAAAAFSALHITDVSDDSGWVPDSAATAHITNNSSRLQQMQPYLGNDTVMASDGNFLPITHIGSANLPSTSGNLPLKDVLVCPNIAKSLLSVSKLTKDYPCSFTFDADGVLVKDKATCKVLTKGSSTSEGLYKLENPKFQMFYSTRQVKATDEVWHMRLGHPNPQVLQLLANKKAIQINKSTSKMCESCRLGKSSRLPFIASDFIASRPLERVHCDLWGPAPVSSIQGFQYYVIFIDNRSRFCWFYPLKHKSDFCSLFMKFQSFVENLLQTKIGTFQSDGGGEFTSNRFLQHLQESGIQHYISCPHTPQQNGLAERKHRQLTERGLTLMFQSKAPQRFWVEAFFTANFLSNLLPTSALDSSTTPYQVLFGKAPDYSALRTFGCACFPTLRAYARNKFDPRSLKCIFLGYTEKYKGYRCFFPPTNRVYLSRHVLFDESSFPFIDTYTSLQHPSPTPMFDAWLKSFPSSSSPLENDQTAGFNSGASVPVITAQQTQPILSLKDGPNILLPEGEITVSSNNQDIEDEPICVTPLQTLSSEDNAKSSETLSMGSEECSECTASFDLDPIGNNALSSSPRHDQLTSSIPRAATESTHPMTTRLKKGIIKLNQRVKLNVDGSLDKYKARLVAQGFKQEEGIDYLETYSPVVRSATVRAVLHLSTIMNWELKQMDVKNGFLHGDLTETVYMKQPAGFIDKAHPDHVCLLHKALYGLKQAPRAWFDKFSKFLLSFGFVCSMSDPSLFVCVKNKDVIMLLLYVDDMVITGNSSKLLSSLLSELNKQFKMKDLGRLSYFLGIQAQFHSQGLFLSQQKYAEDLLATAAMSNCSPVATPLPLQPERTPNQTELFDNPSYFRSLAGKL

SEQ ID NO: 1387 - protein, 728 aa, Arabidopsis thaliana
  Clone ID: AT_MFD22.C1.p10.tg
MAAAKKPTLQDVVSDELNYELWAPTLKNALTEKGLWDVVENLMPADLSKSPELATEILPEDLLKWSDFMVKDRNALQILQSCLPVSVLRLTLETNSAKDLWDLLESANEQAKLDKKLEQDKVEEGERISSLLTKIADNSLYSNLLAISQMVISLSDSYEHETNELILMGLKKLSFYRFRDLLDLLESCTVNQTLYNIMKGNGYGSSSHDLGRIYWLNSMSDSYDGAALVMEELMCVKNLTFKNTRELFDMFELVSVKTINEIMKDFEVGSSLRSKEFCHSLNDLRGLLKEAKLEKKGDCSASMVLKRVMSSRHERGECIHCGGKGHVFKDCSNRKNQSMNVVFKFGPSGINLSLDETFFGSLAANPMTLQDVVSDDLNYEIWAHIMKTSLVEKGLWYVVKYGIPPDLSKIRELATKIQAQDLSIYRDYVAKDSKALQILQSSLPDSVFRKTLEVTTAKDLWDLLKEADVQAKLEKKLPEYQMLAIDVGHLTFDEDMWMVYTTTTNHLTPYVKYFTNLDRTYRAKIRSIIGSIIMSEGRGDVRIMTREGQKTIKNVLYVPGINRNVLSVPQMTRIGYRVVIDAGNLKCTVKDRTGRLFAESLWDNKRCDWSATTKPNLQDIISDDLNMEVWSAMLKTILTEEGLWDVVANGVPPDPSKIPKLAATIQAEELCKWRELAREDMKALQILQSSLTDSVFRKTLSATSAKDLWDMLNEVPDHVAECLVDDSP

SEQ ID NO: 1388 - protein, 1402 aa, Arabidopsis thaliana
  Clone ID: AT_T4E14.C1.p6.tg
MELYSVPSLNISNCVTVTLTAKNYILWKSQFESFLDGQGLLGFVTGSIPAPSQTSVVSDIDGSTSASPNPEYYTWFKTDRVVKSWLLGSFLEDILSVVVNCNTSHEVWISVANHFNRVSSSRLFELQRRLQNVSKRDKSMDEYLKDLKTICDQLASVGSPVTEKMKIFAALNGLGREYEPIKTTIENSMDALPGPSLEDVIPKLTGYDDRLQGYLEETAVSPHVAFNITTSDDSNASGYFNAYNRGKGKSNRGRNSFSTRGRGFHQQISSTNSSSGSQSGGTSVVCQICGKMGHPALKCWHRFNNSYQYEELPRALAAMRITDITDQHGNEWLPDSAATAHVTNSPRSLQQSQPYHGSDAVMVADGNFLPITHTGSTNLASSSGNVPLTDVLVCPSITKSLLSVSKLTQDYPCTVEFDSDGVRINDKATKKLLIMGSTCDGLYCLKDDSQFKAFFSTRQQSASDEVWHRRLGHPHPQVLQQLVKTNSISINKTSKSLCEACQLGKSTRLPFVSSSFTSNRPLERVHCDLWGPSPITSVQGFRYYAVFIDHYSRFSWIYPLKLKSDFYNIFVAFHKLVENQLNHKISVFQCDGGGEFVNHKFLQHLQNHGIQQHISYPHTPQQNGLAERKHRHLVELGLSMLFQSKVPLKFWVEAFFTANFLINLLPTSAVEDAISPYEKLHQTTPDYTALRSFGCACFPTMRDYAMNKFDPRSLKCVFLGYNDKYKGYRCLYPPTGRVYISRHVIFDETAYPFSHHYKHLHSQPTTPLLAAWFKGFESSVSQAPPKVSPAQPPQRKATLPTPPLFTAADFPPLPRRSPQLSQNSAAALVSQPSTTTINSTHPPAVVNESSERTINFDSASIGDSSHSSQLLVDDTVEDLMAAPVPTQQAPPPTNTHPMITRAKVGITKPNPRYVFLSHKVTYPEPKTVTAALKHPGWTGAMTEEMGNCSETNTWSLVPYTPNMHVLGSKWVFRTKLHADGTLNKLKARIVAKCFLQEEGIGYLETYSPVVRTPTVQLVLHLATALNWELKQMDVKNAFLHGDLNETVYMTQPAGFVDKSKPTHVCLLHKSIYGLKQSPRAWFDKFSTFLLEFGFFCSKSDPSLFIYAHNNNLILLLLYVDDMVITGNSSQTLSSLLAALNKEFRMTDMGQLHYFLGIQVQRNQHGLFMSQQKYAEDLLVASAMENCTPLPTPLPVQLDRVPHQEEPFTDPTYFRSIAGKLQYLTLTRPDIHFAVNFVCQKMHQPTMSDFHLLKRILRYIKGTITMGISYNQNSPTLLQAYSDSDWGNCKLTRRSVGGLCTFMATNLVSWSSKKHPTVSRSSTEAEYRTLSDAASEILWLSTLLRELGIPLPDTPELFCDNLSAVYHTANPAFHAMIDKATKSTNFRVLYPNGDSILTWHENA

SEQ ID NO: 1389 - protein, 1260 aa, Arabidopsis thaliana
  Clone ID: AT_T18B16.C1.p160.tg
MDGEGEGSGIRLSKRFAGGKVTGGSLEVDYKTKSGTAWSHSFLNQKPWHPLSYPNQRRKWIAEQTHAQHDRRAEEVAREVIHRTSSPISRDCFAQEQEFFKQAALISKKEREKIETMKAVSFMYVRPPGYDPESAKAAEYKDEKHKGQGSSTQDPVADDNVGSRPEESQGGGERTQERKKPRPKDVFGRALPTEEEFEVLKNAPRMETGIPGRVKPFAVEVRNVKCLRCGNFGHQSGDRDCPLKDAVMPNEELRLKRDDPLTAIIAHTDPSEPLKWELKQKPGLSPPRGGFDPDDPNQQIVAEDIFDEYGGFLEGSIPIEILKSMSSDKKRKSKKNKRHKKHSSRTVEETDESSTGSEDSREKRGSKKRKKLKKKSKKQYDSDSLSFEGSGSDSYRLSRRRHTKHVDPSASLKSEVYHQGNSHREKHYYDEKHQKRKEIVDRPSASSDDSDYYRSNSSRKKRSEDDYKSHHRERKQVHSNDPVSEKSQKQHYSESGKIQRVEKEHRYDERRHRYVDMESENRNRSEKKPRYDDRDSEKHHRSVKGKEKHVYEASDDPEEFSDRYRSTKKTESDSESNRRSRKKKHELSSEEEEGESRVIGEQVRKSMSLIHRRLYRISGLSSVNAWNLQIREAVNRNDPVESLLLFREMKRGGFEPNNFTFPFVAKACARLADVGCCEMVHAHLIKSPFWSDVFVGTATVDMFVKCNSVDYAAKVFERMPERDATTWNAMLSGFCQSGHTDKAFSLFREMRLNEITPDSVTVMTLIQSASFEKSLKLLEAMHAVGIRLGVDVQVTVANTWISTYGKCGDLDSAKLVFEAIDRGDRTVVSWNSMFKAYSVFGEAFDAFGLYCLMLREEFKPDLSTFINLAASCQNPETLTQGRLIHSHAIHLGTDQDIEAINTFISMYSKSEDTCSARLLFDIMTSRTCVSWTVMISGYAEKGDMDEALALFHAMIKSGEKPDLVTLLSLISGCGKFGSLETGKWIDARADIYGCKRDNVMICNALIDMYSKCGSIHEARDIFDNTPEKTVVTWTTMIAGYALNGIFLEALKLFSKMIDLDYKPNHITFLAVLQACAHSGSLEKGWEYFHIMKQVYNISPGLDHYSCMVDLLGRKGKLEEALELIRNMSAKPDAGIWGALLNACKIHRNVKIAEQAAESLFNLEPQMAAPYVEMANIYAAAGMWDGFARIRSIMKQRNIKKYPGESVIQVNGKNHSFTVGEHGHVENEVIYFTLNGLSLFAKDKHVLYKDVYKEQSYELFI

SEQ ID NO: 1390 - protein, 1461 aa, Arabidopsis thaliana
  Clone ID: AT_T13C7.C1.p5.tg
MVPGIRVTRKSARSKVSTGSVARKSSKSTGVLDSASDSPPMARSQTAGASRGVFSSGFDDPTQSPFFLHSADHPGLSIISHRLDETTYGDWSVAMRISLDAKNKLGFVDGSLPRPLESDPNFRLWSRCNSMVKSWLLNSVSPQIYRSILRLNDATDIWRDLFDRFNLTNLPRTYNLTQEIQDLRQGTMSLSEYYTLLKTLWDQLDSTEALDDPCTCGKAVRLYQKAEKAKIMKFLAGLNESYAIVRRQIIAKKALPSLAEVYHILDQDNSQKGFFNVVAPPAAFQVSEVSHSPITSPEIMYVQSGPNKGRPTCSFCNRVGHIAERCYKKHGFPPGFTPKGKSSDKPPKPQAVAAQVTLSPDKMTGQLETLAGNFSPDQIQNLIALFSSQLQPQIVSPQTASSQHEASSSQSVAPSGILFSPSTYCFIGILAVSHNSLSSDTWVIDSGATHHVSHDRKLFQTLDTSIVSFVNLPTGPNVRISGVGTVLINKDIILQNVLFIPEFRLNLISISSLTTDLGTRVIFDPSCCQIQDLTKGLTLGEGKRIGNLYVLDTQSPAISVNAVVDVSVWHKRLGHPSFSRLDSLSEVLGTTRHKNKKSAYCHVCHLAKQKKLSFPSANNICNSTFELLHIDVWGPFSVETVEGYKYFLTIVDDHSRATWIYLLKSKSDVLTVFPAFIDLVENQYDTRVKSVRSDNAKELAFTEFYKAKGIVSFHSCPETPEQNSVVERKHQHILNVARALMFQSNMSLPYWGDCVLTAVFLINRTPSALLSNKTPFEVLTGKLPDYSQLKTFGCLCYSSTSSKQRHKFLPRSRACVFLGYPFGFKGYKLLDLESNVVHISRNVEFHEELFPLASSQQSATTASDVFTPMDPLSSGNSITSHLPSPQISPSTQISKRRITKFPAHLQDYHCYFVNKDDSHPISSSLSYSQISPSHMLYINNISKIPIPQSYHEAKDSKEWCGAIDQEIGAMERTDTWEITSLPPGKKAVGCKWVFTVKFHADGSLERFKARIVAKGYTQKEGLDYTETFSPVAKMATVKLLLKVSASKKWYLNQLDISNAFLNGDLEETIYMKLPDGYADIKGTSLPPNVVCRLKKSIYGLKQASRQWFLKFSNSLLALGFEKQHGDHTLFVRCIGSEFIVLLVYVDDIVIASTTEQAAQSLTEALKASFKLRELGPLKYFLGLEVARTSEGISLSQRKYALELLTSADMLDCKPSSIPMTPNIRLSKNDGLLLEDKEMYRRLVGKLMYLTITRPDITFAVNKLCQFSSAPRTAHLAAVYKVLQYIKGTVGQGLFYSAEDDLTLKGYTDADWGTCPDSRRSTTGFTMFVGSSLISWRSKKQPTVSRSSAEAEYRALALASCEMAWLSTLLLALRVHSGVPILYSDSTAAVYIATNPVFHERTKHIEIDCHTVREKLDNGQLKLLHVKTKDQVADILTKPLFPYQFAHLLSKMSIQNIFVFSS

SEQ ID NO: 1391 - protein, 726 aa, Arabidopsis thaliana
  Clone ID: AT_F4H5.C1.p23.tg
MANDELVKSENRDISFRQDHFTGSRHNYELFVGHDYNSAFEQLLDINLQIGASCNGNELWNNLQDHRGIDETKEVACLDVNQNDGYRSFPDNDDSEIDKSTVIEATGAIHKVESQDTDDKLELEMSQSTEFSQKSVMPSPSSQCWSMSGAGTDHEMVVGMEFSDAYACRRAIKNAAISLRFEMRTIKSDKTRFTAKCNSKGCPWRIHCAKVSNAPTFTIRTIHGSHTCGGISHLGHQQASVQWVADVVAEKLKENPHFKPKEILEEIYRVHGISLSYKQAWRGKERIMATLRGSTLRGSFEEEYRLLPQYCDEIRRSNPGSVAVVHVNPIDGCFQHLFISFQASISGFLNACRPLIALDSTVLKSKYPGTLLLATGFDGDGAVFPLAFAIVNEENDDNWHRFLSELRKILDENMPKLTILSSGERPVVDGVEANFPAAFHGFCLHYLTERFQREFQSSVLVDLFWEAAHCLTVLEFKSKINKIEQISPEASLWIQNKSPARWASSYFEGTRFGQLTANVITESLSNWVEDTSGLPIIQTMECIHRHLINMLKERRETSLHWSNVLVPSAEKQMLAAIEQSRAHRVYRANEAEFEVMTCEGNVVVNIENCSCLCGRWQVYGLPCSHAVGALLSCEEDVYRYTESCFTVENYRRAYAETLEPISDKVQWKENDSERDSENVIKTPKAMKGAPRKRRVRAEDRDRVRRVVHCGRCNQTGHFRTTCTAPM

SEQ ID NO: 1392 - protein, 1456 aa, Arabidopsis thaliana
  Clone ID: AT_T4I9.C1.p16.tg
MATHAEEIVLVNTNILNVNMSNVTKLTSTNYLMWSRQVHALFDGYELAGFLDGSTPMPPATIGTDAVPRVNPDYTRWRRQDKLIYSAILGAISMSVQPAVSRATTAAQIWETLRKIYANPSYGHVTQLRFITRFDQLALLGKPMDHDEQVERVLENLPDDYKPVIDQIAAKDTPPSLTEIHERLINRESKLLALNSAEVVPITANVVTHRNTNTNRNQNNRGDNRNYNNNNNRSNSWQPSSSGSRSDNRQPKPYLGRCQICSVQGHSAKRCPQLHQFQSTTNQQQSTSPFTPWQPRANLAVNSPYNANNWLLDSGATHHITSDFNNLSFHQPYTGGDDVMIADGSTIPITHTGSASLPTSSRSLDLNKVLYVPNIHKNLISVYRLCNTNRVSVEFFPASFQVKDLNTGVPLLQGKTKDELYEWPIASSQAVSMFASPCSKATHSSWHSRLGHPSLAILNSVISNHSLPVLNPSHKLLSCSDCFINKSHKVPFSNSTITSSKPLEYIYSDVWSSPILSIDNYRYYVIFVDHFTRYTWLYPLKQKSQVKDTFIIFKSLVENRFQTRIGTLYSDNGGEFVVLRDYLSQHGISHFTSPPHTPEHNGLSERKHRHIVEMGLTLLSHASVPKTYWPYAFSVAVYLINRLPTPLLQLQSPFQKLFGQPPNYEKLKVFGCACYPWLRPYNRHKLEDKSKQCAFMGYSLTQSAYLCLHIPTGRLYTSRHVQFDERCFPFSTTNFGVSTSQEQRSDSAPNWPSHTTLPTTPLVLPAPPCLGPHLDTSPRPPSSPSPLCTTQVSSSNLPSSSISSPSSSEPTAPSHNGPQPTAQPHQTQNSNSNSPILNNPNPNSPSPNSPNQNSPLPQSPISSPHIPTPSTSISEPNSPSSSSTSTPPLPPVLPAPPIIQVNAQAPVNTHSMATRAKDGIRKPNQKYSYATSLAANSEPRTAIQAMKDDRWRQAMGSEINAQIGNHTWDLVPPPPPSVTIVGCRWIFTKKFNSDGSLNRYKARLVAKGYNQRPGLDYAETFSPVIKSTSIRIVLGVAVDRSWPIRQLDVNNAFLQGTLTDEVYMSQPPGFVDKDRPDYVCRLRKAIYGLKQAPRAWYVELRTYLLTVGFVNSISDTSLFVLQRGRSIIYMLVYVDDILITGNDTVLLKHTLDALSQRFSVKEHEDLHYFLGIEAKRVPQGLHLSQRRYTLDLLARTNMLTAKPVATPMATSPKLTLHSGTKLPDPTEYRGIVGSLQYLAFTRPDLSYAVNRLSQYMHMPTDDHWNALKRVLRYLAGTPDHGIFLKKGNTLSLHAYSDADWAGDTDDYVSTNGYIVYLGHHPISWSSKKQKGVVRSSTEAEYRSVANTSSELQWICSLLTELGIQLSHPPVIYCDNVGATYLCANPVFHSRMKHIALDYHFIRNQVQSGALRVVHVSTHDQLADTLTKPLSRVAFQNFSRKIGVIKVPPSCGGVLRI

SEQ ID NO: 1393 - protein, 530 aa, Arabidopsis thaliana
  Clone ID: AT_T12J2.C1.p8.tg
MNSVSVLTQGKETEVGPKVVVVDSSNVNSVPDPRWPYLTRWTQNSPSPSPSVISPSISLVKPLTIGSSPKIARSSSLDFVNLTSSLDSTLPVTVEPPIEHVVSITSLSYSAEVSLPTSALPPIVSATLDESIAPVKLVSPTLKGAWAKQLKFTSSSASQQDVGGAPMQSHLEATKEDNVRFPWAAKMDPAARNLYRATSPEFMEDGIPKRGLWHVDDCLMFVAPWSTVNTFDLPEISTIPVWVTLKNIPNRLYSILGISHIASGLGAPMATYKPRLDPSLMSEANILVEVELSKAFPPRIAAVDKKGNISMVNVEYAWIPAKCGKCGQLGHKASRCMKPHLAHEKVTEIVSEEIITPAIVSLASATNLVSPITLQTKTPIDVPITNSKIQIDTVFDIEAGPIQDKDNCTGVADCFTNVEAEVVTEETCTVESVFEIAGTKDKFSRLGSSFPDGDSLHSDEDSIVSVESDSGSELMELMTPSGQRLLRERPVKPSIKAKEIQASSTTRGRGNRGRGNRGRGNRGRGNRGRG

SEQ ID NO: 1394 - protein, 479 aa, Arabidopsis thaliana
  Clone ID: AT_T12C14.C1.p30.tg
MESTRSDPELDDDFSEIYKEYTGPASAVTNNNIQDKDKPVKQRSEERCDEEEEQLPDPNSVPTDFTSREAKVWEAKSKATERNWKKRKEEEMICKICGESGHFTQGCPSTLGANRKSQEFFERVPARDNNVRVLFTEKVMESIERETSCKIKLDEKFIIVSGKDRLILRKGVDAVHKVKEDGEMKSSSVSHRSRSRSPRRTSVGPSRARNSEPQRQQLPSHGSSSFPERSGRQDKFVDNRFREETRVRENQRNVPRGSPQAYGSDRARSRSTHSKSPGRPRYSGWDKPYDRQKPEVSGYRSERWDQERMGGSSDIQVSHQFERPPFPQTLEELELEYTRDALELEKKRDKEEDEENNKHRETIRELRESYMKKLAGLRGMNAKQWDDFLQLDAQRRQQQARQQNSGLSYGNYRQFPPYAEFDDGYSSNPPPYGGNNMPMDSKGRYPNHGDNYSSRHQDNNYGGFQRQRREEYGKAYNRY

SEQ ID NO: 1395 - protein, 590 aa, Arabidopsis thaliana
  Clone ID: AT_F4H6.C1.p8.tg
MVSHIVTPIFNKENYGFWRIKMKTIFQTKKLWEIVDEGVPKPPAEGDHSPEAVQQKTRCEAASLKDLTALQILQTAVSDSIFPRIAPASSALGKPWEYENLKMKESDNINTFMTKLIEMGNQLRVHGEEKSDYQIVQKILISLPKRFDIIVAMMKQTKDLTSLSAGKWCDVCERKNHNESDCWMKKNKGVLSQQVGNNERRCFVCNKPGHLAKNCRLRRTERVDLSLEETNDDEDHMLFSAVEEETSSNVNDETWLVDSGCTNHMTKEVKYFITLDQSVKGYRVLFEDNRCLINDPQGRRILDMKMMQKSFPLRWIKANTSALLASEILRQGKEKAQRFIAIPKPLKLDAEHYGYWKVLIKRSIQSIDMDAWFAVEDGWMPPTTKDAKRDIVSKSRTEWIADEKTAANHNSQALSVIFGSLLRNKFTQVQGCLSAKEVWEILQVSFECTNNVKRTRLDMLASEFENLTMEAEESVDDFNGKLSSITQEAVVLGKTYKDKKMVKKFLRSLPDKFQSHKSAIDVSLNSDQLKFDQVVGMMQAYDTDKEEILNSYATYFGAIEDDDHTVEEDAQMGTIKSLILIQSDSEKEGK

SEQ ID NO: 1396 - protein, 1347 aa, Arabidopsis thaliana
  Clone ID: AT_F9O13.C1.p20.tg
MQGSSHQVIPIFDGEKYDFWSIKMATIFRTRKLWSVVEEGVPVEPVQAEETPETARAKTLREEAVTNDTMALQILQTAVTDQIFSRIAAASSSKEAWDVLKDEYQGSPQVRLVKLQSLRREYENLKMYDNDNIKTFTDKLIVLEIQLTYHGEKKTNTQLIQKILISLPAKFDSIVSVLEQTRDLDALTMSELLGILKAQEARVTAREESTKEGAFYVRSKGRESGFKQDNTNNRVNQDKKWCGFHKSSKHTEEECREKPKNDDHGKNKRSNIKCYKCGKIGHYANECRSKNKERAHVTLEEEDVNEDHMLFSASEEESTTLREDVWLVDSGCTNHMTKEERYFSNINKSIKVPIRVRNGDIVMTAGKGDITVMTRHGKRIIKNVFLVPGLEKNLLSVPQIISSGYWVRFQDKRCIIQDANGKEIMNIEMTDKSFKIKLSSVEEEAMTANVQTEETWHKRLGHVSNKRLQQMQDKELVNGLPRFKVTKETCKACNLGKQSRKSFPKESQTKTREKLEIVHTDVCGPMQHQSIDGSRYYVLFLDDYTHMCWVYFLKQKSETFATFKKFKALVEKQSNCSIKTLRPMEVFCEDEGINRQVTLPYSPQQNGAAERKNRSLVEMARSMLVEQDLPLKLWAEAVYTSAYLQNRLPSKAIEDDVTPMEKWCGHKPNVSHLRIFGSICYVHIPDQKRRKLDAKAKCGILIGYSNQTKGYRVFLLEDEKVEVSRDVVFQEDKKWDWDKQEEVKKTFVMSINDIQESRDQQETSSHDLSQIDDHANNGEGETSSHVLSQVNDQEERETSESPKKYKSMKEILEKAPRMENDEAAQGIEACLVANEEPQTYDEARGDKEWEEAMNEEIKVIEKNRTWKLVDKPEKKNVISVKWIYKIKTDASGNHVKHKARLVARGFSQEYGIDYLETFAPVSRYDTIRALLAYAAQMKWRLYQMDVKSAFLNGELEEEVYVTQPPGFVIEGKEEKVLRLYKALYGLKQAPRAWYERIDSYFIQNGFARSMNDAALYSKKKGEDVLIVSLYVDDLIITGNNTHLINTFKKNMKDEFEMTDLGLLNYFLGMEVNQDDSGIFLSQEKYANKLIDKFGMKESKSVSTPLTPQGKRKGVEGDDKEFADPTKYRRIVGGLLYLCASRPDVMYASSYLSRYMSSPSIQHYQEAKRVLRYVKGTSNFGVLFTSKETPRLVGYSDSDWGGSLEDKKSTTGYVFTLGLAMFCWQSCKQQTVAQSTAEAEYIAVCAATNQAIWLQRLFEDFGLKFKEGIPILCDNKSAIAIGRNPVQHRRTKHIEIKYHFVREAEHKGLIQLEYCKGEDQLADVLTKALSVSRFEGLRRKLGVKPRYD

SEQ ID NO: 1397 - protein, 268 aa, Arabidopsis thaliana
  Clone ID: AT_K24M7.C1.p12.tg
MVNQRRRLAQKRYKEANPELFPKAEPTPPKDPNKKKKKKSLFKKKKPGSSTDRPQRTGSSTRHPLRVPGMKPGEGCFICHSKTHIAKLCPEKSEWERNKICLQCRRRGHSLKNCPEKNNESSEKKLCYNCGDTGHSLSHCPYPMEDGGTKFASCFICKGQGHISKNCPENKHGIYPMGGCCKVCGSVAHLVKDCPDKFNQESAQPKKTSRFDATPRGKLTKFSGDDLEDDFTEEPKSSKKINTSDDSAQNSVEVKKKKQGPKIVNFVG

SEQ ID NO: 1398 - protein, 329 aa, Arabidopsis thaliana
  Clone ID: AT_T28A8.C1.p120.tg
MGPTRAQRSAAKQRVEVPTTSAESARNGEQTVKYVSGNEHTQVLVQLVVGVPQVGDRTTVSAAVLQGIRDLFEEIIQNNFVVSDPEGVAVVKPVPMEIPSYWEMLRFMRDLDIETFNGGTDPVKAYNWRNMLECKFKSMRCPVEFWRDLASCYLRGEAQEWWERVKQREQVGCVDQWSFFKEEFTRRYLPEETIDDLEMKFLRLQQGTKTVRKYEKEFHSLERFERRKRGEHELIHKFISGLRVDIRLCCHVRDFDNMIDLVEKAASLEIGLEEEARYKRIAQEKEAMGSYGQTGHSKRRCQEVTCYRCGVAGHIARDCRMPFDGKQEG

SEQ ID NO: 1399 - protein, 1352 aa, Arabidopsis thaliana
  Clone ID: AT_T20K12.C1.p230.tg
MASNNVPFQVPVLTKSNYDNWSLRMKAILGAHDVWEIVEKGFIEPENEGSLSQTQKDGLRDSRKRDKKALCLIYQGLDEDTFEKVVEATSAKEAWEKLRTSYKGADQVKKVRLQTLRGEFEALQMKEGELVSDYFSRVLTVTNNLKRNGEKLDDVRIMEKVLRSLDLKFEHIVTVIEETKDLEAMTIEQLLGSLQAYEEKKKKKEDIAEQVLNMQITKEENGQSYQRRGGGQVRGRGRGGYGNGRGWRPHEDNTNQRGENSSRGRGKGHPKSRYDKSSVKCYNCGKFGHYASECKAPSNKKFEEKAHYVEEKIQEEDMLLMASYKKDEQKENHKWYLDSGASNHMCGRKSMFAELDESVRGNVALGDESKMEVKGKGNILIRLKNGDHQFISNVYYIPSMKTNILSLGQLLEKGYDIRLKDNNLSIRDQESNLITKVPMSKNRMFVLNIRNDIAQCLKMCYKEESWLWHLRFGHLNFGGLELLSRKEMVRGLPCINHPNQVCEGCLLGKQFKMSFPKESSSRAQKPLELIHTDVCGPIKPKSLGKSNYFLLFIDDFSRKTWVYFLKEKSEVFEIFKKFKAHVEKESGLVIKTMRSDRGGEFTSKEFLKYCEDNGIRRQLTVPRSPQQNGVVERKNRTILEMARSMLKSKRLPKELWAEAVACAVYLLNRSPTKSVSGKTPQEAWSGRKPGVSHLRVFGSIAHAHVPDEKRSKLDDKSEKYIFIGYDNNSKGYKLYNPDTKKTIISRNIVFDEEGEWDWNSNEEDYNFFPHFEEDEPEPTREEPPSEEPTTPPTSPTSSQIEESSSERTPRFRSIQELYEVTENQENLTLFCLFAECEPMDFQKAIEKKTWRNAMDEEIKSIQKNDTWELTSLPNGHKAIGVKWVYKAKKNSKGEVERYKARLVAKGYSQRVGIDYDEVFAPVARLETVRLIISLAAQNKWKIHQMDVKSAFLNGDLEEEVYIEQPQGYIVKGEEDKVLRLKKVLYGLKQAPRAWNTRIDKYFKEKDFIKCPYEHALYIKIQKEDILIACLYVDDLIFTGNNPSIFEEFKKEMTKEFEMTDIGLMSYYLGIEVKQEDNGIFITQEGYAKEVLKKFKIDDSNPVCTPMECGIKLSKKEEGEGVDPTTFKSLVGSLRYLTCTRPDILYAVGVVSRYMEHPTTTHFKAAKRILRYIKGTVNFGLHYSTTSDYKLVGYSDSDWGGDVDDRKSTSGFVFYIGDTAFTWMSKKQPIVTLSTCEAEYVAATSCVCHAIWLRNLLKELSLPQEEPTKIFVDNKSAIALAKNPVFHDRSKHIDTRYHYIRECVSKKDVQLEYVKTHDQVADFFTKPLKRENFIKMRSLLGVAKSSLRGGVES

SEQ ID NO: 1400 - protein, 1272 aa, Arabidopsis thaliana
  Clone ID: AT_T16L24.C1.p270.tg
MASNNVPFQVPVLTKSNYDNWSLRMKAILGAHDVWEIVEKGFIEPENEGSLSQTQKDGLRDSRKRDKKALCLIYQGLDEDTFEKVVEATSAKEAWEKLRTSYKGADQVKKVRLQTLRGEFEALQMKEGELVSDYFSRVLTVTNNLKRNGEKLDDVRIMEKVLRSLDLKFEHIVTVIEETKDLEAMTIEQLLGSLQAYEEKKKKKEDIVEQVLNMQITKEENGQSYQRRGGGQVRGRGRGGYGNGRGWRPHEDNTNQRGENSSRGRGKGHPKSRYDKSSVKCYNCGKFGHYASECKAPSNKKFKEKANYVEEKIQEEDMLLMASYKKDEQEENHKWYLDSGASNHMCGRKSMFAELDESVRGNVALGDESKMEVKGKGNILIRLKNGDHQFISNVYYIPSMKTNILSLGQLLEKGYDIRLKDNNLSIRDKESNLITKVPMSKNRMFVLNIRNDIAQCLKMCYKEESWLWHLRFGHLNFGGLELLSRKEMVRGLPCINHPNQVCEGCLLGNQFKMSFPKESSSRAQKPLELIHTDVCGPIKPKSLGKSNYFLLFIDDFSRKTWVYFLKEKSEVFEIFKKFKAHVEKESGLVIKTMRSDSGGEFTSKEFLKYCEDNGIRRQLTVPRSPQQNGVAERKNRTILEMARSMLKSKRLPKELWAEAVACAVYLLNRSPTKSVSGKTPQEAWSGRKPGVSHLRVFGSIAHAHVPDEKRNKLDDKSEKYIFIGYDNNSKGYKLYNPDTKKTIISRNIVFDEEGEWDWNSNEEDYNFFPHFEEDKPEPTREEPPSEEPTTPPTSPTSSQIEESSSERTPRFRSIQELYEVTENQENLTLFCLFAECEPMDFQEAIEKKTWRNAMDEEIKSIQKNDTWELTSLPNGHKAIGVKWVYKAKKNSKGEVERYKARLVAKGYSQRAGIDYDEIFAPVARLETVRLIISLAAQNKWKIHQMDVKSAFLNGDLEEEVYIEQPQGYIVKGEEDKVLRLKKVLYGLKQAPRAWNTRIDKYFKEKDFIKCPYEHALYIKIQKEDILIACLYVDDLIFTGNNPSMFEEFKKEMTKEFEMTDIGLMSYYLGIEVKQEDNGIFITQEGYAKEVLKKFKMDDSNPSLVGSLRYLTCTRPDILYAVGVVSRYMEHPTTTHFKAAKRILRYIKGTVNFGLHYSTTSDYKLVVCHAIWLRNLLKELSLPQEEPTKIFVDNKSAIALAKNPVFHDRSKHIDTRYHYIRECVSKKDVQLEYVKTHDQVADIFTKPLKREDFIKMRSLLGVAKSSLRGGVES

SEQ ID NO: 1401 - protein, 1352 aa, Arabidopsis thaliana
  Clone ID: AT_F11I4.C1.p21.tg
MASNNVPFQVPVLTKSNYDNWSLRMKAILGAHDVWEIVEKGFIEPENEGSLSQTQKDGLRDSRKRDKKALCLIYQGLDEDTFEKVVEATSAKEAWEKLRTSYKGADQVKKVRLQTLRGEFEALQMKEGELVSDYFSRVLTVTNNLKRNGEKLDDVRIMEKVLRSLDLKFEHIVTVIEETKDLEAMTIEQLLGSLQAYEEKKKKKEDIIEQVLNMQITKEENGQSYQRRGGGQVRGRGRGGYGNGRGWRPHEDNTNQRGENSSRGRGKGHPKSRYDKSSVKCYNCGKFGHYASECKAPSNKKFEEKANYVEEKIQEEDMLLMASYKKDEQEENHKWYLDSGASNHMCGRKSMFAELDESVRGNVALGDESKMEVKGKGNILIRLKNGDHQFISNVYYIPSMKTNILSLGQLLEKGYDIRLKDNNLSIRDQESNLITKVPMSKNRMFVLNIRNDIAQCLKMCYKEESWLWHLRFGHLNFGGLELLSRKEMVRGLPCINHPNQVCEGCLLGKQFKMSFPKESSSRAQKSLELIHTDVCGPIKPKSLGKSNYFLLFIDDFSRKTWVYFLKEKSEVFEIFKKFKAHVEKESGLVIKTMRSDRGGEFTSKEFLKYCEDNGIRRQLTVPRSPQQNGVAERKNRTILEMARSMLKSKRLPKELWAEAVACAVYLLNRSPTKSVSGKTPQEAWSGRKSGVSHLRVFGSIAHAHVPDEKRSKLDDKSEKYIFIGYDNNSKGYKLYNPDTKKTIISRNIVFDEEGEWDWNSNEEDYNFFPHFEEDEPEPTREEPPSEEPTTPPTSPTSSQIEESSSERTPRFRSIQELYEVTENQENLTLFCLFAECEPMDFQEAIEKKTWRNAMDEEIKSIQKNDTWELTSLPNGHKTIGVKWVYKAKKNSKGEVERYKARLVAKGYIQRAGIDYDEVFAPVARLETVRLIISLAAQNKWKIHQMDVKSAFLNGDLEEEVYIEQPQGYIVKGEEDKVLRLKKALYGLKQAPRAWNTRIDKYFKEKDFIKCPYEHALYIKIQKEDILIACLYVDDLIFTGNNPSMFEEFKKEMTKEFEMTDIGLMSYYLGIEVKQEDNGIFITQEGYAKEVLKKFKMDDSNPVCTPMECGIKLSKKEEGEGVDPTTFKSLVGSLRYLTCTRPDILYAVGVVSRYMEHPTTTHFKAAKRILRYIKGTVNFGLHYSTTSDYKLVGYSDSDWGGDVDDRKSTSGFVFYIGDTAFTWMSKKQPIVVLSTCEAEYVAATSCVCHAIWLRNLLKELSLPQEEPTKIFVDNKSAIALAKNPVFHDRSKHIDTRYHYIRECVSKKDVQLEYVKTHDQVADIFTKPLKREDFIKMRSLLGVAKSSLRGGVEC

SEQ ID NO: 1402 - protein, 926 aa, Arabidopsis thaliana
  Clone ID: AT_MBM17.C1.p2.tg
MSRRGGGPVTVLNVAEKPSVAKSVAGILSRGTFRTREGRSRYNKIFEFDYAINGQPCRMLMTSVIGHLMELEFADRYRKWHSCDPADLYQAPVMKHVPEDKKDIKKTLEEEARKSDWLVLWLDCDREGENIAFEVVDVCRAVKHNLFIRRAHFSALIDRDIHEAVQNLRDPNQLFAEAVDARQEIDLRIGASFTRFQTMLLRDRFAIDSTGEERSRVISYGPCQFPTLGFIVERYWEIQAHEPEEFWTINCSHQSEEGLATFNWMRGHLFDYASAVILYEMCVEEPTATVMNVPHPRERFKYPPYPLNTIELEKRASRYFRLSSEHTMKVAEELYQAGFISYPRTETDSFSSRTDLRAMVEEQTRHPAWGSYAQRLLEPEGGLWRNPANGGHDDKAHPPIHPTKFSSGESNWSRDHLNVYELVVRHYLACVSQPAVAAETTVEIDIAGERFSASGRAILAKNYLEVYRFESWGGSVIPVYEKGQQFIPTTLTLDAAVTRPPPLLCEADLLSCMDKAGIGTDATMHDHIKKLLDRGYATKDANTRFSPTNLGEALVMGYDDMGYELWKPNLRALMEHDMNEVSVGRKTKAEVLETCLQQMKACFLDARVKKSKLLEAMTIFFERSNNTDESESQTAGEVVRRCNLCNESDMALRKNRDGNFMVGCMNYPQCRNAVWLPGPTLEASVTTNVCQSCGPGPVYKILFKFRQIGIPPGFDVNHLGCVGGCDDILKQLIDICGTGSRSQARRTPGTAPSNNIQGSNTRQSNVCIHCQQRGHASTNCPSRVPASRNSRPTATNPRNDESTVSCNTCGSQCVLRTANTEANRGRQFFSCPTQGCSFFAWEDSINNSSGNATTGSNSGGSGRRGSRGRGRGGRGGQSSGGRRGSGTSFVSATGEPVSGIRCFSCGDPSHFANACPNRNNSNGNYF

SEQ ID NO: 1403 - protein, 1137 aa, Arabidopsis thaliana
  Clone ID: AT_F6F22.C1.p13.tg
MGLKDALVERAPLPPLKEEDESDPAKKKQRIEEEKARIDQDEKAMDMIFINVGDKVLRNIENSKTAAEAWATLDKLYLVKSLPNRVYLQLKVYNYRMQDSKTLEENVDEFQKMISDLNNLQIQVPDEVQAILILSALPDSYDMLKETLKYGREGIKLDDVISAAKSKELELRDSSGGSRPVGEGLYVRGKSQARGSDGPKSTEGKKVCWICGKEGHFKRQCYKWLEKNKANGAGETALVKDDAQDLVGLVASEVNMSEGKDDQEEWIMDTGCSFHMTPRKEYLMDFVEAKSGKVRMANNSFSEVKGIGKVKFIKKDGTNDWSRKVWVYFLKTKDEAFASFTEWKKMVETQSERKLKHLRTDNGLEFCNHKFDEVCKKEGIVRHRTCTYTPQQNGVAERLNRTIMNKVRSMLSESGLDKKFWAKAASTAVYLINRSPSSSIENKIPEELWTSAVPNFSGLKRFGCVVYVYSQEGKLDPRAKKGVFVGYPNGVKGFRVWMIEEERCSISRNVVFREDVMYKDILNQSTSGMSFDFPLATNRIPSFECAGNRKEDEISVQGGVSDDDTKQSSEESPISTGSSGQNSGQRTYQIARDKPKRQTKIPDKLRDYELNEEVLDEIAGYAYMITEDGGNPEPNDYQKALQDSDYKMWLKAVDEEIESLLKNNTWVLVNRDQFQKPIGCKWVFKRKSGIVGVEKPRFKARLVVKGYSQKEGIDYQEIFSPVVKHVSIRLLLSMVTHCDMELQQMDVKTAFLHGYLDETIYIEQPEGYVHKRYPDKVCLLKRSLYGLRQSPRQWNNRFNEFMQKIGYERSKYDSCVYFKELQSGEYIYLLLYVDDILIASRDKRTVCDLKALLNSEFEMKDLGDAKKILGMEIVRDRKAGTMSISQEGYLLKVLGNFGMDQAKPVFTPMGAHFKLKPATDEEVMRQSEVMRAVPYQSAVGSLMYSMIGTRPDLAHSVGLVCRFMSKPLKEHWQAVKWILRYIRGSIDRKLCYKNEGELILEGYCDSDYAADKEGRRSTSGVKVVALSSTEAEYMALTDGAKEAIWLKGHVSELGFVQKTVNIHCDSQSAIALAKNAVYHERTKHIDVKYHFIRDLVNNGEVQVLKIDTEDNPADIFTKVLPVSKFQDALELLRVSQN

SEQ ID NO: 1404 - protein, 262 aa, Arabidopsis thaliana
  Clone ID: AT_T26I12.C1.p180.tg
MLCQLEILGLESVLVEDATPSDPGSQEEGCEPREGYEGNYQTKTLANMIYLKHKFTSFKMVENKSIEENLDTSLKLVADLASLDINTSDEDQALQFMAGLPPQYDSLVDTLKYGSGKDTLTLNAVISSAYSKEIELKEKGLLNVSKPDSEALLGDFKGRSNNKGNKRPCTGSSSGNGKFQSRPSNNTSCFICGKEDHWKRECPQRKKHAELANIATEPPQPLVLTVSTQSTCKEWVMDSGRTFHSTSDRAVLFDFKKFKDRA

SEQ ID NO: 1405 - protein, 245 aa, Arabidopsis thaliana
  Clone ID: AT_F20C19.C1.p14.tg
MSEDPEYRCFIGGLAWTTSDRGLRDAFEKYGHLVEAKVVLDKFSGRSRGFGFITFDEKKAMDEAIAAMNGMDLDGRTITVDKAQPHQGGAGRDNDGDRGRDRGYDRDRSRPSGGRGGGDCFKCGKPGHFARECPSESSRDGGGRFSSKDDRYSSKDDRYGAKDDRYGAKEDRYGAKDDRYSSKDDRYSSKDDRYGSRDGGGSRYGPDRSGERAGGRSRDGGSRGAPGGERHSRAPYDRPRAGGFH

SEQ ID NO: 1406 - protein, 1182 aa, Arabidopsis thaliana
  Clone ID: AT_T3F24.C1.p1.tg
MAGTPIAVFDESGDFSLWKTRIMAHLSVIGLKDVVIGKTITPLTAEEEEDPEKKIELCQTAQEAWETLDRLFMIRSLPHRVYTQLSFYTFKMQENKKIDENIDDFLKIVADLNHLQIEVTDEVQAILLLSSLPARYDGLVETMKYSNSREKLRLDDVMVGARDKERELSQNNRPVAEGHYARGRPEGKNNNQGNKGKNRSRSKSADGKRVCWICGKEGHFKKQCYKWLERNKSKQQGSDVGESSLAKSSEIFDPAMVIMATGETLLVTGRDADEWFLDTGCSFHMTPRRDLFKDFKELSSGFVKMGNDTYSPVKGIGSIKIRNNDGTQVILTDVRYVPNMARNLISLGTLEDKGCWFKSQDGVLKIVKGCSTILKGQKRETLYILEGLAENGESHSSAELKDETSLWHSRLGHMSQKGMEILVKKDCLQRETIKELKFCEDCVYGKNHRVSFAPAQHVTKEKLAYIHSDLWGSPHNPASLGNCQYFISFVDDYSRKKVKKLRTDNGLEYCNHYFEKFCKDEGIVRHKTCAYTPQQNGIAERLNRTIMDKVRSMLSESGMDKKFWAEAASTAVYLINRSPSTALDFDLPEEKWTGALPDLKGLRKFGCLVYIHADQGKLNPRAKKDVFTSYLEGVKGYKVWVLEEKKCVISRNVIFREEIMYKDLKHDSHTSMIENDLENIRLNPPVVTCDHEITDQGGATVTDTYQDDSAQDANSPVITQTQVSNENQSKSEEEDLSDYQLVRDRAVKINPRYNESNLVGFSFFTEDGEQAEPNSYQAALRDPEWDKWNEAMKEEMMSMGKNQTLDLVEKPEGVKIIGCRWIFTRKTGIQGVEAPRYKARLVAKGFTQKEGIDYTEIFSPVVKHVSIRYIVSMVAHFDMELQQMDVKTAFLHGFLDEDIYMAQPEGFEDKKNPEKEAYVKKVLRSTHMDQSKPVSTPIGVHFKLRAATEEEYKNQFERMRFVPYANTVGSIMYSMIGTRPDLAYPLDVISRFMSKPLKDHWQAAKWVLRYMKGTETKKLCYMKQDDFLLRGYCDSDYGSNFDTRRSISGYVFTIGGNTIIWKSKLQKVVALSTTESEYMALTEAVKEALWLKGLANELGFPQKDVEVHCDSQSVIALAKNSVHHENTKHIDIMLHFVRDVITEGKIRLVKIASECNTADIFTKVLLVNKLEGALNMLRVSSH

SEQ ID NO: 1407 - protein, 1335 aa, Arabidopsis thaliana
  Clone ID: AT_F9B22.C1.p4.tg
MAHLSVIGLKDVVLGTTPKPLTEEEEEDPEKRKKRDADEVARLERCDKAKNVIFLNVADKVLRKIELCKTAAEAWETLDRLFMIRSLPHRVYTQLSFYTFKMQENKKIDENIDDFLKIVADLNHLQIDVTDEVQAILLLSSLPARYDGLVETMKYSNSREKLRLDDVMVAARDKERELSQNNRPVVEGHFARGRPDGKNNNQGNKGKNRSRSKSADGKRVCWICGKEGHFKKQCYKWIERNKSKQQGSDNGESSLAKSTEAFNPAMVLLATDETLVVTDSIANEWVLDTGCSFHMTPRKDWFKDFKELSSGYVKMGNDTYSPVKGIGSIKIRNSDGSQVILTDVRYMPNMTRNLISLGTLEDRGCWFKSQDGILKIVKGCSTILKGQKRDTLYILDGVTEEGESHSSAEVKDETALWHSRLGHMSQKGMEILVKKGCLRREVIKELEFCEDCVYGKQHRVSFAPAQHVTKEKLAYVHSDLWGSPHNPASLGNSQYFISFVDDYSRKVWIYFLRKKDEAFEKFVEWKKMVENQSDRKVKKLRTDNGLEYCNHYFEKFCKEEGIVRHKTCAYTPQQNGIAERLNRTIMDKVRSMLSRSGMEKKFWAEAASTAVYLINRSPSTAINFDLPEEKWTGALPDLSSLRKFGCLAYIHADQGKLNPRSKKGIFTSYPEGVKGYKVWVLEDKKCVISRNVIFREQVMFKDLKGDSQNTISESDLEDLRVNPDMNDQEFTDQGGATQDNSNPSEATTSHNPVLNSPTHSQDEESEEEDSDAVEDLSTYQLVRDRVRRTIKANPKYNESNMVGFAYYSEDDGKPEPKSYQEALLDPDWEKWNAAMKEEMVSMSKNHTWDLVTKPEKVKLIGCRWVFTRKAGIPGVEAPRFIARLVAKGFTQKEGVDYNEIFSPVVKHVSIRYLLSMVVHYNMELQQMDVKTAFLHGFLEEEIYMAQPEGFEIKRGSNKVCLLKRSLYGLKQSPRQWNLRFDEFMRGIKYTRSAYDSCVYFKKCNGDTYIYLLLYVDDMLIASANKSEVNELKQLLSREFEMKDLGDAKKILGMEISRDRDAGLLTLSQEGYVKKVLRSFQMDNAKPVSTPLGIHFKLKAATDKEYEEQFERMKIVPYANTIGSIMYSMIGTRPDLAYSLGVISRFMSKPLKDHWQAVKWVLRYMRGTEKKKLCFRKQEDFLLRGYCDSDYGSNFDTRRSITGYVFTVGGNTISWKSKLQKVVAISSTEAEYMALTEAVKEALWLKGFAAELGHSQDYVEVHSDSQSAITLAKNSVHHERTKHIDIRLHFIRDIICAGLIKVVKIATECNPANIFTKTVPLAKFEGALNMLRVTEN

SEQ ID NO: 1408 - protein, 249 aa, Arabidopsis thaliana
  Clone ID: AT_F8A5.C1.p17.tg
MVGRDTGRPRGFGFITFTDRRGADDAIKHMHGRELGNKVISVNKAEPKVGGEDVDQLKKGGGYSSRGKGTEDECFKCRRPGHWARDCPSTGDDRERFRVPLAMRSRIGDIDGHRDRYGDRDLEREREREREFDRYMDGRRDRDGGRYSYRDRFDSGDKYEPRDHYPFERYAPPGDRFVSDRYGMPEHHLENEYRGRERSYDRDRYARDTSDRYGDMGPIRDEGRPYRSRPGPYDRPSRPGGRPSSYERW

SEQ ID NO: 1409 - protein, 310 aa, Arabidopsis thaliana
  Clone ID: AT_T19N18.C1.p10.tg
MAAKEGSRIFVGGLSPEVTDRDLERAFSRFGDILDCQIMLERDTGRSRGFGFITFADRRAMDESIREMHGRDFGDRVISVNRAEPKLGRDDGESHGSRGGRDSGYSIAGKGSFGGGGGGGGRVGEDECFKCGRVGHWARDCPSAGGGRGGPVGGFSSRASAYGGSDGRVDRYADRDRYVDRERYIDDRYDGAARYGARDRFDSREAYIPRDRYASDRYAAPADRFAGGDRYSRGSDRYPPGSYDKARSFERDIAPSAGSDRYGGGRAGGPIRGGGEEGRGFRSRAGAPYERPSRSGGGGAYPSSSTFDRY

SEQ ID NO: 1410 - protein, 1356 aa, Arabidopsis thaliana
  Clone ID: AT_F9A16.C1.p8.tg
MSTARIEVEKFDGRGDYTMWKEKLLAHMDILGLNTALKESESTGEKKSVLDESDEDYEEKLEKFEALEEKKKKARSAIVLSVTDRVLRKIKKESTAAAMLLALDKLYMSKALPNRIYPKQKLYSFKMSENLSVEGNIDEFLQIITDLENMNVIISDEDQAILLLTALPKAFDQLKDTLKYSSGKSILTLDEVAAAIYSKELELGSVKKSIKVQAEGLYVKDKNENKGKGEQKGKGKGKKGKSKKKPGCWTCGEEGHFRSSCPNQNKPQFKQSQVVKGESSGGKGNLAEAAGYYVSEALSSTEVHLEDEWILDTGCSYHMTYKREWFHEFNEDAGGSVRMGNKTVSRVRGVGTIRVKNSDGLTIVLTNVRYIPDMDRNLLSLGTFEKAGYKFESEDGILRIKAGNQVLLTGRRYDTLYLLNWKPVASESLAVVKRADDTVLWHQRLCHMSQKNMEILVRKGFLDKKKVSSLDVCEDCIYGKAKRKSFSLAHHDTKEKLEYIHSDLWGAPFVPLSLGKCQYFMSIIDDFTRKVWVYFMKTKDEAFEKFVEWVNLVENQTDRRVKTLRTDNGLEFCNKLFDGFCESIGIHRHRTCAYTPQQNGVAERMNRTIMEKVRSMLSDSGLPKRFWAEATHTTVLLINKTPSSALNFEIPDKKWSGNPPVYSYLRRYGCVAFVHTDDGKLEPRAKKGVLIGYPVGVKGYKVWILDERKCVVSRNIIFQENAVYKDLMQRQENVSTEEDDQTGSYLEFDLEAERDVISGGDQEMVNTIPAPESPVVSTPTTQDTNDDEDSDVNQSPLSYHLVRDRDKREIRAPRRFDDEDYYAEALYTTEDGEAVEPENYRKAKLDANFDKWKLAMDEEIDSQEKNNTWTIVTRPENQRIIGCRWIFKYKLGILGVEEPRFKARLVAKGYAQKEGIDYHEIFAPVVKHVSIRVLLSIVAQEDLELEQLDVKTAFLHGELKEKIYMSPPEGYESMFKANEVCLLNKALYGLKQAPKQWNEKFDNFMKEICFVKSAYDSCAYTKVLPDGSVMYLLIYVDDILVASKNKEAITALKANLGMRFEMKDLGAAKKILGMEIIRDRTLGVLWLSQEGYLNKILETYNMAEAKPAMTPLGAHFKFQAATEQKLIRDEDFMKSVPYSSAVGSIMYAMLGTRPDLAYPVGIISRFMSQPIKEHWLGVKWVLRYIKGTLKTRLCYKKSSSFSIVGYCDADYAADLDKRRSITGLVFTLGGNTISWKSGLQRVVAQSTTESEYMSLTEAVKEAIWLKGLLKDFGYEQKSVEIFCDSQSAIALSKNNVHHERTKHIDVKYHFIREIISDGTVEVLKISTEKNPADIFTKVLAVSKFQAALNLLRVKSE

SEQ ID NO: 1411 - protein, 1230 aa, Arabidopsis thaliana
  Clone ID: AT_F7L13.C1.p40.tg
MSSARVEMEKFDGHGDYTLWKEKLMAHMDLLGLTVALRETQSVSDPLESEEEGKESEKGDKEALMEEKRQKARSTIVLSVSDQVLRKSKKEKTAPSMLEALDKLYMSKALPNRIYLKQKLYSYKMQENLSVEGNIDEFLRLIADLENTNVLVSDEDQAILLLMSLPKQFDQLKDTLKYGSGRTTLSVDEVVAAIYSKELELGSNKKSIRGQAEGLYVKDKPETRGMSEQKEKGNKGRSRSRSKGWKGCWICGEEGHFKTSCPNKGKQQNKGKDQASGSKGEAATIKGNTSEGSGYYVSEALHSTDVNLGNEWVMDTGCNYHMTHKKEWFEELSEDAGGTVRMGNKSTSKFRVKYIPDMDRNLLSMGTLEEHGYSFESKNGVLVVKEGTRTLLIGSRHEKLYLLQGKPEVSHSMTVERRNDDTVLWHRRLGHISQKNMDILVKKGYLDGKKVSKLELCEDCIYGKARRLSFVVATHNTEDKLNYVHSDLWGAPSVPLSLGKCQYFISFIDVYSRKTWVYFLKHKDEAFGTFAEWSVMVENQTGRKIKILRIDNGLEFCNQQFNDFCKEKGIVRHQTCAYTPQQNGVAERMNHTIMEKVRRMLSYSGLPKTFWAEATNTVVTLINKTPSSAVNFEISDKRWSGKSPVYNYLKRFGCVAFTYADEGKLVPRAKKGVFLGYLSGEKGYKVWLLEERKCSVSRNVTFQENAVYRDVMQKNKDSEEVDTSSRVRREIRAPKRFDVEGYYSEFTDDEEESFNVEALMDSLLKNHTWTVVKKPVGERVIGCKWIFKRKPGTPGIEQPRFKARLVSKGYAQREGIDYTDIFSPVVKHVSIRILLAIVAEENYELEQLDVKTAFLHGDLEEKIFMEAPEGYESQFKQGEVCLLNKTMYGLKQSPRRWNQKFDSYMLEIGFERSPRNKCAYIKSLEDGSKVYLLIYVDDMLVAARDMQVISELKQKLSEKFEMKDLGAAKRILGMEISRDRVKGTLTLSQEDYLSKVLETYNVDQCKFVVTPLGAHLKMHAATEQQLLSDEEYMKSVPYSNAVGSIMYSMIDTRPDLAYCVGIISRFMSKPKGADLTLRGYCDSDYAANLENRRSISGMVFTLGGSTINLRSCLQKVVVMSSTKAGYMSLTEAVKEAIWLKGLLQDFGYEQKTVEIFCDSQSAIALSKNNVHHDRTKHIDIKYHKIREVIADGVVEVKKICTLVNSADIFTKVVPVSKFKTALHSLRVKTE

SEQ ID NO: 1412 - protein, 254 aa, Arabidopsis thaliana
  Clone ID: AT_T30G6.C1.p10.tg
MIKLPNPISRVCDPLIMPRHNDDEAEVCLRCGGFGHDMTLCKYEYSHEDLKNIKCYVCNSLGHLCCIEPGHTQSWTVSCYRCGQLGHTGLACGRHYDDSVSPSCFICGREGHFEHQCHNSFSVCFPEDSSEDECQGPDSSSVRFQENTREEEEGHFEHQCPDSSSVCFQEISREEGFISLNSSSKSTSKGRETRRLCYECKGKGHIARDCPNSSQVVSISLSTFCALSSSVLSFLSCYYSRINFLCFFQDKYGI

SEQ ID NO: 1413 - protein, 284 aa, Arabidopsis thaliana
  Clone ID: AT_F4P12.C1.p200.tg
MPRYDDRYGNTRLYVGRLSSRTRTRDLERLFSRYGRVRDVDMKRDYAFVEFSDPRDADDARYYLDGRDFDGSRITVEASRGAPRGSRDNGSRGPPPGSGRCFNCGVDGHWARDCTAGDWKNKCYRCGERGHIERNCKNSPSPKKARQGGSYSRSPVKSRSPRRRRSPSRSRSYSRGRSYSRSRSPVRREKSVEDRSRSPKAMERSVSPKGRDQSLSPDRKVIDASPKRGSDYDGSPKENGNGRNSASPIVGGGESPVGLNGQDRSPIDDEAELSRPSPKGSESP

SEQ ID NO: 1414 - protein, 249 aa, Arabidopsis thaliana
  Clone ID: AT_F3G5.C1.p13.tg
MKRDYAFVEFGDPRDADDARHYLDGRDFDGSRITVEFSRGAPRGSRDFDSRGPPPGAGRCFNCGVDGHWARDCTAGDWKNKCYRCGERGHIERNCKNSPKKLRRSGSYSRSPVRSRSPRRRRSPSRSLSRSRSYSRSRSPVRRRERSVEERSRSPKRMDDSLSPRARDRSPVLDDEGSPKIIDGSPPPSPKLQKEVGSDRDGGSPQDNGRNSVVSPVVGAGGDSSKEDRSPVDDDYEPNRTSPRGSESP

SEQ ID NO: 1415 - protein, 947 aa, Arabidopsis thaliana [sequence omitted]

SEQ ID NO: 1416 - protein, 196 aa, Arabidopsis thaliana
  Clone ID: AT_F25P17.C1.p11.tg
MSRVYVGNLDPRVTERELEDEFRSFGVIRSVWVARRPPGYAFLDFEDSRDARDAIREVDGKNGWRVEQSHNRGGGGGRGGGRGGGDGGRGRGGSDLKCYECGESGHFARECRSRGGSGGRRRSRSRSRSPPRYRKSPTYGGRRSYSPRARSPPPPRRRSPSPRGRNYSRSPPPYRARDEVPYANGNGLKDVRRSRS

SEQ ID NO: 1417 - protein, 1342 aa, Arabidopsis thaliana
  Clone ID: AT_MIK22.C1.p13.tg
MSSGRAEVEKFDGDGDYILWKEKLLAHMEMLGLLEGLGEEEEAVVEDSTTEISDGGNQDPETATSKLEDKILKEKRGKARSTIILSLGNNVLRKVIKQKTAAGMIKVLDQLFMAKSLPNRIYLKQRLYGYKMSENMTMEENVNDFFKLISDLENVKVVVPDEDQAIVLLMSLPRQFDQLKETLKYCKTTLHLEEITSAIRSKILELGASGKLLKNNSDGLFVQDRGRSETRGKGPNKNKSRSKSKGAGKTCWICGKEGHFKKQCYVWKERNKQGSTSERGEASTVTARVTDAAALVVSRALLGFAEVTPDTWILDTGCSFHMTCRKDWIIDFKETASGKVRMGNDTYSEVKGIGDVRIKNEDGSTILLTDVRYIPEMSKNLISLGTLEDKGCWFESKKGILTIFKNDLTVLTGKKESTLYFLQGTTLAGEANVIDKEKDETSLWHSRLGHIGAKGLQVLVSKGHLDKNIMISFGAAKHVTKDKLDYVHSDLWGSTNVPFSIGKCQYFITFIDDFTRRTWIYFIRTKDEAFSKFVEWKTQIENQQDKKLKILITDNGLEFCNQEFDSFCRKEGVIRHRTCAYTPQQNGVAERMNRTIMNKVRCMLSESGLGKQFWAEAASTAVFLINKSPSSSIEFDIPEEKWTGHPPDYKILKKFGSVAYIHSDQGKLNPRAKKGIFLGYPDGVKRFKVWLLEDRKCVVSRDIVFQENQMYKELQKNDMSEEDKQLTEVERTLIELKNLSADDENQSEGGDNSNQEQASTTRSASKDKQVEETDSDDDCLENYLLARDRIRRQIRAPQRFVEEDDSLVGFALTMTEDGEVYEPETYEEAMRSPECEKWKQATIEEMDSMKKNDTWDVIDKPEGKRVIGCKWIFKRKAGIPGVEPPRYKARLVAKGFSQREGIDYQEIFSPVVKHVSIRYLLSIVVQFDMELEQLDVKTAFLHGNLDEYILMSQPEGYEDEDSTEKVCLLKKSLYGLKQSPRQWNQRFDSFMINSGYQRSKYNPCVYTQQLNDGSYIYLLLYVDDMLIASQNKDQIQKLKESLNREFEMKDLGPARKILGMEITRNREQGILDLSQSEYVAGVLRAFGMDQSKVSQTPLGAHFKLRAANEKTLARDAEYMKLVPYPNAIGSIMYSMIGSRPDLAYPVGVVSRFMSKPSKEHWQAVKWVMRYMKGTQDTCLRFKKDDKFEIRGYCDSDYATDLDRRRSITGFVFTAGGNTISWKSGLQRVVALSTTEAEYMALAEAVKEAIWLRGLAAEMGFEQDAVEVMCDSQSAIALSKNSVHHERTKHIDVRYHFIREKIADGEIQVVKISTTWNPADIFTKTVPVSKLQEALKLLRVSSN

SEQ ID NO: 1418 - protein, 627 aa, Arabidopsis thaliana
  Clone ID: AT_T25N22.C1.p4.tg
MEPTDVSTGTGKVLLLDTKRYGYWKVCMTQIIRGQEDGFKITKPKANWTAEEKLQSKFNARAMKAIFNGVDEDEFKLIQGCKSAKQAWDTLQKSHEGTSSVKRTRLDHIATQFEYLKMEPDEKIVKFSSKISALANEAEVMGKTYKDQKLVKKLLRCLPPKFAAHKAVMRVAGNTDKISFVDLVGMLKLEEMKADQDKVKPSKNIAFNADQGSEQFQEIKDGMALLARNFGKALKRVEIDGERSRGRFSRSENDDLRKKKEIQCYECGGFGHIKPECPITKRKEMKCLKCKGVGHTKFECPNKSKLKEKSLISFSDSESDDEGEELLNFVAFMASSDSSKFMSDTDSDCDEELNPKDKYRVLYDSWVQLSKDKLKLVKEKLTLEAKLANVSTEDKQKLSGITVDGNSQDYYQKKLDCLQKECHRERDRTKLLERELNDKYKQIRMLNKGLESLDKILAMGRTDSQQRGLGYQGYTGKIKKEEGRVINFVSGGSTSETVVRQSYIEPKKQVKSHVEIKRESVVRTRMVGVICCDHCGKRFHMREQCYKFKEKVRTLWNLAKCFIEPSRFCTVWIKKKDLYGDMEAERYNHKLERMYEEEEMHYASCCNQVNKEMQDEARKKDDSFGST

SEQ ID NO: 1419 - protein, 261 aa, Arabidopsis thaliana
  Clone ID: AT_F13M14.C1.p33.tg
MKKRKIHHSDDEEDDTFYYRYSSVAAPPPSNPKHQPSSSAKSSAPGGGSGGLAPSKSTLYVSNLDFSLTNSDIHTLFSTFGKVARVTVLKDRHTRQSRGVAFVLYVSREDAAKAARSMDAKILNGRKLTVSIAADNGRASEFIKKRVYKDKSRCYECGDEGHLSYECPKNQLGPRERPPPPKKRGRRKEEEGEAEEISWSAAAPSLAVAEEEFEEENWASVVDNEAGERLRKREAEEEEERRMKRKEKKVSYFSDESDDED

SEQ ID NO: 1420 - protein, 551 aa, Arabidopsis thaliana
  Clone ID: AT_F22J12.C1.p30.tg
MPRQNKDEKFVFDDGEDEDREDPVAITEVDNGEEEDDDEANEDLSLKILEKALSRRDVGNKLDSDLSSDSGVVSTVMVNGVKSKVKKSESSKKMKRNKLEADHEIPIVWNDQDEEKVVEEIVKGEGEDDEVERSDEPKTEETASNLVLKKLLRGARYFDPPDAGWVSCYSCGEQGHTSFNCPTPTKRRKPCFICGSLEHGAKQCSKGHDCYICKKTGHRAKDCPDKYKNGSKGAVCLRCGDFGHDMILCKYEYSKEDLKDVQCYICKSFGHLCCVEPGNSLSWAVSCYRCGQLGHSGLACGRHYEESNENDSATPERLFNSREASECYRCGEEGHFARECPNSSSISTSHGRESQTLCYRCNGSGHFARECPNSSQVSKRDRETSTTSHKSRKKNKENSEHDSTPHESNGKTKKKKKKKTHKEEQPQTSPRKRKHRGGWITEEPEEESFQRGKMRRPKSPITPSGYNRSPSTHIGHNYRSPKFNSGGHYPGSQSSRHHSGPSPSRWQPSHQHHHHHQHLHHHHQNHSYEPAPPRHGRANRYSEFAGNYERW

SEQ ID NO: 1421 - protein, 1356 aa, Arabidopsis thaliana
  Clone ID: AT_F28L22.C1.p3.tg
MATTTTRVEIKVFNGDRDFSLWKIRIQAQLGVLGLKDTLTDFSLTKTVPLTKSEAKQESGDGESSGTKEVPDPVKIEQSEQAKNIIINHISDVVLLKVNHYATTADLWATLNKKYMETSLPNRIYTQLKLYSFKMVSTMTIDQNVDEFLRIVAELGSLEIQVDEEVQAILILNSLPASHIQLKHTLKYGNKTLTVQDVTSSAKSLERELAEAVDLDKGQAAVLYTTERGRPLVRNNQKGGQGKGRSRSNSKTKVPCWYCKKEGHVKKDCYSRKKKMESEGQGEAGVITEKLVFSEALSVNEQMVKDLWILDSGCTSHMTSRRDWFISFQEKGNTTILLGDDHSVESQGQGTIRIDTHGGTIKILENVKYVPHLRRNLISTGTLDKLGYRHEGGEGKVRYFKNNKTALRGSLSNGLYVLDGSTVMSELCNAETDKVKTALWHSRLGHMSMNNLKVLAGKGLIDRKEINELEFCEHCVMGKSKKVSFNVGKHTSEDALSYVHADLWGSPNVTPSISGKQYFLSIIDDKTRKVWLYFLKSKDETFDKFCEWKSLVENQVNKKVKCLRTDNGLEFCNSRFDSYCKEHGIERHRTCTYTPQQNGVAERMNRTIMEKVRCLLNKSGVEEVFWAEAAATAAYLINRSPASAINHNVPEEMWLNRKPGYKHLRKFGSIAYVHQDQGKLKPRALKGFFLGYPAGTKGYKVWLLEEEKCVISRNVVFQESVVYRDLKVKEDDTDNLNQKETTSSEVEQNKFAEASGSGGVIQLQSDSEPITEGEQSSDSEEEVEYSEKTQETPKRTGLTTYKLARDRVRRNINPPTRFTEESSVTFALVVVENCIVQEPQSYQEAMESQDCEKWDMATHDEMDSLMKNGTWDLVDKPKDRKIIGCRWLFKLKSGIPGVEPTRFKARLVAKGYTQREGVDYQEIFAPVVKHVSIRILMSLVVDKDLELEQMDVKTTFLHGDLEEELYMEQPEGFVSDSSENKVCRLKKSLYGLKQSPRQWNKRFDRFMSSQQFIRSEHDACVYVKHVSEHDFIYLLLYVDDMLIAGASKAEINRVKEQLSTEFEMKDMGGASRILGIDIYRDRKGGVLKLSQEIYIRKVLDRFNMSGAKMTNAPVGAHFKLAAVREEDECVDTDVVPYSSAVGSIMYAMLGTRPDLAYAICLISRYMSKPGSMHWEAVKWVMRYLKGAQDLNLVFTKEKDFTVTGYCDSNYAADLDRRRSISGYVFTIGGNTVSWKASLQPVVAMSTTEAEYIALAEAAKEAMWIKGLLQDMGMQQDKVKIWCDSQSAICLSKNSVYHERTKHIDVRFNYIRDVVESGDVDVLKIHTSRNPVDALTKCIPVNKFKSALGVLKLMKWD

SEQ ID NO: 1422 - protein, 200 aa, Arabidopsis thaliana
  Clone ID: AT_T4C9.C1.p40.tg
MGESKSVMENVDEFQWLIDELSNAKVEIFDEDQAIYLMISLPEQIEKFDGRGDYILGKTKILARFEILDVIDALKIEEDENKSVGTDEGKSHCVALSLDLEEKKRKAMSMIVQSVENQNLRKKLMKEKTAAGYKETAEELHVRRRSVSRDRSKSKGEKGACWICGEDGHYKNDCPSRNSEKPKEHAYKAQEASVPRRNNA

SEQ ID NO: 1423 - protein, 597 aa, Arabidopsis thaliana
  Clone ID: AT_T26I12.C1.p220.tg
MVLSNKKLKQRIRQDLAESLSVSVSETNPQSQSLKLLLDSSSHKPRLSKREKRRNCETFAREDDEIRENEVGNGGSSEKTDTKIKKKRKRDDAVEVDELEGDEGTKEEQKPQKKKNKKKKKKRKVNKTPKKAEEGNVEEKVKVEEIEVNTDNKEEDGVVPNKLYVGGIPYQSTEDEIRSYFRSCGVIIKVDCKMRPEDGAFSGIAFITFDTEDGAKRALAFDRAAMGDRYLTIQQYVKTTTPSIPRRKTSSGFAPEMVDGYNRVYIGNLAWDTTERDIRKLFSDCVINSVRLGKNKETGEFKGYAHVDFKDSVSVAIALKLDQQVICGRPVKICCALKDRPATDHTPGETNNAGSYNMEDTYAAADPVPALAGRSEVDDGNYFATTVSSSKVKRRVCYECGEKGHLSTACPIKLQKADDQANSKLGQETVDGRPAMQSYGLPKNSGDSYYMNETYASTNETYNGGYSASAVGTGKVKRRNCYECGEKGHLSTACPIKLQNTSHTNSTLDHQTVEAGPTQVTSYSLQKKTRDTENNGGSFMDESYATVPISIDVTNGANDASLTSAVSTGKIKKRNCYECGEKGHLSSACPNKLQKQG

SEQ ID NO: 1424 - protein, 745 aa, Arabidopsis thaliana
  Clone ID: AT_F5J5.C1.p21.tg
MGDIVAVKPLENVPSSTQCPMLTSTNYTVWAIRMQIARSVNKMWETIEPGIDDGYKNTMARGLIFQSIPESLTLQVGTLATAKLVWDSIKTRYVGADRVKEARLQTLMAEFEKMKMKESEKIDVFAGRLAELATRSDALGSNIETSKLVKKFLNALPLRKYIHIIASLEQVLDLNNTSFEDIVGRIKVYEERVWDGEEQEDDQGKLMYANTDTQDSWYASRGRGQGGGFNGRGRGRGRGSRDTSKVTCYRCDKLGHYASNCPDSVKPSVFETELDGDNVWYLDNGASNHMTGNRAYFSKIDESITGKVRFGDDSCIDIKGKGSILFMSKNGEKKVLAEVYFIPDVKSNIISLGQATEAGCNIRMKENYLTLYDRDGKLLVKAMRSKNRLYKVIMEVKASKCFSDCDNSGTFVVSFEEFGNNGIRDDDHVEETENVGEETEKPGGDGFDENNDIHVEDDHVSSNMGSGELTPPSTPRRSERQKNKPCYLNDYIMLAELEIERLLMTINEEPWDYIEAKELREWREAFELPAGVKPIGLKWVFKTKQNSDGSINKYKARLVAKGYVQRHGIDFDEVFAPVARIETVRLIIALAASNGWEIHHLDVKTAFLHGELKEVVYVTQPEGYVTKGNEEKVYKLNKALYGLKQAPRAWNNKLNSILKELSLCVPPMTMLTQLTHHMLSKLTGEERIYRSSDSIDPSDTRGDNNLVYTPDFLNKIKFSGVPNHILWLKVGCPLCCCVILIHMEV

SEQ ID NO: 1425 - protein, 838 aa, Arabidopsis thaliana
  Clone ID: AT_F3K23.C1.p7.tg
MTSGHSEVEKLDGEGDYVLWKEKLLAHIELLGLLEGLEEDEAIEEEESTAETDSLLTKTEDKVLKEKRGKARSTVILSLGNHVLRKVIKEKTAAGMIRVLDKLFMAKSLPNRIYLKQRLYGYKMSDSMTIEENVNDFFKLISDLENVKVSVPDEDQAIVLLMSLPKQFDQLKDTLKYGKTTLALDEITGAIRSKVLELGASGKMLKNSSDALFVQDRGRSEKRDKSSERNKSQSRSKSREKKVCWVCGKEGHFKKQCYVWKEKNKKGNNSEKGESSNVIGQAADAAALAVREESNADNQEVDNEWIMDTGCSFHMTPRRDWFVEFDESQTGRVKMANQTYSEIKGIGSIRIQNDDNTTVLLKNVRYVPSMSKNLISMGTLEDQGCWFQSKAGTLKVVKGCMTLLKGKKVGTLYLLQGVVVTGNANAVTSSKDESKIWHSRLCHMSQRNIDVLIKKGCLQAEKINGLEFCEDCVYGKTHRVGFGSAKHVTREKLEYIHSDLWGAPSVPNSLGNCQYFITFIDDLTRKNKETVKELKERLSSEFEMKDLGPARKILGMEITRNREENILELSQRSYLQKVLKTFRMDECKPVKTPLAPHMKFVAATETEAEEQADQMKSIPYANAVGSIMYSMIGSRPDLAHPVGVISRFMSKPLMNHWLGVKWVLRYIKGSIDSRLQYKREGDFVVTGYCDSDHSGDRDRSRSTTGYTFTVGGNIVSWRSCLQPVVALSSTEAEYIALTEAAKEAYWLKDLMNELGFKQGAVDIHCDSQSAIALAKNAVHHERTKHIQRRFHYIRDAITDGEVKVLKISTVHNPSDIFTKVVPVNKFLSALKKLRVTSA

SEQ ID NO: 1426 - protein, 334 aa, Arabidopsis thaliana
  Clone ID: AT_T27D20.C1.p19.tg
MATLTEELRGLRKRLGRLEQPYPRVELGQDQARRNAREEAEEFPDLDDEDDPPPDPLRRQHQRREDPLMRNRARGVEPRKSNPEVYMDWERRMEYIFECYGMENLGRTVADRRRKRFGPINTWGDMKYLLRLRMLSQGTRTVDEYFEEFEKLMNALELEESDEALMAQFIDGLQERIQRKVERAQYNGLHELLHLAVQVEQQIRRKASLSNRSRNNTPWNASNNRAMDKSKVVESDHRFKNKSNEAPKTSRPKLGKFPSTNQSRSRYITCFKCQGRGHMARECLNQRVMILTPSGDYESQDEQEDSDEHEDIEYPDVGELLVIRRTLSVFVNLE

SEQ ID NO: 1427 - protein, 372 aa, Arabidopsis thaliana
  Clone ID: AT_F18P9.C1.p20.tg
MKKITIPVESLDEEDDFLLQLAAIEAEAAAKRPRVSSIPEGPYMAALKGSKSDQWQQSPLNPASKSRSVAVTTGGFQRSDGGGGVAGEQDFPEKSCPCGVGICLILTSNTPKNPGRKFYKCPNREENGGCGFFQWCDAVQSSGTSTTTSNSYGNGNDTKFPDHQCPCGAGLCRVLTAKTGENVGRQFYRCPVFEGSCGFFKWCNDNVVSSPTSYSVTKNSNFGDSDTRGYQNAKTGTPCYKCGKEGHWARDCTVQSDTGPVKSTSAAGDCFKCGKPGHWSRDCTAQSGNPKYEPGQMKSSSSSGECYKCGKQGHWSRDCTGQSSNQQFQSGQAKSTSSTGDCYKCGKAGHWSRDCTSPAQTTNTPGKRQRQY

SEQ ID NO: 1428 - protein, 229 aa, Arabidopsis thaliana
  Clone ID: AT_F10A5.C1.p6.tg
MRSERVSYHDAPSRREREPRRAFSQGNLCNNCKRPGHFARDCSNVSVCNNCGLPGHIAAECTAESRCWNCREPGHVASNCSNEGICHSCGKSGHRARDCSNSDSRAGDLRLCNNCFKQGHLAADCTNDKACKNCRTSGHIARDCRNDPVCNICSISGHVARHCPKGDSNYSDRGSRVRDGGMQRGGLSRMSRDREGVSAMIICHNCGGRGHRAYECPSARVADRGFRRY

SEQ ID NO: 1429 - protein, 260 aa, Arabidopsis thaliana
  Clone ID: AT_T18D12.C1.p60.tg
MPPKRKDINFLFDDGEDTVAIIDDEANEDLRLKILEKAFSRRNVDNKLDSDLSFDPGVVSTVMVNGGKSEEVKNSKSNKKMKRNKLEAANEIVTHCVERQDEDNMVEDVVRGEEEDGETTSNSVMTKLLRGARYFDPLDAGWVTCYSCGEKDHITVSCPTLTNCRKSCFICASLEHGARQCTKVWDIDANLGIHQDKTQRFKGKLCGSGDDDEVTDLMLNPQHRGLENMIQGLFLARIRDYTKPKWFDSTNYLELARTMI

SEQ ID NO: 1430 - protein, 1263 aa, Arabidopsis thaliana
  Clone ID: AT_F6N18.C1.p14.tg
IPRPERNVILTGAQRTELAEKTVKDHKVKNYLFASIDKTILKTILQKETSKDLWESMKRKYQGNDRVQSAQLQRLRRSFEVLEMKIGETITGYFSRVMEITNDMRNLGEDMPDSKVVEKILRTLVEKFTYVVCAIEESNNIKELTVDGLQSSLMVHEQNLSRHDVEERVLKAETQWRPDGGRGRGGSPSRGRGRGGYQGRGRGYVNRDTVECFKCHKMGHYKAECPSWEKEANYVEMEEDLLLMAHVEQIGDEEKQIWFLDSGCSNHMCGTREWFLELDSGFKQNVRLGDDRRMAVEGKGKLRLEVDGRIQVISDVYFVPGLKNNLFSVGQLQQKGLRFIIEGDVCEVWHKTEKRMVMHSTMTKNRMFVVFAAVKKSKETEETRCLQVIGKANNMWHKRFGHLNHQGLRSLAEKEMVKGLPKFDLGEEEAVCDICLKGKQIRESIPKESAWKSTQVLQLVHTDICGPINPASTSGKRYILNFIDDFSRKCWTYLLSEKSETFQFFKEFKAEVERESGKKLVCLRSDRGGEYNSREFDEYCKEFGIKRQLTAAYTPQQNGVAERKNRSVMNMTRCMLMEMSVPRKFWPEAVQYAVYILNRSPSKALNDITPEEKWSSWKPSVEHLRIFGSLAYALVPYQKRIKLDEKSIKCVMFGVSKESKAYRLYDPATGKILISRDVQFDEERGWEWEDKSLEEELVWDNSDHEPAGEEGPEINHNGQQDQEETEEEEETVAETVHQNLPAVGTGGVRQRQQPVWMKDYVVGNARVLITQDEEDEVLALFIGPDDPVCFEEAAQLEVWRKAMEAEITSIEENNTWELVELPEEAKVIGLKWIFKTKFNEKGEVDKFKARLVAKGYHQRYGVDFYEVFAPVAKWDTIRLILGLAAEKGWSVFQLDVKSAFLHGDLKEDVFVEQPKGFEVEEESSKVYKLKKALYGLKQAPRAWYSRIEEFFGKEGFEKCYCEHTLFVKKERSDFLVVSVYVDDLIYTGSSMEMIEGFKNSMMEEFAMTDLGKMKYFLGVEVIQDERGIFINQRKYAAEIIKKYGMEGCNSVKNPIVPGQKLTKAGAVSRYMESPNEQHLLAVKRILRYVQGTLDLGIQYERGGATELVGFVDSDYAGDVDDRKSTSGYVFMLGGGAIAWASKKQPIVTLSTTEAEFVSASYGACQAVWLRNVLEEIGCRQEGGTLVFCDNSSTIKLSKNPVLHGRSKHIHVRYHFLRELVKEGTIRLDYCTTTDQVADIMTKAVKREVFEELRGRMGVRRREE

SEQ ID NO: 1431 - protein, 474 aa, Arabidopsis thaliana
  Clone ID: AT_F15A23.C1.p8.tg
METIIYSSSDEEDSYGCSQDSYYNETRFVESWHDDGYSSSSDFEEEPDGGAPEPEPPDRYSSHATPPSYSKPWISWNPIPKTNFYPTFYPTRKVIYKLFVHNGSKTYGPEFFLFSGLGYLQWESNMNYYFEFHSTAQEDKLSIALGQLKGSALWWWDQDEYNRWYERRAPIRTWERLKWNMCAKYSPQSLSPAHVVQQKQKPTFLPQMQATTQGKCTFQTKHVELTCYRCKQEGHIAKICPTRETTTKVGLEQQELLKAKEKQEIVSSPKGKNEQAETCQTDLNNSMNVITHLSSAKSIAKVSGTKENITDQGEASTMEKVFTEESKNQGGPTLDEITVNKDESVNDTIQIKGEPSDAQQFPKTQCNLLNPYTLQWTNLTYLCVGKKVLRTKPLEEGGDDVRMGADVPADALVDRLLAGFFDGLSDGLPEVLHVSNQLVRTKESYPFLPFCASQSHIWKLGDPLRHPEPFTLNP

SEQ ID NO: 1432 - protein, 1008 aa, Arabidopsis thaliana
  Clone ID: AT_T26N6.C1.p3.tg
MDYPKEFVAVGKTIMLEKGNYGHWKVKMRALIRGLGKEAWIATSIGWKAPVIKGEDGEDVLKTKDQWNDAEEAKAKANSRALSLIFNFVNQNQFKRIQNCESAKEAWDKLAKAYEGTSSVKRSRIDMLASQFENLSMEETENIEEFSGKISAIASEAHNLGKKYKDKKLVKKLLRCLPSRFESKRTAMGTSLDTDSIDFEEVVGMLQAYELEITSGKGGYSKGLALAASAKKNEIQELKDTMSMMAKDFSRAMRRVEKKGFGRNQGTDRYRDRSSKRDEIQCHECQGYGHIKAECPSLKRKDLKCSECNGLGHTKFDCVGSKSKPDKSCSSESESDSNDGDSEDYIKGFVSFVGIIEEKDESSDSEADGEDEDNSADEDSDIEKDVNINEEFRKLYDSWLMLSKEKVAWLEEKLKVQELTEKLKGELTAANQKNSELIQKCSVAEEKNRELSQELSDTRKNIHMLNSGTKDLDSILAAGRVGKSNFGLGYNGAGSGTKTNFVRSEAAAPTKSQTGFRSNYDAVPARRVYQNHDHYQSRRTVTGYECYYCGRHGHIQRYCYRYAARLNKLKRQGKLYPYQGRTSKMYVRREDLYCHVAYTSIEEGIKKPWYFDSGASRHMVGSQSNLENYTSVKESKVTFGGGDKRKIKGKGDLTKAEKPQLTNVYFVEGLTANLISVSQLCDEGLTVSFNSVKCWATNEKNQNTLTGVRTGNNCYMWEEPKECLRAEKEDPVVWHQRLGHMNARSMSEIVSKEMVRGVQELKHIEKIVYDAYNQGKQIRVQHKRVVGVVERKNQTFQEMARAMIHGHGVPEKFWTEAISTACYVINHVYVRIGGTFDKLVKAFVKTMTTEFRLSMVGELKYFRGLQINQINEGIAISQSTYAQNLVKRFDMCSSNPVETPMSTTNLCSCSTKILWMKHMGLDYGMSFSDPLLVKCDNESAIAISKNPVQHSITKHIAIRHHFVRELVEEKQITVEHVPTEIQLADIFTKPLDLNMFVNLLKSLGIGEV

SEQ ID NO: 1433 - protein, 1611 aa, Arabidopsis thaliana
  Clone ID: AT_T16I21.C1.p9.tg
MVIVGRTWLRRERLKAEMMGGDSSELCGLTLEVSQMGKSSKTGKSKKDKGIVEETLVEEETMINEKTRVGTMFDGTDSAGPEAGKKSINEEAPESSGARDSTDNRNNTPTAQEQWDLMKGMMAQLATLTKAVIADPVVLKVDNQKDDDSEVVEVNPQPNHGRKRGDYLSLLEHVSRLGTRHFMGSTDPIVADEWRSRLKRNFKSTRCPEDYQRDIAVHFLEGDAHNWWLTVEKRRGDEVRSFADFEDEFNKKYFPPEAWDRLECAYLDLVQGNRTVREYDEEFNRLRRYVGRELEEEQAQLRRFIRGLRIEIRNHCLVRTFNSVSELVERAAMIEEGIEEERYLNREKAPIRNNQSTKPADKKRKFDKVDNTKSDAKTGECVTCGKNHSGTCWKAIGACGRCGSKDHAIQSCPKMEPGQSKVLGEETRTCFYCGKTGHLKRECPKLTAEKQAGQRDNRGGNGLPPPPKRQAVASRVYELSEEANDAGNFRAITGGFRKEPNTDYGMVRAAGGQAMYPTGLVRGISVVVNGVNMPADLIIVPLKKHDVILGMDWLGKYKAHIDCHRGRIQFERDEGMLKFQGIRTTSGSLVISAIQAERMLGKGCEAYLATITTKEVGASAELKDIPIVNEFSDVFAAVSGVPPDRSDPFTIELEPGTTPISKAPYRMAPAEMAKLKKQLEELLDKGFIRPSSSPWGAPVLFVKKKDGSFRLCIDYRGLNKVTVKNKYPLPRIDELMDQLGGAQWFSKIDLASGYHQIPIEPTDVRKTAFRTRYDHFEFVVMPFGLTNAPAAFMKMMNGVFRDFLDEFVIIFINDILVYSKSWEAHQEHLRAVLERLREHELFAKLSKCSFWQRSVGFLGHVISDQGVSVDPEKIRSIKEWPRPRNATEIRSFLGLAGYYRRFVMSFASMAQPLTRLTGKDTAFNWSDECEKSFLELKAMLTNAPVLVLPEEGEPYTVYTDASIVGLGCVLMQKGSVIAYASRQLRKHEKNYPTHDLEMAAVVFFLKIWRSYLYGAKVQIYTDHKSLKYIFTQPELNLRQRRWMELVADYNLDIAYHPGKANQVADALSRRRSEVEAERSQVDLVNMMGTLHVNALSKEVEPLGLGAADQADLLSRIRLAQERDEEIKGWAQNNKTEYQTSNNGTIVVNGRVCVPNDRALKEEILREAHQSKFSIHPGSNKMYRDLKRYYHWVGMKKDVARWVAKCPTCQLVKAEHQVPSGLLQNLPIPEWKWDHITMDFVTGLPTGIKSKHNAVWVVVDRLTKSAHFMAISDKDGAEIIAEKYIDEIVRLHGIPVSIVSDRDTRFTSKFWKAFQKALGTRVNLSTAYHPQTDEQSERTIQTLEDMLRACVLDWGGNWEKYLRLVEFAYNNSFQASIGMSPYEALYGRACRTPLCWTPVGERRLFGPTIVDETTERMKFLKIKLKEAQDRQKSYANKRRKELEFQVGDLVYLKAMTYKGAGRFTSRKKLSPRYVGPYKVIERVGAVAYKLDLPPKLNAFHNVFHVSQLRKCLSDQEESVEDIPPGLKENMTVEAWPVRIMDRMTKGTRGKARDLLKVLWNCRGREEYTWETENKMKANFPEWFKEMGKDQLDADSRTNPIQGGETCNARDPQ

SEQ ID NO: 1434 - protein, 1080 aa, Arabidopsis thaliana
  Clone ID: AT_K9P8.C1.p7.tg
MVKVRMNTADVAAEVKCLKRLIGMRCSNVYDISPKTYMFKLLNSSGITESGESEKVLLLMESGVRLHTTAYVRDKSNTPSGFTLKLRKHIRTRRLEDVRQLGYDRIIVFQFGLGANAHYVILELYAQGNIILTDSEYMIMTLLRSHRDDNKGFAIMSRHRYPIEICRVFERTTVSKLQESLTAFVLKDHDAKQIEPKEQNGGKKGGKSNDSTGAKQYTLKNILGDALGYGPQLSEHIILDAGLVPTTKLSEDKKLDDNEIQLLVQAVIVFEDWLEDIINGQKVPEGYILMQKQILANDTTSESGGVKKMYDEFCSILLNQFKSRVYEKFETFDAALDEFYSKIESQRSEQQQKAKEDSASLKLNKIRQDQENRVQILKKEVNHCVNMAELIEYNLEDVDAAILAVRVALAKGMGWDDLARMVKEEKKLGNPVAGVIDRLYLEKNCMTLLLCNNLDEMDDDEKTVPVEKVEVDLSLSAHGNARRWYEMKKKQETKQEKTVSAHEKAFRAAEKKTRHQLSQEKVVATISHMRKVHWFEKFNWFISSENYLVISGRDAQQNEMIVKRYMSKGDLYVHAELHGASSTVIKNHKPEQNVPPLTLNQAGCFTVCHSQAWDSKIVTSAWWVYPHQVTKTAPTGEYLTVGSFMIRGKKNFLPPHPLIMGFGLLFRLDESSLGAHLNERRVRGEEEGMNDVVMETHAPDEHSDTESENEAVNEVVSASGEVDLQESSTALSQDTSSLDMSSSGITEENVASATSQLEDLLDRTLGLGAATVAGKKDTIETSKDDMEEKMKQEEKNAVVRDKPYMSKAERRKLKMGQSGNTAADGNTGQEKQQRKEKDVSSLSQATKSIPDNKPAGEKVSRGQRGKLKKMKEKYADQDEDERKIRMALLASSGKPQKTDVESQNAKTAVTEVKKPSEETDDAVKICYRCKKVGHLARDCHGKETSDMDKVVMEEDDIHEVGDEEKEKLIDVDYLTGNPLPTDILLYAVPVCGPYNALQSYKYRVKAIPGSMKKGKAAKTAMNLFTHMSEASVREKELMKACTDPELMAALVGNVKITAAGLTQLKQKQKKGKKSGKQQHS

SEQ ID NO: 1435 - protein, 1215 aa, Arabidopsis thaliana
  Clone ID: AT_T9F8.C1.p8.tg
MKAIMRKRFVPSHYHRELHLKLRNLTQGNRSVEEYYKEMETLMLRADISEDREATLSRFLGDLNRDIQDRLETQYYVQIEEMLHKAILFEQQVKRKSSSRSSYGSGTIAKPTYQREERTSSYHNKPIVSPRAESKPYAAVQDHKGKAEISTSRVRDVRCYKCQGKGHYANECPNKRVMILLDNGEIEPEEEIPDSPSSLKENEELPAQGELLVARRTLSVQTKTDEQEQRKNLFHTRCHVHGKVCSLIIDGGSCTNVASETMVKKLGLKWLNDSGKMRVKNQVVVPIVIGKYEDEILCDVLPMEAGHILLGRPWQSDRKVMHDGFTNRHSFEFKGGKTILVSMTPHEVYQDQIHLKQKKEQVVKQPNFFAKSGEVKSAYSSKQPMLLFVFKEALTSLTNFAPVLPSEMTSLLQDYKDVFPEDNPKGLPPIRGIEHQIDFVPGASLPNRPAYRTNPVETKELQRQKDGSWRMCFDCRAINNVTVKYCHPIPRLDDMLDELHGSSIFSKIDLKSGYHQIRMNEGDEWKTAFKTKHGLYEWLVMPFGLTHAPSTFMRLMNHVLRAFIGIFVIVYFDDILVYSESLREHIEHLDSVLNVLRKEELYANLKKCTFCTDNLVFLGFVVSADGVKVDEEKVKAIRDWPSPKTVGEVRSFHGLAGFYRRFFKDFSTIVAPLTEVMKKDVGFKWEKAQEEAFQSLKDKLTNAPVLILSEFLKTFEIECDASGIGIGAVLMQDQKLIAFFSEKLGGATLNYPTYDKELYALVRALQRWQHYLWPKVFVIHTDHESLKHLKGQQKLNKRHARWVEFIETFAYVIKYKKGKDNVVADALSQRYTLLSTLNVKLMGFEQIKEVYETDHDFQEVYKACEKFASGRYFRQDKFLFYENRLCVPNCSLRDLFVREAHGGGLMGHFGIAKTLEVMTEHFRWPHMKCDVKRICGRCNTCKQAKSKIQPNGLYTPLPIPKHPWNDISMDFVMGLPRTGKDSIFVVYSPFQIVYGFNPISPFDLIPLPLSERVSIDGKKKAELVQQIHENARRNIEEKTKLYAKQANKGRREQIFEVGDMVWIHLRKERFPAQRKSKLMPRIDGPFKIIKRINDNAYQLDLQDEPDLRSNPFQEGGDDMIMDSINDMEHEPELERELVAEEGAKLVAEDELVAEEKLVVEDVLVTPAVPMTRSRAKLFDQAIAGMLNHIRDRPNDLSQVTTSLVLFQAQGPHQDG

SEQ ID NO: 1436 - protein, 373 aa, Arabidopsis thaliana
  Clone ID: AT_MIF21.C1.p14.tg
MGYMCDFCGEQRSMVYCRSDAACLCLSCDRNVHSANALSKRHSRTLVCERCNAQPASVRCSDERVSLCQNCDWSGHDGKNSTTTSHHKRQTINCYSGCPSSAELSSIWSFCMDLNISSAEESACEQGMGLMTIDEDGTGEKSGVQKINVEQPETSSAAQGMDHSSVPENSSMAKELGVCEDDFNGNLISDEVDLALENYEELFGSAFNSSRYLFEHGGIGSLFEKDEAHEGSMQQPALSNNASADSFMTCRTEPIICYSSKPAHSNISFSGITGESNAGDFQDCGASSMKQLSREPQPWCHPTAQDIIASSHATTRNNAVMRYKEKKKARKFDKRVRYVSRKERADVRRRVKGRFVKSGEAYDYDPMSPTRSY

SEQ ID NO: 1437 - protein, 251 aa, Arabidopsis thaliana
  Clone ID: AT_T13D8.C1.p14.tg
MAQVCHTCRHVTAVIHCVTEALNFCLTCDNLRHHNNIHAEHVRYQLCDNCSMYPSILFCYEDGMVLCQSCYSHHYNCATNGHQTQVVFANMNNQHHDHAHMPHVVHHNNNNNHQQQHVGGHQRRAEMFERSCHGDNNCERWMFAMRCELCVASNSNAVVYCPTHNQILCDSCDRMIHSHEDAVPPHSRCKLCVICKRPSRRFLIGGYQFNFPPVHPPAAEGIPVTPPTELPQQDINYDYLDDVDDFSWFGR

SEQ ID NO: 1438 - protein, 364 aa, Arabidopsis thaliana
  Clone ID: AT_MEK6.C1.p2.tg
MEPKCDHCATSQALIYCKSDLAKLCLNCDVHVHSANPLSHRHIRSLICEKCFSQPAAIRCLDEKVSYCQGCHWHESNCSELGHRVQSLNPFSGCPSPTDFNRMWSSILEPPVSGLLSPFVGSFPLNDLNNTMFDTAYSMVPHNISYTQNFSDNLSFFSTESKGYPDMVLKLEEGEEDLCEGLNLDDAPLNFDVGDDIIGCSSEVHIEPDHTVPNCLLIDKTNTSSFTGSNFTVDKALEASPPGQQMNINTGLQLPLSPVLFGQIHPSLNITGENNAADYQDCGMSPGFIMSEAPWETNFEVSCPQARNEAKLRYKEKKLKRSFGKQIRYASRKARADTRKRVKGRFVKAGDSYDYDPSSPTTNN

SEQ ID NO: 1439 - protein, 743 aa, Arabidopsis thaliana
  Clone ID: AT_F25P17.C1.p6.tg
MHEVGLFVDLNSFTQLILTLFFVSIGLLYFVKRTAAKYFEVGGGSGGFDRDHRRDFMVSDTAECSVCGKATTKKCSRCKSVRYWYVEKIQVCSLLGFLDSDLDVAGDRRVNSFACERFWWICFLNLVLFLPLFFGTSSAACQTSDWKSGHKLKCKGFRSTDSSPVRRDDIDFEASLFGNRSASKKTRIALVPQQSQSKATLKPTDVLFPYESFVRYYNWDRPIMAPCGLTNCGNSCFANVVLQCLSWTRPLVAYLLERGHKRECRRNDWCFLCEFENHLDRANYSRFPFSPMNIISRLPNIGGNLGYGRQEDAHELMRFAIDMMQSVCLDEFGGEKVVPPRAQETTLIQYIFGGLLQSQVQCTACSNVSDQYENMMDLTVEIHGDAVSLEECLDQFTAKEWLQGDNLYKCDRCDDYVKACKRLSIRCAPNILTIALKRFQGGRFGKLNKRISFPETFDLGPYMSGGGEGSDVYKLYAVIVHLDMLNASFFGHYICYVKDFRGNWYRIDDSEVEKVELEDVLSQRAYMLLYSRTVLSEGALTDYDIWYWCRVQPRPSNLRSEESQDEKKTDTLNTESNQDGSVESSGVGTNDTSVSSLCNGIISHSEDPEYEKESSLSASVPVSEEGKEVDVKVDTVDSESNRSIDMEHDSGTDHQEEEANGKEDPTVENLAVDSSCLDITTPSPSAATEFIPQENERSDTESKPLEKEHSDTESNKPLEKEHLDSESKPLEKEHSDTEMIDAQ

SEQ ID NO: 1440 - protein, 336 aa, Arabidopsis thaliana
  Clone ID: AT_MXI22.C1.p17.tg
MTHLNKKQRLENNHNNTVNNHFEDLHDDLIISILRKLATSASSPSDFLTVLSTCKRLNRLGLHPLVLSKAGTQTLAVTAEKWSDSSHKFLKLCVNAGNIDASYSLGMIRFYCLQNPVSGASLMAKAAIKSHAPALYSLSVIQFNGSGGSKTDKNLRAGVALCARSAYLGHVDALRELGHCLQDGYGVPRDVSEGRRLLIQANARELACSLRSYLSLKSGDENETLTDLSVVPVQEIHPVNRFLKEWFSSGRVDLAEGLRMCSHGGCGRPETRAHEFRRCSVCGKVNYCSRGCQALDWRAKHKVECTPLDLWVAAAAEIGDDGEAVAVEIDDNHGER

SEQ ID NO: 1441 - protein, 379 aa, Arabidopsis thaliana
  Clone ID: AT_F1N21.C1.p16.tg
MLPSRKTKRVFSCDFTPGRKRRRCVVVPSSVSPVPENTTGADLLDSIPDDLVISILCKLGSTSRCPADFINVLLTCKRLKGLAMNPIVLSRLSPKAIAVKAHNWSEYSHRFLKRCVDAGSLEACYTLGMIRFYCLQNRGNGASLMAKAAISSHAPALYSLAVIQFNGSGGSKNDKDLRAGVALCARAAFLGHVDALRELGHCLQDGYGVPQNVSEGRRFLVQANARELAAVLSSGIQARSTWLSLSQPPPPVVPNHGQQTCPLLSDFGCNVPAPETHPANRFLADWFAVRGGDCPGDGLRLCSHAGCGRPETRKHEFRRCSVCGVVNYCSRACQALDWKLRHKMDCAPVQRWLEEGDGGEGNVQIDGNGNGDNVLLPMS

SEQ ID NO: 1442 - protein, 731 aa, Arabidopsis thaliana
  Clone ID: AT_MNA5.C1.p19.tg
MMLVFLLIRRQWRSASVRREEVIRLIALATEESYLAEEVRPATVDYGGDSVSDVYRCAVCLYPTTTRCSQCKSVRYCSSKCQILHWRRGHKEECRSPDYDEEKEEYVQSDYDAKESNVDFPSRGTAYESSSNVSVDVACDMSTSRPSIHKVQPRSEAVDFTTSLNIKDNLYETRPLSRKKSRNRTDKVESASNYSKGKTDAKLRKLGNQNSRRSGDSANMSISDQFLSVGFEEEMNALKHERITSEPSSASAAMSSSSTLLLPSKANSKPKVSQASSSGLKTSVQKVVQHFRPPQSSKKSQPSSSIDEMSFSYELFVKLYCDRVELQPFGLVNLGNSCYANAVLQCLAFTRPLISYLIRGLHSKTCRKKSWCFVCEFEHLILKARGGESPLSPIKILSKLQKIGKHLGPGKEEDAHEFLRCAVDTMQSVFLKEAPAAGPFAEETTLVGLTFGGYLHSKIKCMACLHKSERPELMMDLTVEIDGDIGSLEEALAQFTAYEVLDGENRYFCGRCKSYQKAKKKLMILEGPNILTVVLKRFQSDNFGKLSKPIHFPELLDISPYMSDPNHGDHPVYSLYAVVVHLDAMSTLFSGHYVCYIKTLDGDWFKIDDSNVFPVQLETVLLEGAYMLLYARDSPRPVSKNGGRKSKQRRNLAAIPSRKGNKKQRDGDNNSLLPRVDWSSGSLSSMFSSSDTTSSCSTKDSSGIENLSDYLFGGVEPVWKWDRHNKSQTFD

SEQ ID NO: 1443 - protein, 1008 aa, Arabidopsis thaliana
  Clone ID: AT_F22K18.C1.p240.tg
MLLVLDLGISSLVLVVSLVLPLIGLFVRHKWRVAAQRREEIRRLLIHASEEAARAELEASVEFSSVAVSNVFHCPVCYCLATTRCSRCKAVRYCSGKCQIIHWRQGHKDECHPASIVYDSEDESDSDLRLGEENGQNTPEETLLVGPEPVTIPIGESLLSNRARSPEDGNGDIADNKDDLIDKEEAVSVAETSGSSFSGFSSSPRNDSGDEISRCESFSSSESERSESLLDAHVSVEPEDTCFSTIEDAPSKLLSPKFVHLVESVDNLANLPKLSVHKPEDDAGQNQSQSRSLHSLVTDRHPVSADPSLKSSDFWGTALGSAERVSDSCVKSKSGRPGNSSLHFSFGSGSSRDTSAAKVSEQRSSILKEAPRGTGYISDGVNLRERNAKRFDEAEIALPISSSTDALSPLDSSNLSHVTLPKSKSASSENGSMLAPLKVGEVQLLASKASNTKKCADLMKHSPLGAKSVRVLDHQKQNGAVVQHINSLHGRSGLKASVLKVVDQWTRPKSENEMAGRHGHKGLFPYEVFAKLYTYKIEFQPCGLINVGNSCFANVVFQCLMFTPPLTTYFLQQFHSRACTKKEQCFTCGFEKLVVKAKEEKSPLSPNGLLSQLQNIGIFLGNGKEEDAHEFLRFVVDTMQSVCIKASEYDMTKSSKLEDTTLIGLTFGGYLRSKIKCMKCQVKSELREKMMDLTVEIDGDISTLDDALRRFTRTEILDGENKYRCGSCKSYERAKKKLKITEPPNVLTIALKRFQAGKFGKLNKLIRFPETLDLAPYVSGGSEKSHDYKLYGVIVHLDVMNAAFSGHYVCYIRNQNKWYKADDSTVVTSDVERILTKGAYMLFYARCTPTPPRLAVCTKTEASNKKSRVPLPKANEKSTISRSVSTSSPELSSNTPGGGRSGNIQSFYSSFQRLQKILEEDSASDSSSLFDSNSDECSCSTDSTSMDDFADFIFGDHQGRAHGQSETPSPTSSSSSSSPPFTRRSPLSRSSPETYGTSRHQLPLGGER

SEQ ID NO: 1444 - protein, 631 aa, Arabidopsis thaliana
  Clone ID: AT_F28M20.C1.p140.tg
MHEVGFPLDLSVFTRLIATLFFLAVGVFYFLKNTAAKYFDIGAAAAGGFDRDFMAVDAEDCSVCGNFSTKKCSRCKSVRYCSAECQRSDWSSGHQRNCRDYGITTLTPSAKNGLRFRASPFGDSSASSIALISERGQNKSSLKPREVLFPYEEFVEYFNWDNPELAPCGLMNCGNSCFANVILQCLSWTRPLVAYLLEKGHKRECMRNDWCFLCEFQTHVERASQSRFPFSPMNIISRLTNIGGTLGYGRQEDAHEFMRYAIDMMQSVCLDEFGGEKIVPPRSQETTLIQYIFGGLLQSQVQCTVCNHVSDQYENMMDLIVEMHGDAGSLEECLDQFTAEEWLHGDNMYKCDRCSDYVKACKRLTIRRAPNILTIALKRYQGGRYGKLNKRISFPETLDLNPYMSEGGDGSDVYKLYAVIVHLDMLNASFFGHYICYIKDFCGNWYRIDDSEIESVELEDVLSQRAYMLLYSRIQARSSSSCLRSEVKDEKKTDTLDTESCVKELVESSMVGAIESRSSTHATIEDPVCEQSPSPSPSPSPSPSPSPSPSVLASECCSEVERIDTLDSESNSSIDDSATDHQEDVANGNKDPEVKYQAADSWSDPTTSTPLVCTKSKPPVRDMDTKMIDAQ

SEQ ID NO: 1445 - protein, 891 aa, Arabidopsis thaliana
  Clone ID: AT_F20D23.C1.p20.tg
MLEPRGADIPILFLVLVVLPVVAYILLGKWSNISEKRVRANLLAQMAAEEALRAETVVNADRGVRFESVATENRAQRTRTKTVSAGGGAVRAEFDAGARETVAEQRSDSVTATCGVTVVAPVNNNELHVCARCFGPAKTRCSRCKSVRYCSGKCQIIHWRVAHKDECVPVESCSSSSERVSFEKDSVLYDHGMDSTMYSNNTTQAAKGKTSKSSVDFASLGISQNDITPQINTQGRKSVGKQHSSKANRESCRRDSATVFDSSDEAASAGGDNKTSHIKHKSRGNSYAAETNPRRHSVDSSAVQMNGQSFVSGMQESHKHENNLGVRSSFGCPNTQYPSNETVRSKDTGISEESNGISSTMGIMKMMGLRNSTKHDDRYKNLKMLFPYEEFLKFFQCEVFDLSPRGLVNCGNSCYANAVLQSLTCTKPLVAYLLRRSHSRSCSGKDWCLMCELEQHVMMLRESGGPLSASRILSHMRSINCQIGDGSQEDAHEFLRLLVASMQSICLERLGGETKVDPRLQETTLVQHMFGGRLRSKVKCLRCDHESERYENIMDLTLEIYGWVESLQDALTQFTRPEDLDGENMYRCSRCAGYVRARKELSIHEAPNILTIVLKRFQEGRYGKINKCISFPEMLDMIPFMTRTGDVPPLYMLYAVIVHLDTLNASFSGHYISYVKDLRGNWYRIDDSEIHPVPMTQVMSEGAYMLFYMRSYPRPQRGEHNGKAPVHHSQPRNEMKEQRKPVNRFKPRADHKNTESSSSEWSLFTSSDEASFTTESTRDSFSTIDYTDVCHVVDSSSPFAIFNNVYHNVEPSPHNTVACRMFSGTKPETRYFVEQETNHNNTVVLDATPSLYPIPAPYPPHDYYDQSMYVNYETNPEFNNGQDQDRTYSYW

SEQ ID NO: 1446 - protein, 1188 aa, Arabidopsis thaliana
  Clone ID: AT_F14N23.C1.p5.tg
MSFQVRRDRSDDRSHRFNHQQTWIPRNSSTSSVVVNEPLLPPNTDRNSETLDAGSASRPVYLQRQHNASGPPSYNHHQRSSNIGPPPPNQHRRYNAPDNQHQRSDNIGPPQPNQHRRYNAPDNQHQRSDNSGPPQPYRHRRNNAPENQHQRSDNIGPPPPNRQRRNNASGTLPDNRQRVASRTRPVNQGKRVAKEENVVLTDPNLPQLVQELQEKLVKSSIECMICYDKVGRSANIWSCSSCYSIFHINCIKRWARAPTSVDLLAEKNQGDNWRCPGCQSVQLTSSKEISYRCFCGKRRDPPSDPYLTPHSCGEPCGKPLEKEFAPAETTEEDLCPHVCVLQCHPGPCPPCKAFAPPRSCPCGKKMVTTRCSERRSDLVCGQRCDKLLSCGRHQCERTCHVGPCDPCQVLVNATCFCKKKVETVICGDMNVKGELKAEDGVYSCSFNCGKPLGCGNHFCSEVCHPGPCGDCDLLPSRVKTCYCGNTRLEEQIRQSCLDPIPSCSNVCRKLLPCRLHTCNEMCHAGDCPPCLVQVNQKCRCGSTSRAVECYITTSSEAEKFVCAKPCGRKKNCGRHRCSERCCPLLNGKKNDLSGDWDPHVCQIPCQKKLRCGQHSCESLCHSGHCPPCLEMIFTDLTCACGRTSIPPPLSCGTPVPSCQLPCPIPQPCGHSDTHGCHFGDCPPCSTPVEKKCVGGHVVLRNIPCGLKDIRCTKICGKTRRCGMHACARTCHPEPCDSFNESEAGMRVTCRQKCGAPRTDCRHTCAALCHPSAPCPDLRCEFSVTITCSCGRITATVPCDAGGRSANGSNVYCAAYDEASVLQKLPAPLQPVESSGNRIPLGQRKLSCDDECAKLERKRVLQDAFDITPPNLEALHFSENSAMTEIISDLYRRDPKWVLAVEERCKFLVLGKARGSTSALKVHIFCPMQKDKRDTVRLIAERWKLGVSNAGWEPKRFTVVHVTAKSKPPTRIIGARGGAISIGGPHPPFYDSLVDMDPGLVVSFLDLPREANISALVLRFGGECELVWLNDKNALAVFHDHARAATAMRRLEHGSVYHGAVVVQSGGQSPSLNNVWGKLPGSSAWDVDKGNPWRRAVIQESDDSWGAEDSPIGGSSTDAQASALRSAKSNSPIVTSVNRWSVLEPKKASTSTLEPIAQIEESSSSKTTGKQPVEGSGEEVVDDWEKVCE

SEQ ID NO: 1447 - protein, 808 aa, Arabidopsis thaliana
  Clone ID: AT_YUP8H12.C1.p24.tg
MATRGSRSEKVKRIFQQFDGNHDGGLNREEMAALVVAVNPRVKFSDEQINAILDEVFRTYAEFIDPNKGLTYDGLLRTYDDGAGDVDRDFDALGLELNADETTIKGSEAASSSSITDERAVEAQKKQRTAAWAVSPNHGIVFDETWKLVDDLEILVKRLKSKQEKDGKLKADNNNNNVDAFSDAGWSRELGPSSEISEKRIYWEESSHDYGVFVKELGVLRSKADGARSREEAFDGHMAIGRVLYEHQLFKEALVSFKRACELQPTDVRPHFKAGNCLYVLGKCKESKDEFLLALEAAESGGNQWAYLLPQIYVNLGIALEGEGMVLSACEYYREAAILCPTHFRALKLLGSALFGVGEYRAAVKALEEAIYLKPDYADAHCDLASSLHSMGEDERAIEVFQRAIDLKPGHVDALYNLGGLYMDLGRFQRASEMYTRVLTVWPNHWRAQLNKAVSLLGAGETEEAKRALKEALKLTNRVELHDAISHLKHLQKKKGKNNGNGNGGEGPFIVVEPSKFKTVGEKTTLRPDLATALQIRAFQRVTRLGKCDVEAVRKEMRDNDVPVSYSGSGGPTKSIRKPNLEEILRRLLSSLKPDTFQGAIKAINEKILALLDDSGSGRVDMGMFYAVIAPLCGGHSDKRKRVAFDALLWRPVNEGSSQITKTDAVKYIKLLRAIYIPSHGMSEMLEVHGEEEAESSVTVTFNQFLAMFDDPDWGFGIMSTILKLEANDRNRHGNQVCSVCRYPVIGSRFKEVKARFSLCNQCYGEGKVPPSFKQEEYKFREYESEAEAMKAKCVCFSMQSHKKAIAT

SEQ ID NO: 1448 - protein, 802 aa, Arabidopsis thaliana
  Clone ID: AT_T32F6.C1.p3.tg
MTTRGSRSEKVKRIFQQFDGNLDGGLSREEMSALVVAVNPRVKFSDEQISAILDEVFRTYAEFIDGDKGLTFDGLLRTYDDGAGDVDRDFDALGIEFNEETKGASEASSSSITDERAVEAQKQQRTAAWAVSPNHGIVFDETWKLVDDLEILVKRLKSKQEKDGKLKVDNNNVDAFSEAGWSRELGPSSDISDKRIYWEESSHDYGVFVKELGVLRSKADGARSREEAFDGHMAIGKVLYEHQLFKEALVSFKRACELQPTDVRPHFKAGNCLYVLGKYKESKDEFLLALEAAESGGNQWAYLLPQIYVNLGISLEGEGMVLSACEYYREAAILCPTHYRALKLLGSALFGVGEYRAAVKALEEAIYLKPDYADAHCDLASSLHAMGEDERAIEVFQRAIDLKPGHVDALYNLGGLYMDLGRFQRASEMYTRVLAVWPNHWRAQLNKAVSLLGAGETEEAKRALKEALKMTNRVELHDAVSHLKQLQKKKKVKKGNSANEEGPFIVVESSKFKTVGEKTTLRPDLAIALQVRAFQRVTRLWKCDVEALRREMRDNNVPVSYSGNGIPTKSIRRPNLEEILRRLLNVLKPETFQGAIKAINEKILSVLDDSGSGRVDLGMFYAVIAPLCGGHPDKRKRVAFDALLWKPVNEGSSQITKMEAVKYIKLLRAIYIPSQGMSEMLEVHGESDDTSTVTFNQFLEMYDDSEWGFGIMSTVFKLETRDRNRHGNQVCSVCRYPIIGSRFKEVKTGFSLCNQCYSEGKIPPTFKQQEEYKFREYASEVEAMKAKCVCFSMQSHKKTIAT

SEQ ID NO: 1449 - protein, 234 aa, Arabidopsis thaliana
  Clone ID: AT_MNF13.C1.p110.tg
MSSRQSVRHPSHNHPLRGHKCEAKDEIICSGCDLDLVGAAFKCTKSSDCDYFLHKSCFELPRETNHKSHQPHTLTLIYSPKSTYTCNACGEYGSSFTYNCSICQYDVHVGCVSMPETVKREDHPHPLTLLYGSPYNQPGLVSKCDVCEDIVPDNLWSYYCKECDYATHLHSCKKEEEAKKEDQKGEGSKNSMNSELAAMLEAQREVERMQIEMHLAMQSALISKKANKAALNCI

SEQ ID NO: 1450 - protein, 652 aa, Arabidopsis thaliana
  Clone ID: AT_MMM17.C1.p20.tg
MEIDHELLIPHLMMEEPTVKEEDIIHNQTSTKEMYDAEKPRCLLSHPADSPHNLSVGCDPKLPLGCFTCGGKTTVRRQDYLHFHCTTCDVKFHEGCQTRPRRITHPYHLQHPLTLFYRNPETGIISNIIPYSSPYESDTSDPESNSSGEGKSELVDIIPSKSDIIFDKCTWCGKDFKGDVWFYRCLICGFCLDLSCALTLPPLTIANPKSHHHSLLFLPRPLLVPCDACGLVNALEPSYACFQCNYMIHQNCIDLPRVIKITRHHHRLSFTPFGPPLISLCRVCYKEVDIKYGQYSCQHEDCSYVAHSKCATHKNVWDGTELEWETEESDENEDIAPFKVVGEDLIKHFCHKHHLRLKKHDGFREAEKQCRACVFPIVSHQFYHCKICNYSLHEVCAGLPRKLDHALHKHRLVLDPSPLHDYRNMHCSTCSRAFTGFRYKCSEKICQDRTNLNIDVSCILVPEYFTHKSHEHPVVISTSYSDTDEILCNACQGTCWQPHIKCTKCDFAMCYTCATIPNEVHYKFDEHPLTLCHGESRKSKYWCEVCEKKLDTTKWFYTCNKCCTTVHRECLFGSTVYMQPGSRFNYVYGTVEVFRNSHNSRLVCRKCFHSCTDSVYFRGYKSQQTFISYKGYEQHEMAICSLTCLKLEMLFW

SEQ ID NO: 1451 - protein, 167 aa, Arabidopsis thaliana
  Clone ID: AT_F7H1.C1.p7.tg
MKYADISHFSHPQHNLKFDYTEKPFKCDGCNEVGIGSRYRCSGDNHGSCDFDLHAHCALPSASITHPFYKKCTFQFVARPPGNERRYCNACEKDVSGFLYHCKACGFDLHPCCAMLPMVLDDGETNLFLYRKVSSSCHRCGKKGRSWSYRSLFLILFLFFHYYDTKD

SEQ ID NO: 1452 - protein, 704 aa, Arabidopsis thaliana
  Clone ID: AT_F22K18.C1.p110.tg
MESTANALVVKVSYGGVLRRFRVPVKANGQLDLEMAGLKEKIAALFNLSADAELSLTYSDEDGDVVALVDDNDLFDVTNQRLKFLKINVNAGVSTNSAAPESSGSSTPAGMPNPVSKIQKGINDVLMAVPNPMRDTISKVYMDLASKASTSSPVVGEMLDCISKLGQLSIPQESSPCSPVTKPGSSGASLSRDVPSAGGKKDISERTQTGRKPVNLNEPTGAHSKTSGHVPNSSGLGANFNECPFSGSTMNYSCPNPVNLNKHPRRVCHSKKSTNGDYWTSLGVFHKGIRCDGCGVLPITGPRFKSKVKEDYDLCTICYSVMGNEGDYTRMDKPVSVQHLHPFRGPFTQFPNPWLSHPVPRATNGGAPLRCTRPKLDSRFVLDVNVIDGTVVAPSAPFTKIWKMRNSGSLVWPQGTQIVWIGGDRFCNSLSVDLQIPKEGVPIYSELDVKVDFVAPELPGRYISYWRMATSDGAKFGQRVWVLIHVDASLKNSVVNEFHGLNLNASPSLDENFPSEFLGIMNYESAQPGSSSVNPGTVKGTDLEGEVGETQAVEKENLLVGEAHPAIPHGHSPSSSSSSFNMVDFPSMPAVEVLSGGSSSTTKDVPVPLQEDIEKNDVEITMLKELEEMGFKEIDLNKEILRDNEYNLEQSVDALCGVSEWDPILEELQEMGFCDDVTNKRLLKKNNGSIKGVVMDLLTGEKEA

SEQ ID NO: 1453 - protein, 5079 aa, Arabidopsis thaliana
  Clone ID: AT_F14P3.C1.p9.tg
MADDLANLCRFLFDDTAFPSLSSSASSDLFSRRLRSDDSIKRGLRSFYLLLRWGVAPIGGDDADSSGKLRFETWSDSQLQALVSISQAILLLSRSLLGTDLTLNQGLVDQLEPIVLGVIQEVMEFSLSFLEKSSFRQNDLKMEINMEILLEIASFDGSEKQYDILPDFSPAEVAELWPAFSGEHDNMDAQSLVKCTFQGGRCSNEEKPVDRLLITLMSECIESDVQAQSVVKSPFQQDCGDLNPFTRHLAVVHLRCVCRLIMVCKELVQLPNMLDEKTVDQAVLDKLSFCLRILKLLGSLSKDVQSIENDGSLLQAVASFTDAFPKLFRVFFEFTNHTATEGNIESLSLALVEGFLNLVQLIFGKSSVFQNVQACVAASIVSNLDSSVWRYDGSSCNLTPPLAYFPRSVIYTLKLIQDLKRQPYHIHDLRVLESEVTYEDVSSTVDSVYFHLRQEKIPLLKCFTVEDIMRVIFPSSSQWMDNFFHLVYFLHREGVKLRPKVERTYSSLRSNSFAEVESQISHDDEALFGNLFSEGSRSLCSIEPNDQPPVSVSSNLLLQAAKELLNFLRACILCQEWVPSIYEDGCKKLDTGHIDILLNIVGCSIEDKASDGGCMLQDEGRPGHVAFELLLNLLRSRALSDFLESYLFQQILVVENSDFNYNDKTLALLAHTLLCRPGLAGAQLRAKIYDGFVSFVTERARGICAEALSLKELTACLPSAFHIEILLMAFHLSNEAEKAKFSNLIASCLHKVDTPAGICDGPQLSSWAMLISRLLVLLHHMLLHPNTCPTSLMLDLRSKLREVRSCGSNLHVTVGDHLSSWASLVARGITDSWAEDESVSHLMSQMIDFSPHPPTFQNDVSTAKTLNLDYGDLSASLCRVLGLWKGKKAGKVEDLLVERYIFMLSSDIARINCALDSQPSLHVNYQNVDISNSVDLISTSHLLVGDINVVGRNIELRNILIGVLNQLQAAPEQVVEDLGWDYIREGAWLSLLLYFLDGGVWDYCNKNSCSEIDPFWKECTSVDAKYVAAAEGVVSYLMKTGDIAELLRMLSSLVGKYLRVYKKAFLATFSDWNHHGHSSPSLLLLKHTQFGKSLQGEYAKIGDNSLHLQCIFYLSKLDSLGDGRGSGVLWKVFWEFMVHGFPTSLQTSSAILLSCILSIRCIVLTINGLLKLGNSKEKFGVDTSVLHQLLDSIMIIKFDQVFESFHGKCEEIHQNICAVLQLPDLTELFLMKDMEGFVRDISAEQIDRSQVLEGVITKIVDVMDSLSKDSSKSDIFKFYLGVDAVSEHTREFYELQRGDLSVFIDSLDYCSLEPVNIKVLNFLVDLLSVAQSPDLRRRVQQKFIDMDLISLSGWLERRLLGSFVEEIDGKKTAKGNSLPFREAAMNFINCLVSSTNDLQTRELQNHLFEALLISLDTAFLSFDIHMSMSYFHFVLQLAREDNLMKMVLKRTIMLMEKLAAEEKLLPGLKFIFGVIGTLLSNRSPSHGESLCGKSLASYKNTATGPLVPKLSGTTKKSDTLALPVDQEGSSISLECDVTSVDEDEDDGTSDGEVASLDKEDEEDANSERYLASKVCTFTSSGSNFMEQHWYFCYTCDLTVSKGCCSVCAKVCHRGHRVVYSRSSRFFCDCGAGGVRGSSCQCLKPRKYNGNGSAPARGTNNFQSFLPLSEDADQLGESDSDVEEDGFGEENHVVLYIPKETQYKMSLLLEELGIEDRVLELFSSLLPSITSKRDSGLSKEKQVNLGKDKVLSFDTDLLQLKKAYKSGSLDLKIKADYTNSKDLKSLLANGSLVKSLLSVSVRGRLAVGEGDKVAIFDVGQLIGQATIAPINADKANVKPLSRNIVRFEIVHLSFNPVVENYLAVAGLEDCQILTLNHRGEVIDRLAVELALQGAFIRRIDWVPGSQVQLMVVTNKFVKIYDLSQDSISPTQYFTLPNDMIVDATLFVASRGRVFLLVLSEQGNLYRFELSWGGNAGATPLKEIVQIMGKDVTGKGSSVYFSPTYRLLFISYHDGSSFMGRLSSDATSLTDTSGMFEEESDCKQRVAGLHRWKELLAGSGLFICFSSVKSNAVLAVSLRGDGVCAQNLRHPTGSSSPMVGITAYKPLSKDNVHCLVLHDDGSLQIYSHVRSGVDTDSNFTAEKVKKLGSKILNNKTYAGAKPEFPLDFFERAFCITADVRLGSDAIRNGDSEGAKQSLASEDGFIESPSPVGFKISVSNPNPDIVMVGIRMHVGTTSASSIPSEVTIFQRSIKMDEGMRCWYDIPFTVAESLLADEDVVISVGPTTSGTALPRIDSLEVYGRAKDEFGWKEKMDAVLDMEARVLGHGLLLPGSSKKRALAQSASMEEQVIADGLKLLSIYYSVCRPRQEVVLSELKCKQLLETIFESDRETLLQTTACRVLQSVFPRKEIYYQVMFLPNSVKDTMRLLGVVKVTSILSSRLGILGTGGSIVEEFNAQMRAVSKVALTRKSNFSVFLEMNGSEVVDNLMQVLWGILESEPLDTPTMNNVVMSSVELIYSYAECLASQGKDTGVHSVAPAVQLLKALMLFPNESVQTSSRCVLVLAISSRLLQVPFPKQTMLTTDDLVDNVTTPSVPIRTAGGNTHVMIEEDSITSSVQYCCDGCSTVPILRRRWHCTVCPDFDLCEACYEVLDADRLPPPHTRDHPMTAIPIEVESLGADTNEIQFSADEVGISNMLPVVTSSIPQASTPSIHVLEPGESAEFSASLTDPISISASKRAVNSLILSEFLQELSGWMETVSGVQAIPVMQLFYRLSSAIGGAFMDSSKPEEISLDKLIKWLLGEINLSKPFAASTRSSLGEIVILVFMFFTLMLRSWHQPGSDGSSSKLGGSTDVHDRRIVQSSTVVATQSSLHVQERDDFASQLVRACSCLRNQEFVNYLMNILQQLVHVFKSRAANVEARGSSSGSGCGAMLTVRRDLPAGNYSPFFSDSYAKAHRADIFVDYHRLLLENVFRLVYTLVRPEKQEKMGEKEKVYRNASSKDLKLDGFQDVLCSYINNPHTAFVRRYARRLFLHLCGSKTQYYSVRDSWQFSNEVKNLYKHVEKSGGFENNVSYERSVKIVKSLSTIAEVAVARPRNWQKYCLRHGDFLSFLLNGVFHFAEESVIQTLKLLNLAFYQGKDVSSSVQKAEATEVVTGSNRSGSQSVDSKKKKKGEDGHDSGLEKLYVDMEGVVDIFSANCGDLLRQFIDFFLLEWNSSSVRTEAKSVIYGLWHHGRHSFKESLLAALLQKVRYLPAYGQNIVEYTELVSLLLDKAPENNSKQAINELVDRCLNPDVIRCFFETLHSQNELIANHPNSRIYSTLGNLVEFDGYYLESEPCVACSSPDVPYSKMKLESLKSETKFTDNRIIVKCTGSYTIQSVTMNVHDARKSKSVKVLNLYYNNRPVSDLSELKNNWSLWKRAKSCHLSFNQTELKVEFPIPITACNFMIELDSFYENLQALSLEPLQCPRCSRPVTDKHGICSNCHENAYQCRQCRNINYENLDSFLCNECGYSKYGRFEFNFMAKPSFIFDNMENDEDMKKGLAAIESESENAHKRYQQLLGFKKPLLKIVSSIGETEMDSQHKDTVQQMMASLPGPSCKINRKIALLGVLYGEKCKAAFDSVSKSVQTLQGLRRVLMSYLHQKNSNFSSGASRCVVSKTPNNCYGCATTFVTQCLEILQVLSKHPRSRKQLVAAGILSELFENNIHQGPKTARAQARAALSTFSEGDLSAVNELNNLVQKKIMYCLEHHRSMDIALATREEMLLLSEVCSLTDEFWESRLRLVFQLLFSSIKLGAKHPAISEHIILPCLKIISVACTPPKPDTAEKEQTMGKSAPAVQEKDENAAGVIKYSSESEENNLNVSQKTRDIQLVSYLEWEKGASYLDFVRRQYKASQSIRGASQKSRTHRSDFLALKYTLRWKRRSSRTSKGGLQAFELGSWVTELILSACSQSIRSEMCTLISLLAAQSSPRRYRLINLLIGLLPATLAAGESSAEYFELLFKMIETQDALLFLTVRGCLTTICKLISQEVGNIESLERSLQIDISQGFTLHKLLELLGKFLEVPNIRSRFMRDNLLSHVLEALIVIRGLIVQKTKLINDCNRRLKDLLDGLLLESSENKRQFIRACVSGLQTHAEENKGRTCLFILEQLCNLICPSKPEAVYMLILNKSHTQEEFIRGSMTKNPYSSAEIGPLMRDVKNKICQQLDLLGLLEDDYGMELLVAGNIISLDLSIAQVYELVWKKSNQDCPPMTVTYRLQGLDGEATEPMIKELEEDREESQDPEIEFAIAGAVREYGGLEILLDMIKSLQDDFKSNQEEMVAVLDLLNHCCKIRENRRALLRLGALSLLLETARRAFSVDAMEPAEGILLIVESLTLEANESDSISAAQSALTVSNEETGTWEQAKKIVLMFLERLSHPSGLKKSNKQQRNTEMVARILPYLTYGEPAAMEALIEHFSPYLQNWSEFDQLQQRHEEDPKDDSIAQQAAKQRFTVENFVRVSESLKTSSCGERLKDIVLENGIIAVAVKHIKEIFAITGQTGFKSSKEWLLALKLPSVPLILSMLRGLSMGHLPTQTCIDEGGILTLLHALEGVSGENDIGARAENLLDTLADKEGKGDGFLGEKVRALRDATKDEMRRRALRKREELLQGLGMRQELSSDGGERIVVSQPILEGFEDVEEEEDGLACMVCREGYKLRPSDLLGVYSYSKRVNLGVGNSGSARGECVYTTVSYFNIIHFQCHQEAKRADAALKNPKKEWEGAMLRNNESLCNSLFPVKGPSVPLAQYLRYVDQYWDNLNALGRADGSRLRLLTYDIVLMLARFATGASFSADCRGGGRDSNSRFLPFMFQMARHLLDQGGPVQRTNMARSVSSYISSSSTSTATAPSSDSRPLTPGSQLSSTGTEETVQFMMVNSLLSESYESWLQHRRVFLQRGIYHTFMQHAHGRVASRAAEPTSSGGKTQDAETLTGDELLSIVKPMLVYTGMIEQLQQLFKPKKPVHIEPIKKEGTSSGVELEPWEIVMKEKLLNVKEMIGFSKELISWLDEINSATDLQEAFDIVGVLADVLSEGVTQCDQFVRSAIDKD

SEQ ID NO: 1454 - DNA, 591 bp, Arabidopsis thaliana
  Clone ID: AT_T16E15.C1.o12.tg
atggagaatgaacaatcaacgcacgttcacttcgcgagtctctcttcgtcaagcgagcgctacaatgaaacatttgaagagataaagaaagcgatgaagaaaagtgttcagcttaaagcggagctatcagcaaaggagagaaatcttgtatcagtggggtacaagaatgtgattagcgcaaggagagcttcattggaaatactatcatccattgtgcaaaaggaagagtcaaaaggaaatgaggaaaatgtcaagaagcttaagaattatcgaaacaaggttgaagatgagcttgccaaaatttgtaatgacatcctgtccgtcatcaataagcaactcattccatcgtctaccactgtggactcctctgttcttttctacaatatgctggcagacttcagttctaatgctgaaagcaaggaagctactgatcagtctcttgatgcatataagagactggtttggtaccaacagttccagctatacatgactttgaattggacttctgttttcttaaactctcctgaaagtgcataccaattggcaaagcaagcgttcgatgatgcaattaatgaatttgacagtaagtga

SEQ ID NO: 1455 - DNA, 726 bp, Arabidopsis thaliana
  Clone ID: AT_F21H2.C1.o3.tg
atggagaacgagagagcgaagcaagtgtacttggcgaaactcaacgagcaagctgagagatacgatgagatggttgaagcaatgaagaaagttgcagctcttgatgtagagctcaccattgaagagaggaatcttttatctgttggttacaaaaatgtgattggtgctaggagagcatcgtggaggatcctttcttcgatcgagcagaaagaagaatcgaaaggaaacgaacaaaatgccaagaggattaaggattacaggacaaaagttgaagaagaactctccaagatttgttacgatattttggctgtcatcgataagcatcttgtcccattcgcaacttcgggagaatccaccgtcttctactacaaaatgaaaggagattatttcagatacttggctgaatttaagtccggtgctgatcgcgaggaagctgcggacctatcactcaaggcgtatgaagctgcaacgagttctgctagcacggaattgtctacaacacatccaataagactcggcttggctctcaacttttctgtcttctactacgagatcttgaattctccggaaagagcatgtcatttggcaaagcgagcgtttgatgaagcaatcgctgagcttgacagtcttaacgaagattcatacaaggacagcacacttatcatgcaacttctcagagataacctcactttatggacctctgatctagaggaaggaggtaagtaa

SEQ ID NO: 1456 - DNA, 780 bp, Arabidopsis thaliana
  Clone ID: AT_F3F9.C1.o16.tg
atggcgtctgggcgtgaagagttcgtatacatggctaagctcgcggagcaagcggagaggtacgaagagatggtagagtttatggagaaagtctccgccgccgttgatggcgatgaactcaccgtagaagagcgaaatcttctctccgtcgcttataagaatgtgattggtgctcgccgtgcctcgtggcgtatcatttcatcgatcgagcagaaggaagagagccgtggtaacgatgaccacgtcacggcgatccgtgaatataggtctaagatcgagacggaactctccggaatctgcgacggaatccttaagttgcttgactctagactcatccctgccgctgcttctggtgattccaaggtcttttaccttaagatgaagggagattatcacaggtacttggctgagtttaagactggtcaagagaggaaagacgccgccgaacatacactcgccgcttacaaatctgctcaggatattgctaatgcagagcttgctccaacacacccaattcgtcttggtcttgcattgaacttctctgtgttctattacgagatcctcaattctcctgatcgtgcctgtaacctcgccaaacaggcctttgatgaggcgattgcagagttggacactcttggtgaagagtcatacaaagacagtaccttgatcatgcagcttcttcgtgacaatctcactctctggacatctgatatgcaggatgatgctgcggatgagatcaaggaagcagcagcgccaaaaccgaccgaggaacagcagtga

SEQ ID NO: 1457 - DNA, 1845 bp, Arabidopsis thaliana
  Clone ID: AT_MUJ8.C1.o12.tg
atggagaacgttgatgtgtctaagtacatacacagctctgtgcacaaagctgttgcttctaaagactatgttggtctcagagcaatactgtcttctcttccaaagcctaaagatccatgtgagattcaaacagaagcagcttcattatccgaggaagcaaaatccgataccatttcagctgtgattgatagaagagacgtcccaagccgcgacacgccgctacatctagcggtgaagctctgtgattcaacatcagtagaaatgctaatggttgctggagctgactggactttgcaaaacgaagacggttggaacgcgttgcaggaagctgtttgcagtagacaagaggcgatagcgatgattatagttcggcactatcagcctttagcttgggctaaatggtgtaggagactacctcgtttgatagctacaatgagtaagatgaaagatttttacttggagatgagttttcattttgagagctctgttgttccttttgtatctaaggttgcaccgtctgatacttataaggtttggaaagtgggatcgaatttgagagcggatatgactatggctggttttgatgggtttaagattcaacggtctgatcaaagtatattgtttcttggtgatgggtcagaggatggtgaagttgctcgtggatcgctttacatggtgaatcataaggataaagaagtgatgaatgcgttggatggtgcttgtggagttccatcagaagaagaagttaggaaagaagtggctgcaatgtgtaagagcaatatctttagacccgggattgatgtgacacaagcggttttatctccgcagactaattggaggaggcaggagaagagtgagatggttggtccttggaaagctaaggtctatgagatgaacaatgttgttgttagtgttaagtcaagaaaggttcctggttcattggctgtagaaggaggcgatgatgatatctgcgatgttttaacagatgaagagcaaaagcaactagaggatgctcttaagctggatttaccagacttcccaaatgtcaatggtgagaatggtttcattgttcatcatcaggaagatcatgttgaggccaacaagaaagcagagaagaaagggtggttaggaggttggagaaagaaagagactaaacaagagaagcagattcaatacgcgccaccgagaagctctctttgtgtgaatgagaaagtaagtaatctattgggagagtctaatcagataaaaccaggaagacactcagtagataatgagcattataggaaaccaaaagcattggtctctgacaagactcgccacgaaagcgaatataagaaagggctacgtcctgttctttggctatctccaaacttcccattacaaacagaggagttgcttcctttacttgacatacttgcaaacaaagttaaggcgattcgtcgtcttagagaacttcttaccacaaaacttccctctggaacatttccggtcaaggttgctattccagtggtacctacaataaaagtgcttgttacattcacaaagtttgaagaaattgagcctgtagatgagtttaagacgcctctctcgagcccgacttcttctggctatgagagtccagctgctgcaacaactgacttcaccaactcatcatcgtcctcctcgtggtttcgtcggtctagatcaaacaaagatggtgggagtatctcttctcatcttctccactcttcacttgatctcatcttaaatacgattaagtataggatcaatttccaacaaaaatctggaattcaccagagcttcatcctcatcgcgaaatcgacccgccgtaagtcttttctctaa

SEQ ID NO: 1458 - DNA, 1923 bp, Arabidopsis thaliana
  Clone ID: AT_T27C4.C1.o12.tg
atggaagattactccaagtatactcatagtcctgctcatttagctgttgtgcttcgggatcatgctgctcttaggcgaattgtttcggatcttcctcggttagctaaggctggtgaagttactactgaggctgagtctatggagtctgagtctcgtgctgattctgtttcagctgtcattgatcgccgtgatgttcctggtcgtgaaactccattgcatctcgctgttcgtcttagagatcctgtctctgctgagattttgatgtctgctggtgccgattggagtctacagaacgagaatggttggagtgcgttacaagaagcggtttgcacaagagaagaggccatcgccatgataattgctcggcattaccagcctcttgcttgggctaaatggtgtaggagacttcctcggatcattgcgtcagcatctcggatccgtgatttttacatggagatcacttttcattttgagagctcggtcattccgtttattggccgcattgctccttccgatacttacaggatatggaaacgtggttcaaatctccgtgctgatatgactcttgctggttttgatgggtttaaaatccaacggtcagatcaaacatttctctttctaggggatggttactcgtctgaagatggtaaaatgtccctatctccgggctcgttgattgttctttcgcataaggaaaaagaaatgacaaatgctttggaaggagctggtgcgcaaccaacagatgctgaggttgctcatgaagtggctttgatgtctcagactaatatgtatagacctggaatcgatgtaactcaagctgagctggtttctcatttgaattggagacggcaagagagaaccgagatggttgggaattggaaagcaaaagtttacgatatgcttcatgtgatggtgagtgtcaaatctagacgggttcccggtgcaatgactgatgaagagctctttgcggttgatgaagagcgaactgctgtaacaaatggtgcagagaccgacggctttgaagacgtactaacacctgaggaaagactccaattgaattccgcgcttcagactggaaattccgatgccattgaagatgaagagtgtgaagttactgatcaacaggaaaacggagctctcaaggataagaagggctggtttggttggaataagaaaggctcaaacactgaagatacaaagctcaagaaaggctcaaagtctgcgccagaagacgggaaccagaaagggaaaagccagaaatcttcgatggtatctgatcatgcaaatgaggatcatggagacgcaaagaaaggaaaggagaagaagaagaagaagaaaggtgttgccggagatgaggttaagcgtgagagtgaatacaagaaaggactaagaccggtcttgtggttaacaccggactttcctcttacgacagacgagcttttaccgctccttgacatattagctaacaaggttaaagccgttaggagactcagagagcttctcacaactaaacttccgctaggcacattccctgtaaagctcgccattcccattattcctacggttcgagttgttgttactttcaccaaatttgaagaacttcaggcagctgaggaggagttctcaacacctccttctagtccggtatttcatgatgcaaagtcgtcttcttcagagaactcatcaccatcatggatctcatggatgagaagtggcaaatcaagtgacaatgatagtaaccgttacaaagacgaggctgaccctttcttgataccttcagattacaaatggatcgattcagctgagaagaaacgtcgaatgaaagctaagaaagctaagagcaggaggaagaaacaagcggctacaaaagccgctggtgctagtgactcgggtacccgttcaaatcatgtagccgaagaatga

SEQ ID NO: 1459 - DNA, 3612 bp, Arabidopsis thaliana
  Clone ID: AT_F25I24.C1.o200.tg
atgccgcatgttaccagtggaggtaataatctaaacttgcaagatctttctcaagatcagatacaacatcttatttcacaattcaatgctcaagttcgggttcaagagcctgcagctacttctatttatacctctagtcctactgctactattactgaacatggcttgatggcacaaacatctacttctggtacaattccttttccttctactagcttgaaatatgaaaataataatctcacctttcagaatcatactctttcttccttacaaaatgttttatcaagtgatgcttggattattgatagtggtgcttctagtcatgtctgttcggatttaacaatgtttagggaattaatacatgtgtctggtgtaactgttacattaccaaatggtactagggttgcaattacacacacaggaaccatttgcatcacgtctactctcattctgcataatgttttacttgttcctgatttcaaatttaacttgattagtgtctgttgtcttgttaaaaccttgtcttactcggctcatttctttgctgattgttgttatatccaggaacttactcggggcttgatgattgggaggggtaaaacctacaataatctctatattcttgagacacaacgtacatccttctcaccatcactacctgcagctagttcattcactggaaccgttcaagatgattgtcttctgtggcaccagcgtctaggcatccgtcattacctgcattacagaaacttatacttcttaactttggttgatgattgtacaagaaccacttgggtttatatgatgaaaaataaaagtgaagtttccaatatatttcctgtctttgttaagctcattttcactcaatataatgccaaaattaaagcaattaggtctgataatgtaaaagaactagctttcaccaaatttgttaaagaacaaggaatgatacatcaattttcttgtgcttacactcctcaacagaattctgttgttgagcgatatccttcaggatacaaaggttataaggttttagatttagagtctcattccatttccattactcgtaatgtggtttttcatgaaacaaagtttccatttaaaacaagtaaatttttaaaagaatctgttgacatgtttcctaattccattttaccattgcctgcaccattgcattttgtagaaagcatgcctcttgatgatgatttacgtgctgatgataacaatgcttctacatctaattctgcatcatctgcatcatctattccacctttacctagtactgtgaatactcagaacacagatgcattagatatagatactaattctgtacctattgctagaccgaaaagaaatgctaaagcacctgcttatttgtctgagtatcactgtaattcggttccttttctttcttcactttcacctactacttctacttccattgaaacaccatcatcatctattccacctaaaaagatcactactccatatcctatgtccacagccatttcctatgataaacttactccactttttcattcttatatatgtgcttataatgttgaaactgagccaaaggcttttactcaagccatgaaatctgaaaagtggactagagcggctaatgaagagcttcatgctcttgagcagaataagacttggattgtggaatctttgactgagggtaaaaatgttgtaggttgcaagtgggttttcacaataaagtataaccccgatggaagtattgaacgatataaagcacggttggttgctcaaggctttactcagcaggagggaattgattatatggagactttttcacctgtggcaaagtttggcagtgtgaaattgttacttggacttgctgctgcaactggttggagcttaacgcagatggatgtttctaatgccttcttacatggagagcttgatgaggaaatctacatgagtctgccacaaggttatactccaccaactggtataagtttgccttctaaaccggtatgtcgactcttgaaatctctttatggcttaaaacaagcatctagacagtggtataagagattatcttcagtcttcttgggagcaaactttattcagtcacctgcagataacactatgtttgtgaaagtcagttgtacttcaatcattgtggtgttagtctatgttgatgacttgatgattgcaagtaatgatagctcagcagtggagaatttgaaagaattattgagatctgagttcaaaataaaggatttaggaccagctagattttttctaggattggagattgctagatcttctgagggaatttctgtctgtcaacgcaaatatgctcaaaatttgcttgaagatgtagggctttctggttgtaaaccaagctcaatccccatggatcctaacctgcacctgactaaagagatgggaaccttactgccaaatgcgacttcctatagagagcttgttggacgattgttatacttgtgcattactcgtcctgatataacttttgcagtacatactttgagtcagtttctctctgcaccaactgacattcatatgcaagctgctcacaaggttctgcgatatctcaaaggtaatcctggtcagggtttgatgtattctgcttcttctgagttgtgtttaaatggtttctcagatgctgattggggtacttgcaaagattcaaggagatctgttactggtttttgcatttatcttggtacatctttgattacatggaagagtaagaagcaatctgtggttagtcggagtagtacagaatctgaatatagaagcttagcacaagccacttgtgagattatctggttgcaacagctgctcaaagacttgcatgtgactatgacttgtccggctaaactcttttgcgacaacaaatctgcactacacttggcgacgaatccagtctttcatgagcgtaccaagcatattgaaatcgactgtcacactgtaagagaccaaatcaaggctggaaaactgaagactctacatgttccaacaggaaaccagcttgcagacattctaaccaagccacttcacccagttcaatctccgatcttctctcttcttttccgtttcaccggaacttcgccggtgttaatagtggaggcagcagaagcttggatgcctagtgtagctatgtcgattgttgtggatattagtagagtatcagattcggtagctcaaaatgcaaatttgagtcggagttggctaaacgtgttaggtttcagcccactgcatttagccttacaaaacaaccacattcgaacggtgagagggttagtggcaatcaacagcagcttagttagcatcaagggaagaggaatgattactcctttgcatcatgtggctcgaataggagatgcggaattgttgagtgagttcttgtttgcttgtccttcttctataaacgatttgacgaaagtgtttgattcaataaacatatcttggttgctcaatgatgtctttccgaggagtcaagaagtagagcgcaaatttcgattggaaattgtttcgctgagtttgttttatgaagtaatgcttcctcttcacgcaccagaagagcgtgaagaggaagcaaccaaccacaagtag

SEQ ID NO: 1460 - DNA, 1818 bp, Arabidopsis thaliana
  Clone ID: AT_F8K4.C1.o28.tg
atctccgccgtgcttgaccgtcgcgacgttccttcacgcgaaacgcctcttcatctggcggttagactcgacgatttgttcgcggcgagggcgatttcgtcggccggtggtgatatttcgttacagaatgcttctggatggaatccgttacaagaggcgttttgtcgccggaattctgaggttatgaaagtgcttttacggcatcaccaccgtttagcttggtgtaaatggcggcggagattacctcgtttgatagctgttctccgtcgtatgagagatttttacatggagatctcttttcatttcgagagctctgtgattccgttcgtcggaaaaatcgctccctctgatacttacaagatctggaaacgcgacggtaacctccgtgctgatactacattagccggatttgatggtttaaaaattcaaagagcggatcaaagctttttattcctcggtgatggtgatgaatctctagatatttctcctggatctttgcttgtactgaatcgagacgatcggaaaattctcgacgcttttgaaagtgccggagctccgattagtgactccgacatcgccggattctgttctcagtcaagcttatatcgtccgggaatggatgttactaaagcagagctcgtcggacgaacgaattggcggcggcaagagaagatggagaacgtcggagaatggaaagctagggtttacgaaatccagaaagtgacatttagtttcagatctcggaaaattgttaccggagatggaagcgaacaagttttaccgttggagttagacgaagacgatgaaggattcttagtagctgagaatccgagtttcttagctcctccgccacggtcacagagacgacacagtagctttgttaaagaagatagagattggatctccgttgggagaaaaagcgtcgacgtttatccctccgccgcaccaccgccgccgcggcaatctcaatcaccgcgaagatcagtgtctcaatttcaaccaccgagaaggtcaatggctcaggtccagccaccgagaagatcagtagctcaagcccagccaccgagaagatcagtggctctaccttcaacggtgtctccggtgaatcctccaccgtctcctcagatcaaagagaaggaatttgtgaaaagcttgcatccgtcagtgtggttaacggaacaatttccgttaaaaacggaggagctgcttccgttacttgacattttagctaataaagtcaaagccgtcgccagaatgcgtgatcttctcaccactaagttcccgccgggaacttttccagtcaagctgtctattccggtggtccctacggtcaaagtagtcatcacattcaccaagtttgtcgagcttccgccggcggagacattctacacgccgctctcaagcccaagattcctctactccgccaccgcgggtgaagaagaccattccgatggcgagaaacccgatgctcgaaattcgatttcacggccatcgacgtggctgagactagccaccggaaaaggctcacatcgacgggtagaagaggaggagcaacaaacgccggacccattcgctataccaattgggtataaatggacaagcatgagtagtagtaatagtaagtcagcaccgagttgggcagatcaatggggaaccggagggatcggggagatgccggaggaagacaacaccaaaagcaagaaagatgccggcggtaagaactctggccaaaccaaatcagccaagattgttgatttcgtaagttttaagtggatgaagaatcttgtccataagaagaagaaagactctgattcttga

SEQ ID NO: 1461 - DNA, 1878 bp, Arabidopsis thaliana
  Clone ID: AT_T1E3.C1.o50.tg
atgagttctaatcaattaggcgaagctttggaggaaacatctgagaggatccctttcaaattcgctaaaacaaagttttttcatggtgtcctacaagtcagttccgaagagagttcctcacctataaaagaagttccagaagaagaagctccatgtgatcaattcaatcttcagattcggacggcatctcagcttcacgggagggttacgaacgaatactatgagtatatacagttaaatcaaggaataagccaaggtcgtgtagaagccgtgaaggacttcttgaaccgccgcccggacgcagtggataaatatataaacccttacgagacgccattgttaaaggcttgcgcatatggaaaccccgagattgttaaattgcttctgcgtcgtatgacaccggaacaaatgcttcccaagatgagccaaaacaatttttacaacacgcctcttaccgtcgttgctgttagtggaaacatggagattgctgaagccttagtcgccaagaaccctaaactgctagagattcctggaaacaatggagagattccggttgtggttgcggttgagaacacgcagatggagatggctcgctatctttacaacagaactccggttcaggtgttacttgaaaaagacgggtttcacggtatcttgctttttctcaatgccatatattataaaaagctggacatggccttggatctgttcaacaaaagcagacgcttagccgtcacaaaacacttgagaattgagtcggttcctatcattgtcttggcttcaaagccagatcttttccccgataccctgatggggaaagtgctcaaatgtctctccaaatgtatcgggatagatgaagtgtaccgacttaaggtcatgcatctacaagccaagaaacttctaaagggaatatcagaagaaacattggccttgggcttgaaggaacgttctgagtcagtagatgaggctttactcttcgcagtaagatatgggaatgtggatttcttggtggagatgatcaagaacaactccgagcttctatggtccacgggaactagtactctgtttaacactgccgtccaggtcagacaagagaaggtgtttagtctcctctacggtctgggcgacaggaagtacttgtttctcgccgacaaggacagtgacggaaatagtgtgcttcatcttgctggctatcctcctcctaattacaagctcgctacggtcgttagcgcaacgttgcagatgcaacgcgagttacaatggtttaaggagatggagagaatcgtgccggcgatcgaaaatgagagagtaaacacagaaaatctgacaccgatcgagatattcagaaaggagcacgaagcaatgcgactagaagccgagaagtggatgaaagatactgcgatgtcttgcagcttagtagcggctctcatcgtcacggtcaccttcgcggcaatcttcaccgtccccggcggcacggacgacaactcaggcggtagaccctttcaccgacatgaacgaatattcgtcatattcatcgtctccgatctgatctcctgcttcgccgcctgcacttccgtcctcatattcctcgggatactcaccgcgagatacgctttcgacgatttcttgttctcgctgcctgcgaatatgatcgctggactttcgacattgtttgtctcgatagcggcgatgcttgtggcattctcgtcggccttattcacgatctttaacgacccttggatcgttgctccgacgatcttcttcgcttgtttcccggcgctgttatttgttatgattcagtatcctctccttaaggagctgatcttctccacttacggcaaacgaatcttcgaccgaaacatgaaatctttgttttaa

SEQ ID NO: 1462 - DNA, 1152 bp, Arabidopsis thaliana
  Clone ID: AT_F14M4.C1.o9.tg
atgtctttgtaccttttttacaggttactttgttctgttgaaggaaaatacttgattcaggaaacaacacacgattcgacgaccagggaggatgacgatttcaaggacaacagtgagattgttgagtgtgtaaacttctcttgtgatatgcctatattgagtggtcgaggattcatggagattgaagaccaaggactcagtagcagcttcttccctttcttagtggttgaagatgacgatgtttgttctgaaatccgtatacttgaaaccacattagagttcactggaactgattctgctaagcaagctatggatttcatacatgaaatcggttggcttcttcacagaagtaaacttggggaatcagacccaaatccaggcgttttcccattaatacgcttccagtggctaatcgagttctcaatggatcgagagtggtgcgctgtgatcagaaagctattaaacatgttctttgatggagctgttggtgaattttcttcctcctctaatgccacactgtcagaactgtgccttcttcacagagccgtgaggaaaaactctaagcctatggttgaaatgctcttgagatatattcccaagcaacaaagaaacagcttgtttagacccgatgctgctggtccagccggcttaacacctcttcatattgcagctggtaaagacggttcagaagatgtgttggatgcgctaacagaagatcctgcaatggtggggattgaagcgtggaagacatgtcgagacagcacaggcttcacaccagaagactacgcacgcttacgcggtcacttctcatacatccacttgattcaacgcaagatcaataaaaagtcaacaactgaagatcatgttgtggtcaacatcccagtttctttctcagacagagagcagaaagaaccaaaatcaggtccgatggcttcagccttggagatcacacagattccatgcaagctctgtgaccataaactggtgtatgggacaacacgcaggtctgtagcgtacagaccagctatgttgtcaatggtggcgattgctgcggtttgcgtctgtgtggcacttctgtttaagagttgcccggaagtgctctatgtgtttcaaccgttcaggtgggagttattggactatggaacaagctga

SEQ ID NO: 1463 - DNA, 1731 bp, Arabidopsis thaliana
  Clone ID: AT_F22M8.C1.o5.tg
atggcgaccaccggcgcggcggccaccaccgagattggtaatccagaatataaacagcctcgatcgatatttgacttgacggcggatttctttgactcgtgtcggttgtcgaatccttcggagactcaatcggcattcggaccacccaaaactttcgatccagaggaggcggaggaggataagagttccaaggacggcgtgattttggacagatggacctgtaatacttgtaaaattgagttcctgtctcttcaagatcaacgctaccacttcaagtccgatattcatcgccttaacatcaagctgagtgttgctggcaaggctatattaaaagaggaagatgttgatgagttgacatctgagtcggtccaagactatgacgtgtctagcatatcaggttcagaggacgaagctgagactagaccaccctctttccactttgatgctcaaaagggtattgataaaaagaaactatttttccgtcttcaaagtggtgacaaagtttctatctggaaatgcttaatcatggacgacgctgaaagtgtttcgttcgagaatgacagaggagtttctgttgactgttgtggtagcttggtcgagaatgaagttactgagaggttgagaaatttgattcgagagaataaggatgataggcaaatgcgtgtcgtgttgcttgcaagtggtggccactttgccggtactgtctttaatggaaagtcggttgtggctcataagacattccacagagccaaggctggtaaaaagcagtccacaaaagatgcaagcgggagaagtatacactctgccggagcctcacttcgtcgttacaatgaacttgctttaaaaaaggatattcaagagctacttgctagctggaaaccttattttgatggtgctgcttgtgtttttgtccatgctccctcaagcagtaggcaattacttttcaatggaggcaaaccgtactttagcagccaaaactgcgctgtacgaaacgttccatttacgatccgtcggccaaccttcaaggaatcacagcgtatatataatcagttgactcagattgcacatgtaactgaggagatttttgttaatcgaccagaagtcaccaaagctaatacagtggtgcagacccacaatgaggattctggcaaaacctcaagaaaggaagagcccgatgaaacttcttctagcaacataatcttagaggaaccaaatcgtatagaagaggatatcgaggatggagttactggtacgtcaactgccttacatgaagctgccaaatcgggtgattgtgaaagagttatggagttcttggaggagggtatggatccttgtgctaaggatgaaagaggcagaacgccatacatgcttgcaaatgagaaggaagtgagaaacactttcagacggtttatggcgttaaaccttgaaaaatggaattggcatgatgctaaagtacccagcccgctcacaaaagagatggaggaatctcaagctgccaagcaggcagaaaaagacgccaagcagaaagcaagaacaaaggagttgaagaaactacgcaaagcccgagaaaagaaggctcaggccgaagctgcgcaggcggagaaggagaagccaatttctaaagtggaggaagtgaggagagcaatggcagcacagagggaaaagagagcagccgctgcagaaagacggatggcatcacttaacattcaaagcagttcaagcacaagttaa

SEQ ID NO: 1464 - DNA, 2010 bp, Arabidopsis thaliana
  Clone ID: AT_MUK11.C1.o2.tg
atggcaatgagttctaattacttagacgcaactttgaaggaaacatttcggaggagccctttcaaattcgctaatacaaaggttcctcatgctggtctaggcgacagtgtctctcctataaaagaagttcctgaagaagaagaagttccaaatgaccccgtcaatatccagattccattcatcgaatcagctctttccacatctcggcttcgcggaaagaatacgaacgtatattatgagtatatacaattaagtcaaggaataagccaaggtcgtgtagaaatcgtgaaggacttcttgaatcatcatccggactcagtggacgaatggataaacctttacgagacgccattgttaaaggcttgtgcgtgtgggaaacccgagattgttaaagagcttctacgtcgtatgacacctgaacaaatgcttcccaagatgagccaaaacgcttcataccacacgcctctcactgttgttgcggttagtggaaacatggagattgctgaagccttagtcgccaagaaccctaagctgctagagattcctggaatcaatggacaaattccggttgtggttgcggttgagaatacacagatggagatggctcgctatctttacaccagaactccggttcaagtgttacttgaccaagatgggtatcacggttctttgctctttctcaatgccatcttctataaaatgcttgacatcgcgttggatctgttcaacatgagcagacgcttagccgtcacaaaacactcgcaaatcgagtcgatacccatcattgtcttggcttcaaagccagatctttttcctggtggctgctatcttggaccattgacacgtttcatctactcttggatacaagtaaagctgccaactcttccacagccttctcgttcaaacagagatcagcagaatactctgatgaggaaactgctcaaaggcctctccaaatggactggaatagatgaagtgtaccgacttaaggtcatgcatctacaagccaagaagcttctactgggaatatcagaagaaacattggccttgggcttgaaggaacgttccgagacagtggatgaggctttactctttgcagtgagatatgggaatgtggatttcttggtggaaatgatcagaaacaactccgagcttctatggtccacgagaacaagctcgagcagtactctgtttctcttggccgtcgagttcagacaagagaaggtgtttagtctcctatacggtctggacgacagaaagtacttgttgctcgcagacaaggactgtgatggaaatggtgtgcttcatctcgctggctttccgtctcctccttccaagctctctagtgtcgttggcgcacctttgcagttgcaacgcgagttacaatggttcaaggaagtggagagaatcgcaccggagatcgagaaggagagagtaaacacagaagagcaaacaccgatcgagatattcacaaaggagcaccaaggactgcgacaagaagcagagaaatggatgaaagacacggctatgtcatgcagcttagtcgcggcactcatcgtcacggtcacctttgcggcggtcttcactgtccctggtggcacagacgacaattcaaaaggtaaaccctttcacctacgtgatcggcgattcatcatattcatcgtctcagatttgatctcctgcttcgcctcttgcacctccgtcctcatcttcctcgggatactaaccgcaagatactccttcgacgatttcttggtctttctgccgacaaagatgattgccggactttcgatactgttcgtttcaatagcggcgatgcttatagcattctcgtcggcgctattcacgatgatgggtaaagaagggaaatggattgttgctccgacgatcctttttgcttgtttaccggcgctgttgtttgttctgcttcagtatcctctcctcaaggaaatgatcttctccacttatggaaaagggatctttgacagaaacatgaaatgttgggcctaa

SEQ ID NO: 1465 - DNA, 4731 bp, Arabidopsis thaliana
  Clone ID: AT_F12K11.C1.o27.tg
atggcgaagaagaagaaggatacgaagcatactcgtctctgcgaagccactggggcttgggccaccaaggtccttgaggattttcgcgcctccgggaacgattcttacgtctttgagcagcaacttacaaatagcgaacgtggcattattcatcagatgtgccgaactatgggtctccgatcaaaaagtaacgggagtggggaagaaaggcgtctttctcttttcaaaggagatggcatttcaaagtcagacaagaggcgtatgtatgaagccagaaatcagaaagaaaaagaaggagatgggatttcaaagtcatacagcaagcatcgctatgaaaccagatttcagaaagcaggcggtataagaaagacgagaatatctccaaagaagctcaaatgtgtgtcatttccaccagaggctaaagctgttctgcacgacttatttactcgctatccaccttgtgacggcgatactacagggacatcactgggtatatatactacgggaaacgtcaacagtaattggaaagatgatttcttcaagaaacctcatatgacaaaacacgatattgaaaataacgtggtatctctgagttctagactgaaaaaagaaagacattttcgagagatctttgaagcacgatcaaagcttcccatcgcatcttttcgcgatgccattatatctgcagtggaatccaatcaggttgttcttattgctggtgaaactggttgtgggaaaactactcaggtgcctcaatatcttctagatcatatgtggcatagtaagaaagaagcatgcaaaatcatttgcacccaaccacgtcgtatctcagctatttcagtttctgatcgaatatcttgggaaagaggtgaaactattgggagaactgtcggctacaaggttcggctgcaaagtgaaggtggaagagagtcatcagttgttttctgcacgaatggcattctattgagggtgcttataggcaaaggcgttaacagctctgttcctgatataactcacattattgtggacgaaatccatgaaagggactcctactctgatttcatgttaatgattttaagggacttgcttccgtctaatcctcatctccgactgattctgatgagtgctactcttgatgctgagaggttttctgaatattttggaggttgtccagttgtccgagtacctggattcacttatccagtgagaaccttttttctggatgatgcgctctctgtcctgaattcagacaagaatagtcatctactttctgctgtcaaacgtgattttaaagatgaagataaagtttctttggatgaagcaatcgacttggcatggacaaatgatgagtttgattgtctcgtagatctagtttcatctgaaggaagtcatgaggcttacaattaccagaactcaacgacaggcctaacaccacttatggtctttgctggaaagggcagggttagcgatgtctgtaagctcctttcagtcggcgctgactgtacactgaagtccaaagaaggtataacagcattagaattagctgaaaaggagaatcaatttgaaactgctcaaataatcagggaacatgcgggtaacatccagtccaattctcagcaagcacaagacttacttgataagtatatggcgacaatcaaaccagaagaagtagatgtgggtcttatagtgaagttaatgaagaaaatatgcagcgattcaaaagatggtgccattcttgtttttctacctgggtgggaggaaataagcaaaacaaaagagaaattgcttgatgatcggttttttgcacatagtgctaaattcatcattctatgtcttcactcaagggttccagctgaggaacagaagaaagtttttaatcgcccccctcgtggttgtcgcaaaattgtacttgcaacaaatattgctgaatcagcagttaccatcgatgatgtggtttatgtgatagatagtggtcggatgaaggaaaagagttatgatccctataatgacgtgtcaacgctccaatcttcttgggtatcaaaagcaaatgcaaaacagagggcaggccgagcaggccgttgccaagctggcatctgttatcatctatattctaaactccgggcagcgtctttgcccgaatatagagttcctgaagttatgagaatgccagtggatgaactctgcttgcaggttaagatgctggatccgaattgcaacgtaaatgatttccttcagaaattgatggacccgcctgttgctcaaagtattgaaaatgcattaatcatccttaaagatattggagctttgactcctgaagaagagctgactgaacttggacagaaatttggtcagcttccagttcatcctcggattagcaagatgatttatttcgccatattagtgaactgtttggatccagcacttattctggcatgtgcagctgacgagaaggatccgtttaccatgcccttgtcgccaggtgatagaaaaaaggctgctgccgcaaaacatgaacttgcatcgctttatggagaccacagtgatcatcttgccactgtcgcggcttttcagtgctggaaaaatgcaaaagcaagtggtcaagctaaggagttttgttctaagtacttcatctcccaagttgtcatgaagaggctggatgatctgtgtcgcaagcttcagggagaacttaatagacatggggtcatacctagcagcagctcaaactgtagcctgaatgctcatgatccgggtattctccgtgctgttatagcagttggattgtaccctatgttgggaaggatgtgcccactttccaagaatcggacaaggtctgtaatagagactattgctggagccaaagtccgtgtgccctcgctatcaaacaatgttgacatgtcctctaccaagtttgacgaagctttaattgtttttgatgagatcactcgaggagattggggtgtggtgataaggagctgcactgttcttcccactatacctgtgttactgttttcaagagagatagccgtttctactacagagagctatgatgctgttaagagtgatgacgaggaagaccacaaagtaggaaatgtaggagacgcgatggacatagataaagaagttggtaggcctggagagaaaataatgcttgggccggaaaattcagtaaaagtagtagtggatcggtggctgcctttcaaggttacagcttttgaaattgctcaaatgtacatcttgagagagagactaatggcgtccattttgttcaaggttaaacatccaaaggaaaatttgccgcctcatctcggtgcttctatgtatgcaatagcttctgttctctcatatgatagcctcgcacaatcttcagttcaaactgtagctgtgcaacctattacttcagtggtagatgcaacgagtcccagagatgacataccttccactaaccccaatgagcttcgggagcatgacccgaacactactccaatggggtcaaagctcgaattagccaacaagttgggtttgggtaatatggaagagagcttgccttcaaatttcgctgatgggaatgagcaacctgacccaaacacttctccagtggaagatgtttcggcggctacaaaacaaaagaagatgcagtcagagtccaaaaggtgcaagtcgctcaacaacgtggatttggggaacattgaagagaatttcgggaacatggaagagaacccaccttctgatctggctattgggaatgagcaaacattgccgaagttagctagcaacttggacatggggaacatggaagagaacacgccttctgatctggccaatgggaatgagaaaacagagcctaactcagccaacagcatggatttagggaacatggaagagaacacgccttctgatttggcaaatgggaataagaaaaaagagcctaagtcagtcagcaagttggatctgggtagcgagaaagtgagcattccttctaatctcgtcaatggaaatgagcaacatgacctaaacattgctccaggtgaagatgcttcagcggctaagcaaccagaaaagaagcgatccaggtctaaaaagcgcaaatcaggcaacaacctggatttggggaagatggaaaagagcaagccttccgatctggcaaatgagaatgagcaaacagagcccaagtcagccaacaacttggatttagggaatatgaaagagaacacgccttcggatctggctaatgagaatgagcaaacagagcttaggctacctaacaactcggattatggtaacatggaagagagcttgcctttgaatcttgctaatggggatgaacaacctgacccaaccactgctccaatggaagctgctaagcaaccaaaaaagaagcgatcaaggtccaaaaagtgcaaatcagtcaacaacctggacttggggaacatggaagaaaacaagccttctgatctggcaaacggaaatgagcaaaaagatcctgagtcagtcaacaggttggatccgggtaaggagaaagagagcattccttcgaatcttgtcagtgggaatgagcaacctgactcaaacactgctccagctaagaaaccaaaaaagaaaaagcgcaaattagctaacaactttgattcggttaacaatatggaagagaaaatgccttccactaatgtattgagccagggaaacaagtcaggtttgattgaggaaaaaccgagcataccttccgatcaatga

SEQ ID NO: 1466 - DNA, 2118 bp, Arabidopsis thaliana
  Clone ID: AT_T1E3.C1.o40.tg
atggcaattagttctaattacttacacgcaactttgatggcaacacttcggaggagtcctttcaaattcgctaatacaaaggttcctcatgctgacctaggcgacagtgtctctcctacaaaaaagaatcctgaagaagaagttccaagtgatcccgtcaatatccagcttcgcggaaagaatacgaacgtatattatgagtatatacaattaagtcaaggaataagccaaggtcgtgtagaagtcgtgaaggacttcttgaacgatcatccggacgcagtggacgaatggataaacctttacgagacgccattgttaaaggcttgtgcttgtgggaaacccgagattgttaaagagcttctgtggcgtatgacacctgaacaaatgcttcccaagatgagccaaaacgtttcgtaccacacggctcttactgtcgtagcggttagtggaaatatggagattgctgaagccttagtcgccaagaaccctaagctgctagagattcctggaatcaatggacagattccggttgtggttgcggttgagaacacgcagatggaaatggctcgctatctttacaccagaactccggttcaggtcttacttgctgaagacggatatcatggtactttgctctttctgaatgccatcttctatagaatgctcggtaagggatttcttggaattcaagcaacccatatctttggcggttttgatctttatctgtttttctttatacaattagacatcgcattggatctgttcaacatgagcagacgcttagccgtcacaaaacacttgcaaatcgagtcgattcccatcattgtcttggcttcaaagccagatctttttcctgggatacaagtaaagctgccaactctcccaaaaccttcacatgcaaacaaagatcataagagtaagttcttccgtatacataaagtttataaaaagtctatatatattcctctgaagaaagtgagaaaaagtttcgatttgttcccagatactctgatgaggaaactgctcaaaggtctctccaaatggaccggaatagatgaagtgtaccgacttaaggtcatgcatctacaagccaagaagcttctactgggaatatcagaagaaacattgaccttgggcttgaaggaacgttccgagacagtggatgaagctttactctttgcagtgagatatgggaatgtggatttcttggtggaaatgatcagaaacaactccgagcttctatggtccacgagaacaagctcgagcagtactctgtttctcttggccgtcgagttcagacaagagaaggtgtttaatctcctctacggtctggacgacaggaagtacttgttgctcgcagacaaggacagcgacggcaatggtgtgcttcatctcgccggatttccttctcctccttccaagctcgctagtgtcatttgcgcacctttgcggatgcaacgcgagttacaatggttcaaggaagtggagagaattgcaccagagatcgagaaggagagagtaaacacagaagagcaaacaccgatcgagatatttgcaaaggagcaccaaggactgcgacaagaagccgagaaatggatgaaagacacagccatgtcatgcagcttagtcgcggctctcatcgtcatggtcactttcgcggctctcatcatcacggtcattttcgcggcggtctttaccgtatctggtggctccgacgacaattcagaaggtaacccctttcacttatatgaacagaggttcatcatattcatcgtctccgatttgatttcttgcttcgccgcttgcaccgccgtacccatattcctcgggatactcaccgcgagatactcctttgacgattttttggtcgcgctgccgacaaagatgatcacgggactttcgatactattcgtttccatcgcggcgatgcttattgcattctcattggtgcttataacaatgatgaataaagggaaatggattgttgctccgacgatcctttgcgcttgtttaccggcgctgttgttcgttctgcttcagtatcctctcctcaaggaaatgatcttctccacttacggcaaaggaatcttcgacagaaatatgacatgttgggcttaa

SEQ ID NO: 1467 - DNA, 1854 bp, Arabidopsis thaliana
  Clone ID: AT_F9H3.C1.o11.tg
atggttcgttcacatcttctccgtgccacgccagaagcttctccgcttaaaccggcatcgtctccgtcaaactgcaggttgtcactttctcccgttgaacttagattatattttattagggacgacgacttcaaagtcaaagtcgacattttcaaaacgtcatatcaaaactccctgtttgaattgccgtgttgtgacaagtcagagttccttaccagtctcagattttcggatcttttcaacctccctggtgaatatgtgccgatgaatcctgagatctttagcgcaatgagagcggggaacatagagcttctggaaaagttgaaaagctacgaaacgccaatggcatgtcttaagagcgatggcggagattctgttcttcaccttgctgctgcttcgggtcatcttgaactagtgaagaacataatcactgaatgtccttgtcttttattggagccaaactcgaagtatcagattccgcttcatgtggccgctcgtgctggccgttcagcagttgtgaaggctcttgttgcttctgtattatatttttcacctagagtgcctgaagaagatagggatagactgaatatatatgttctgaaggacatagatggagatactcctctgcatgcggccttgaaagacctccatgaaaaagcagaggagcgcatcagaaaactatccttgtctcaccttattatgcattggcgacgtagcagatgcatttcattttctgatgcatcaacacgccaaatggagacagctgcctgtctagtgaatgcagaccaacatgcctcatttcttgcgaataaagatggaacatctcccttgtatttggcagttgaagctggtaatgtatcacttgtgagagcgatgttgaaccgtcctggtaataaaatccaaggaaaaacctctaccttagcttcacaattggaagggagaaaatcgcttttacacgcagccctcaaggccaaaaatacagatgttcttaatgttattcttaatgatgacccgagccttgtcaacgagcgagatgaagaagggcgaacttgtctttctgttggagcatccatggggtattacaaaggaatatgtaagctattagatcgatcaacaaagagtgtttatgaatgcgacaaagatggttcctttccaattcatatggctgtagagaaaggtcatttgaaagttgtgaaagagattctaaaacgttgtccagattcgaaagagctggttaacaaacaaggtcaaaacatgcttcacattgcagcaaagagtgcgaaagtgggatcttttcttttgggttatataaggagacttgatacggagaatcatctgatcgaggagcaagatgtggatgggaatgcacctttgcacctagccaccataaattggcgctgtcgaactgttgataaacttgctgcctttgcttctaccgaaacaaaaatcctgaatatacagaacaaagatggattgagacctctggatattgcagagttaaatctacagcctgactacgttttacgggagagattgacgttgatggtactgctgtgcgtttacgcaccgaaaagtgttggttggctaccgacgagtggaatgacactaagaagcagatcagagcctctagacgctaaaaaatacaaagaccatatcaacgctcttctgctggtggcaactcttgtagccactgttacatttgctgcaggttttacaatacctggtggctttaacagctctgctccaaacatgggtatggccactttggccgatgactccaccctcttcttttttctggtattagacaccttggcgatgcaaagctctattgtagcaatagttgctctgatttag

SEQ ID NO: 1468 - DNA, 1599 bp, Arabidopsis thaliana
  Clone ID: AT_T8O11.C1.o15.tg
atggagatgaagcagatgaagtttcttactcaccaagctttcttttcctctgttcgatcaggagatcttagtcaacttcaacagttagttgacaatttaaccggagatgagctaatcgatgagtcatcgccgtgttctgctgtggctgagcttatgtctgtgcaaaacgacgccggagagaccgccgtctatatctccgccgcagagaatcttgaagacatttttcgttacttgattaggttttctagtttggaaacagttaagatcagatccaaatccgacatgaacgcttttcatgtcgctgccaagcgaggtcacttgggaattgtgaaggagttactgagactatggccagagctttgcagaatctgcgacgcttccaacacgagtccgctttacgcagctgcggttcaagatcacttagaaatagtaaatgcaatgcttgatgttgatcctagctgtgcaatgattgtgagaaagaacgggaaaacatctttgcacactgcgggaaggtacgggcttcttcggatagtgaaagctctcatagagaaagacgcagcgattgttggtgttaaagataagaaaggtcagactgctcttcacatggctgttaaaggacgaagtttggaagtagtcgaagagattttgcaggctgattacacaatattgaatgagagagatcgaaaagggaacactgctttgcatattgctactcgaaaggcgcggccacagataacgagcttattgctgacctttacggcgattgaagtgaatgcgattaacaaccagaaagaaactgctatggatttggcggataagctgcaatatagcgaatctgctttggagatcaatgaggctttggtagaagctggggctaagcatgggaggttcattggtcgagaagatgaggcgagagcattgaagcgagcagtgagtgatatcaaacacgaggtgcaatcgcagcttttgcagaatgagaaaaccaaccgtcgtgtctctgggatcgcgaaagagctgaggaaactccacagagaagcggttcagaacacgactaactccataacggtagtggcggttctgtttgcttccatagcgttcttggccatattcaacttgccgggtcagtatttcacggaggggtcgcatgtgggacaagccaatattgcagggagaaccggattccgcgtgttctgtcttttaaacgcgacatctctgtttatatcgttagcggttgtggtagttcaaataactttggtggcgtgggacacacgggcgcagaagaaagttgtgtctgtagtgaataagctaatgtgggcagcttgtgcttgcacattcggagcatttttggcgattgcatttgcggttgttggaaaggggaactcgtggatggcgattaccataacgttgcttggagcaccgatcttggtagggacattggcaagtatgtgttatttcgtgtttcggcagcggtttaggagcggcaacgattcacagagaaggattaggagagggagtagtaagtcgttttcatggtcttactctcatcatgtatccgattttgaagatgaatcagatttcgagaagattattgctctttga

SEQ ID NO: 1469 - DNA, 1560 bp, Arabidopsis thaliana
  Clone ID: AT_T28J14.C1.o210.tg
atgggtaattcatttgggtgttctgcctccggcgagagattagtgtcggcggcgagagatggggatttcgtggaagccaagatgcttctcgattgcaatccatgtctcgccaagtattcaactttcggtggtcttaattctcctttgcatttcgctgcagctaaaggccataacgagatcgtcggattgttgctcgagaacggagctgatgtgaattccagaaattattgcggccagacagcattgatgcaagcttgtagatacggacattgggaagttgtgcaaactcttctgcttttccgatgcaatgttacaagagctgattatttagctggaagaacagcgcttcatttcgctgctgtgaatggtcacgccaggtgtattagacttgtcttggctgattttttacctagtgataaacttaactctcttcctgaaactggtgttgtcactgcaaagaacaaatctgagcaaagcgcattgtctaaatttgtgaataaggcggctgatggtggaataacagctcttcacatggctgccttgaatggattatttgattgtgtgcagcttttgcttgatcttgaggccaatgtttccgctgattctttctatactgctcccaagatgacaatcttgttcttcgttaacgttgcaggagctggaagcacgcctttacactatgctgcttgtggtgggaatctgaaatgttgtcagattcttcttgcaagaggtgcaagaaagatgacattgaactgcaacgggtggctacctattgacatagcacggatgtggagtcgtcattggttagaaccgttgctttcaccaaattctgatgttgtcattccagcctttcctcattccaactacttatcattgccccttttgagtatcctcaacattgcaagagagttcgggttgcagtctgcaaccattggagatgaagtcgatatctgtgccgtttgcctggaaagaacatgcacagttgctgctgaaggttgtgagcatcagctatgtgtgagatgtgcgttatacctttgctcttcaagcaatgttccctcggtgacagttggcccgcccggatcaattccttgccctctttgtcgacatggaattacagcgtttaaacgactcccaagctccctgacaagagaaatgaagttacccatgtcactcgggttctgtgcaccatgtatgcttcacacgggagacacaacagatcaatcatcaccgacatgcccaccaacagaacaacgcagcagcaagacccgtgcagcctcggtttcatctgatatattctgtccggtaacatgcagcccattcccttcagtaaacattccaatgtgcacctgcaacgaagggacatgtccaaactttgagacacatggaacagagagacatagcgaagaacacgtcgaatcttctccttctcgaacaacaactgaacaggagaagatagaagaagggcaaagacttgggaaaacaacaacttgttcaagtatgttctggggaagaagaagctgtagcagagagaaccaatgcaactccgagatcaatgcttga

SEQ ID NO: 1470 - DNA, 1221 bp, Arabidopsis thaliana
  Clone ID: AT_F25I24.C1.o210.tg
atgcctagtgaagctatgtcgattgttgtggatgttagtagagtatcagattcggtagctcaagatgcaaatttgagtcggagttcgggtatgagcactcaagatgaaaacatctatgcaagattgaagacggtggctcaagttggagatatagaaagactctacgagttgatagcagaagatccaaacattttagaccactttgataaagtgtctttttgtgagacgccactacacattgcagctgaaaaagggcaaactcatttcgccatggaactaatgactcttaagccgtcacttgctttgaagctaaacgtgtcaggtttcagcccactgcatttagccttacaaaacaaccacattcaaacggttttattgggatggattaagagagcaaacagaaaggaaatcttggactggaaggatgaagatggtaacacagtcttccatatcgctgcattgattaatcagactgaggtgatgaaattgctgcgtaaaaccgttaaagtaaaagccaagaacttggatggcaaaaccgcgatggacatacttcaaactcaccaatctccatgtttccctgtagcaaaaaaacttctccgaagtgctaaagaaagaccattttgtggttccacaacgactcttgcgggatatttgagcagaaatctttcgtttattgagaaacggaactctctcttggggctgagcaatttgagcatgactaaagacaggtctataaacgctagtgacccacgcaatgcaatacttgtggtggctatactgatagtaacagctacataccaggctggtctcagtcctcccggcggattttggcaggatacaaatgatggcaggtatggtcacatggctgggcagatgactatgccgttcatctatgcctttttctttattggcctcaacggatttgccttcgtatcatctctatatgtgataataatcatcacaattggactccccaagtggaagttactttacggttcagtggcggctttaagtatcgctgctttagcatcatacagcactatattcccaagttcatatgacgcaaatagctatctctcagtgctcaccttcctctgtgcatacatatcgattatatgtatcatgatgtttgctacattcatggctttcattgttgataaacatcgtcggtaccaagtggacttcccagcgagctgcttcagctcatctcaggagccatga

SEQ ID NO: 1471 - DNA, 1797 bp, Arabidopsis thaliana
  Clone ID: AT_MVE11.C1.o3.tg
atggataccgagaaaggttatcccagaggtttcagagcagagagtctacgaccagaaacgggccccagaagctttcggtttgatagtatgcagatcgatgaagcagccgatctacaaaaagacgagatacgacaagagaactcgacctatcttgtcctcttcaagaacatagacagtggagagttggaagccacgaaagacttcttggaccgaaaccctgaagctttaaccgcaatcttaacctctaatggagacactccaatccataaagctgttttgtcgggtcacatcaagatcgtggaagagatcattagaagaattcatgatccagagcaagtgttaaagatcaagaacgataatggttatacagcgcttacttatgctgccactggtggaattgtaagaattgcagagtgtttggtgaataagtgtcctggtttggtcagtgttcggaatgcgaaagagcatataccgatcgtggtggcttcattgtacggtcacaaacatttggttcagtatctttacagtcacacacctctcagtgatcttgatccttgtgatgattcagatgaacacaagggcaagaacggagcgatgctcgtgacaaattgtattgtcgatggattatattgtattgctttggatctgattcagaggtatcctaagttggcttatactcgagacagtgataacgatacagcgatcatggcgcttgctcaaacaccttatgcgtttcctagcgttccacgcataattagacgtgtatacaaactaaagctaggacatgctcaagctaaagaaatactagactgtatctgtcaagagatacctaaatttgacgcggctcaacaaaagaacgctggtctaaaccaagctctctttaaggcggtagagaatggaatcgtagagtatatcgaggaaatgatgaggcattatcctgatatcgtatggtccaaaaatagtagtggtcttaacatcttcttctacgcggtaagccagagacaagaaaagatctttagcctcatttacaatataggtgctaagaagaacatcctcgctacaaattgggacatattccataacaatatgcttcatcacgccgcgtatagagccccagcctcaaggcttaatctcattcctggtgcagctcttcagatgcaaagggaactacaatggtttaaggaagtggagaagttagtgcaaccgaagcatcgaaaaatggttaacttgaagcagaagaaaactccaaaggctctgtttacagaccaacacaaggatctcgtggagcaaggagagaaatggatgaaagaaacagcaacttcttgcacagtcgttgccgctctaatcaccacaatgatgttttcctccgcctttactgtccccggaggttaccgttcagacggcatgccactctacatccaccagcacagatttaagatattcctcatctccgacgctatctctcttttcacctcatgtatgtctctcctcatgttcctcggcattctcaagtctcgctaccgtgaagaggattttcttcgatcacttccgacaaaactgatcgtgggtcttttggctttgtttctttcgatggcgacgatgattgtgacttttgtcgtgacgctcatgactctggttggagagaaaatctcgtgggtttcggctcaatttatgtttcttgcggtgattccgctggggatgttcgttgtccttcagtttccggtgttacttgagatcttccgcgccacttattgtcctaacgtttttgataaacctcggcgagtgtttaagctttga

SEQ ID NO: 1472 - DNA, 1431 bp, Arabidopsis thaliana
  Clone ID: AT_F24G16.C1.o100.tg
atggacaacattgccgcgcagttgaagcgtgggatatcgagacaattctcgacaggatcaatgagacgaacattaagccgacaattcacgcgccaaaattctctcgatccacggcgtaacaacatgagattcagcttcggtcgtcaatcttcgcttgatccgatcagacgtagtcctgagtctcttagctgcgagccgcatatgtctgtccccgagaatcttgattcgacgatgcagcttctctttatggcgagtaaaggtgatgttaatggcgttgaggagctgcttaatgaaggaatagatgtgaatagcattgatcttgatggtcgtactgctcttcacattgcttcctgtgaaggtcattatgatgttgttaaggttcttcttagccggagagctaatatcgatgctcgtgatcgttggggtagtacggcggctgttgatgcaaagtattatgggaatgttgaagtttataatctcttgaaagctcgaggcgctaaagctccgaaaactagaaagactccaatgacggtagggaatccaaaagaagttcctgagtatgagcttaatccactcgagctgcaagtccgaaaagttgatggcatttcaaagggaacttatcaagttgctaaatggaatggcacgcgagtctcagtaaaaatattcgataaagatagctattcagatcctgaacgagtaaatgctttcacaaacgaattgactttgctagcaaaagctcggcatccaaatattgttcaatttgttggagccgtcactcaaaatctaccgatgatgattgtagttgagtgtaatccaaaaggtgatctaagtgtctatcttcaaaagaaaggtcgtctttctccttcaaaagctctgagatttgctcttgatattgctagaggaatgaactacctccatgaatgtaaaccagatccgatcatccactgcgagttaatgccaaaaaatattttgctagatagaggagggcaattgaagatctctggttttggtttgataaagttgtcaaagattggagaagacagtgcaaaagtagtgaaccacgaagctcaaatcgataagtcaaattactatatagcacccgaaatttacaaagatgaagtcttcgataaaagggctgatgtgcattcgtttggtgtcattttgtacgagttgaccgagggagtatctttattccatcctaaaccacctgaagaggttgcagaatcgatttgtatagaaggtaaaagaccaacaatcagaacaaagtcaaagagttaccctccggaattgaaagagttgattgaggaatgctggcatccagaaatcagtgtgaggccaatattctctgagattattattcggctcgacaagatagttacaaactgttccaagcagggttggtggaaagacacatttaagttcccttggtaa

SEQ ID NO: 1473 - DNA, 1101 bp, Arabidopsis thaliana
  Clone ID: AT_T30B22.C1.o25.tg
atggatacttgtgctctagtaatccatcagtctctgtctcgcatcaaactttctcctcccaaatcttcttcttcttcttcttctgctttctcccctgaatccttaccgatcagacggatcgagctgtgtttccgaggagctatatgtgccgccgtacaaagaaactacgaagaaacgacctcctccgtggaagaggcagaggaagatgatgagtcatcatcatcgtacggagaagtgaacaagatcattggaagccgaacggcgggggaaggagccatggagtaccttatcgagtggaaggacggccattctccgtcgtgggttccatcgagctacatcgcagcagacgtagtgtcggagtacgagacaccctggtggacggcagctagaaaagccgacgagcaggccctgtcacagctcctggaggaccgagacgtcgatgccgtggacgaaaacggccggacggctctgcttttcgtggcaggtctggggtcggacaagtgcgtaaggcttctggcggaggctggagccgatctcgaccaccgagacatgaggggaggcttgacggcgctgcacatggcggctggttacgtgaggccggaggtggtggaggcgctggtggagctgggagctgatattgaagtggaagacgagagagggttaacggcgttggaactagcgagggagattctgaagacgacgccgaaggggaatccgatgcagttcgggaggagaattgggttagagaaagtgatcaatgtcctggaaggacaagtgttcgagtacgccgaggtggatgagatcgtagagaaacgagggaaaggcaaagacgttgaatatctggtcagatggaaggacggtggagattgcgagtgggtgaaaggtgtacacgtggcggaagatgtggctaaggactacgaggatgggctggagtacgctgtagcggagagtgtgatcgggaagagggtgggagacgatgggaagaccatcgagtatcttgtcaaatggactgatatgtctgatgccacttgggagcctcaggacaatgtcgactctactcttgttctactctaccaacaacaacaaccaatgaatgaatga

SEQ ID NO: 1474 - DNA, 1737 bp, Arabidopsis thaliana
  Clone ID: AT_F14N23.C1.o22.tg
atgcagccgatcttccatgcgatccttaaaaatgaccttccagcttttttagagttggtagaagatagtgaatcgtctctggaggagagaaacgaggaagaacacttgaacaacacggttttgcacatggctgcaaagtttggtcaccgagaactcgtctccaagattattgagctccgaccttccctcgtgtcttcccgcaacgcatacagaaacacacctttgcatcttgctgctatccttggagatgtaaacatagttatgcagatgttagagactggattggaagtgtgttctgcacgcaatatcaacaaccacacaccactccacttggcttgccgtagcaattccatagaggctgccagactcatcgcggaaaagacacaatcaattggcctcggtgaactcattctcgccatatcaagtggatccactagtatcgtagggactatactggagagattcccagacctagctagggaagaagcttgggtggttgaagacggctcacaatcaacgctactgcatcatgcgtgtgataagggagactttgaactgacaactatattgttagggctcgatcaaggattagaagaagcacttaaccccaatggtttatcacctctgcatcttgcggtcctcagaggctcggttgtgatcctggaggagttcttggacaaggttccattgtctttcagctcaatcacgccgtcgaaagagacagtctttcatctcgctgctcgaaacaaaaatatggatgcctttgtttttatggcagagagtttgggaattaacagccaaattcttctacagcaaaccgatgaaagtggcaacactgtcttacatattgctgcatccgtctcttttgatgctcctcttatacgttacattgttggtaagaatatagtagatatcacgtccaagaacaagatgggttttgaagcttttcaacttctccctcgagaagcccaagactttgagttgttatcaaggtggctgagatttggtaccgagacttcacaagagctggattctgagaacaatgtagaacaacacgaaggctctcaagaggtcgaggtaatacggttgctaaggattataggaataaacacatcagagatagcagagagaaagagaagcaaggaacaggaagtggaaagaggtcgtcagaacttggaatatcagatgcatatagaagcattacagaatgcaagaaatacgattgctatagtggcagtcttgattgcttcagttgcttatgccggtgggataaaccctccggggggcgtctaccaagacgggccatggagagggaaatccttagtggggaaaacaacggcgtttaaggtctttgcgatatgcaacaacatcgcactgttcacgtccttgggcatcgttattcttcttgttagcatcataccttacaagaggaaacccttaaagagattattggtggccacgcataggatgatgtgggtttctgtaggtttcatggcgacggcttatatagcggcgtcttgggtgaccataccgcattatcatggaacacaatggttatttccagcaattgtagccgttgctggtggagcgttgaccgtactctttttctatctcggagttgagaccatcggtcattggtttaagaagatgaatcgtgtaggggataatataccttcctttgcaagaaccagttcagatttagccgtctccggaaaatcaggctatttcacctattaa

SEQ ID NO: 1475 - DNA, 558 bp, Arabidopsis thaliana
  Clone ID: AT_F8A24.C1.o6.tg
atggctgttccaagaggaggaaatggtttgaatgaagaagaagatgttgacggagaaaacgctatctttgaggaaaacggtgttgactacgacaccgattccgagcttccctctcacctccgtgacttggccgccgctgctcaggccggagatgtcgccgccttgcgcaccgccatcgacaatttgaatgggagagtcgatgagccactcgaggataatgactcggcacttcacttggcatgtctatatggtcacctaccttgtgttcagctgctcttagaaagaggagctgatatggaagtgaaagatgaagacgaagcaattcctctacatgatgcttgtgctggaggatacttggaaatagtacagcttctttttagccgagctagtagtcctgaatgtgtgaagagaatgattgaaacagcagatatagaaggtgatactcctctgcatcacgcagcaagaggtgaacatgttgacgtggttaggtttttgctgggttccggggcttcaccaacgacacaaaactcctatgggaaggtgaaaaaaaacatttga

SEQ ID NO: 1476 - DNA, 1329 bp, Arabidopsis thaliana
  Clone ID: AT_MWD22.C1.o10.tg
atggatgcttttgagactcatttaccgaaggagatcgtctctgatcctctctataactccttcaacccaaggagtgaagagtatgtcgtcgccggaaagattctcaggcagcggtcagtctttgacttggacaaaaacgggtttagccctcttcatgcagctgcggcagccggacaagtagagactgtgagggcaactttgggggttgaaaagaagctttgccgcttaaaagatagagatggaaagactcctctacatgtggcaacgatgagagggaaaatcgatgtgatcagagagattgtagcgagctgtgttgattgtttagaagacgagaccgtacaaggtcaaactgctttgcatcttgctgttctgcacctagagatcgaagcagtcatagccattgttgagttgatcacagagacaaatcgatttgatgtgttgaataagaaagatgaacagggtaacactgctcttcatcttgcaacctggagaaaaaatcgccaggtgattgaagtgttggttcaggcaataccagaagaatcaaggtcatttgaggtgaatgctatgaacaagatgggtctatcagcgatggatttgctggttatgtttccgagcgaagctggcgatagagaaatctatgagaaactcatcgaagctggagctcagagagggcgagacattggcactactaatgtcgagagaaccacttctacttccacatgccaagagagaacaatgaagtcccaaagccataaagaacttgtcaagtacttcactttcaaaaagcacagagactcaccatcagaagcacgtagcgcattactagtggtggcttcactagtcgccacagccacgtttcaggccagcttgaccccaccaggtggaacctggcaagatagctcaatacctgctgtatcccagaacacaacgaatgtgaatactacaaatcaacaagctcatacagcagggcaatctatcatggggaccttcaatggagttgctttcactttgtttgtgttcttcaacacaattgggttttcggtttcactgtctatgctcaacattctcaccctcgggttcccattgcggttccagcttcagatctgtatgattgctatgtatttctcgcacaacacaaccatggccagcattgcacctgatcatgtcaagctttactgcattctcatcacatccatcctcgctgctaccaccccgggtttgatgaggttgctcgagaaccctattggtatgctcgctcacttcttggactccaggtcacaaaaaatttgctccatgatttcactttcatgtaaacgttttgtaacataa

SEQ ID NO: 1477 - DNA, 1371 bp, Arabidopsis thaliana
  Clone ID: AT_T20N10.C1.o110.tg
atgacgattaagcctaaatcgccggcgagattcaagctaggtaggcagtcttcgcttgcgccggaatcaagaaccccgattgatacgttaacggaagatgaggacgacgacttggctgcggcggctacagctgggatcggggatccgacgattcgtttaatgtatttagccaacgaaggtgatatcgatggcatcaataagatgcttgattcgggtactaatgttgattaccgtgacatcgatgcccgtactgctcttcacgtcgccgcttgtcaaggacgaaccgatgtcgttgagctgctgcttagccgtggtgctaaggttgatacgaaggaccgatggggtagtacgcctcttgcagatgcagtgtattacaaaaatcatgatgtgattaaacttttggagaaacatggtgctaagcctacgattgctcctatgcatgtcctaactgataaagaagttccagagtacgagattcatcctacagagcttgatttttccaactctgtcaaaatttcaaagggtacctttaacaaggcttcatggcgtggaattgacgtggctgttaaaacctttggagaggaaatgttcactgatgaagacaaagtgaatgcatttagggacgaacttgcactgcttcaaaagatacgccatccgaatgttgttcagtttctaggggcagttactcagagtacccccatgatgattgtcaccgagtatttaccaaagggagatcttcgacaatatctagacaggaaaggacctctaatgccagcacacgcagtgaagttcgcccttgaaattgctaggttaagtggctatttcctaaacatactgcgggatgattcgggacatctgaaagttgcagactttggagtcagcaagctgctggtagttaagaagacagttaaaaaagacagacctgttgttacatgcttggacagttcatggcgatatatggctccagaggtttataggaatgaagagtatgatacaaaagtagatgtattctctttcgctttaatcttacaagagatgatagaaggttgtgaaccatttcatgagatagaagaccgcgaagttcctaaagcatatattgaagatgaacgtccaccattcaatgctccaacaaaatcatatcctttcgggttacaagagctaatccaggattgttgggacaaagaagcatcaaaaagaccaacatttagagtaatcatctctactttggagttgataagtgatcgaattgcacgcaaaaggagctggaaggtgatgctaggaagatgccttccaagattcagattgtttacaaagcgagattatgtgaatcccggtggtagtaaccgctcatcaggctcattcaacagatga

SEQ ID NO: 1478 - DNA, 1863 bp, Arabidopsis thaliana
  Clone ID: AT_F25P17.C1.o10.tg
atgcacaatcgtcttacaacgggggataggatgagtctatggaatgtgaatgtacaagttgaacccatcaacggaatacggaagctatgttcctcatgctcacttattgtaactaggagcaatcttggagaagatagttttgttgagaaaaagatgcatccgatcttcgatgccatccttcaaaatgaccttccagcttttcttggtttggtggaagcgagagaatcttccctggaggagagaagcgaggaacagaacaccaacaacacggttttgcacgtagctgcaaagctcggtcaccgagaactggtcgccaagattattgagctccgaccttcccttctctcttcccgtaacgcgtacggagacacacctttgcatcttgctgctcttcttggagacgtaaacatagttatgcagatgttagacactggattggaactatattccgcacgcaataacaagaaccaaacacctctccacttagctttcgttagcattttcatggaagctgccaaattcatcgttgaaaagacgaattcagtcgaccttgatgaactcaatttcgccttatcaagtggatctacttgtattgttgggattatactggagagatttccagagctagctaggaaaaatgcttgggaggttgaagacggctcgcgatcaacgttactgcattatgcgtgtgacaaaggtgaccttgaactgacaagtatattgttaggactcaatcaaggactagaagaagctcttaacagcaaaggtttatcacctctgcatctagcagtccaaagaggctcagttataatcctggaggagtttatggacaagtctccattgtctttctgcgtaaggacgccgtcaaaagagacagtctttcatctcgcggcacgaaacaagaataccgatgcctttgttttcatggcggagaatttgggaactagcagcccaattcttttgaagaaaaaagatcaacagggaaacactgtcttacatattgctgcttctgtgtcttgtggttctccgcttatacgttacattgttggtaagaaaataatagatatcagagacagaaacaatatgggttatcgagcttatcaccttctccctcgacaagctcaagactatgagtttatatcaagctacctgaggtgtgacaccaagacttcagaagaagtggactctaaaaaggctgagagaaatgaaccacacatagggcattctgagcatcataccttaccagaggaaacccttgaagaaattattggtggccactcacaggatgatgtgggtttctgtagggtttatggcaacggcttatgttgcggcatctttggtgaccataccgcattttcccggaactcgatggttatttccggttattatctctgtagctggtggatcattgacggagttgagaccatcagtcactggtttaagaagatgaatcgtgtagggagaggactacctatttattttatcaaaaataaccgtgtagaagatatacctgccattgcaaaaaatgaaggtgaaatgccttccttagcaaggaccaactcagacttggccgcctcagaaggggttttaaaccaaagcatcatcagaagaggaggcagccaaaaagccttcaataaagacagaatgatccttgaatcaaacatgatgaaattgaaaccaatgagcagaaaaatctctcgtttaaagattagtccatgtaccaaacgtgatgaaaccaaaggaatgactattgcagatggcgataagtgtttatccaagtgcccacctcaaacaaagcagagacgttctacatactctaaactattctacaccgtaagacaagtttcttcgaagcctgcctga

SEQ ID NO: 1479 - DNA, 1824 bp, Arabidopsis thaliana
  Clone ID: AT_mzn1.C1.o70.tg
atgggagttgatgagctgtctcacctcaaattctctcttctgctagaatcatcagcctgcaatgatttgtccggttttaagtctctagttgaagaagaaggtcttgagagcattgatggctctggtttgtggtatgggaggagattaggatcaaagaagatgggttttgaggagaggacgcctcttatgattgctgccttgtttggaagcaaagaggttgttgattacatcattagtactggtcttgttgacgtgaaccgctcttgtggctctgatggtgccacggctcttcactgtgcggtctctggcttgtctgccaatagccttgagattgttactcttctgctgaagggctctgcgaatccggattcttgtgatgcttatggtaacaagcctggagatgtgattttcccttgtttgagtccggtttttagcgcgaggatgaaggttttggagcgtttgttgaaaggaaatgatgatttgaatgaagttaatgggcaagaagaaagcgagccagaggttgaggttgaggttgaggtttcgcctcctcgggggtctgagaggaaggagtatccggttgatccaacgcttcctgatatcaagaacggtgtatatgggacggatgagttccggatgtatgctttcaagatcaagccgtgctctagagcatactctcacgactggacggaatgtccctttgttcatccgggtgagaacgcaaggaggcgtgatccgaggaagtaccattatagttgtgtcccttgtcctgaattccggaaggggtcttgttccagaggtgatacttgcgagtatgctcatggtatctttgagtgctggcttcacccggctcagtaccggactcgtctctgcaaggacgagacgaattgctcgagaagagtttgtttctttgcccacaaacccgaggagctgcgtcctttgtacccttcaactggatcaggtgttccgtccccgcggtcttccttctcatcttgcaattcctcgaccgctttcgacatgggaccgattagtccgcttcctatcggagcaacaaccacacctcctttgagtcctaacggtgtatcctctccaataggtggaggaaaaacgtggatgaactggcctaacataacccctcctgcattgcagcttccagggagcagattgaaatctgcattgaatgcaagagaaatcgatttctctgaagagatgcaaagtcttacttctccaactacatggaacaacacgccaatgtcatctccattctccggaaagggcatgaacaggcttgcaggaggagcaatgagcccggtgaatagtctcagtgatatgtttgggacagaggataatacatcgggtttgcagatccgacgcagcgtcattaacccgcagctgcattccaacagtctttcttcatcacctgtgggagccaattctctgttttcgatggattcctccgcagtcttggcttcaagagcggctgaatttgctaaacagcgaagccaaagcttcatagaacgcaacaacggactgaatcaccatcccgcaatctcttccatgactacaacttgtttaaacgattggggctcattggatgggaagcttgactggagcgtccaaggagacgagctacagaagctcagaaaatccacttctttccgtctcagagccggtggcatggaatcaagactgcctaacgaagggactgggctcgaagagccagatgtctcatgggtggagccgctggtgaaagagccacaggagacaagactagctccggtttggatggagcaatcatacatggagacagaacagaccgtggcttga

SEQ ID NO: 1480 - DNA, 1926 bp, Arabidopsis thaliana
  Clone ID: AT_F9H3.C1.o7.tg
atgacgagggcgtttcatctgatcattgactgcattactggagacactggatctattcaaatgctcgttacgaatctttatgacttacccggagaatatgtgtcgatgaatcctgagatctttagcgcaatgagagcagggaacgtaaagtttttggataagatgaagactaacaacaatacaccattggcatgtttcaggaacgaaacaggagatttcactcttcaccttgctgctgcttggggtcgacttgagctagtgaagagaatcgtctctgaatgcccatgtcttcttttggaaacaaactccaaggaccagattccgcttcatgccgctgccgctgctggccgtttagctgttgttgaggcttttgttgcgagagtaaatgaaatttcagatggactctctgaagaagagagggagagagtgaatctatatgctatgaaggatatagatggaaataccgctctgcacttagccttgaaaggcggccatttgaagacagctgcatgtctggtaaaggccaaccaccttgcttcgtttcttgcaaataaccatggagtatctcctttgtttacggctataattgctggaagtctaaccctagtggaagcaatgatgtacgttcctggacagacatgtaacttggcatcaaagttagaagggagaaagtcgcttgtacacgcggctctaaaggccaaaaactcagatatccttgatgttattctcagtgaagacccaagtcttgtcaatgaacgagatgaagaaggacggacctgcctttcagttgcagcatacgtagggtactataaaggggtagtcaatctcttacaccgatcaacatcaaatgtctttgagtgtgatgatgatggttcctatccaatccacatggcagtggagaagggtcgcgtcaaaattttcctaaagcttctcaagtgttgtcccgattcacaatacctacttaacaaacaaggtcagaacattcttcacattgcggcaaaaagtgggaaaactggaacttacctattacaagtcatcaaggcttatgatttgataaagaatgatctgattatggagcaagatgtggatgggaatacacctctgcacttagccaccttaacgtggcgtcctcgaactgttaatatacttaataagttcactttgggaaaccacctacatatacgtaacaaagatggcttgagtgctctggatatagcggagtcgaatctgcagtccaattacgtctttcgagagagaatgacgttgatggtcttattgtgcacttgttcgccaagagggtttaaaatgatacccacaagtggaataacattaaaaagcagatcagaaaaagtagccggtaacaaatacaaagacagtatcaatgtacttctacttgtggcaactctagtagctactgtggcatttgctgcaggtattgccataccaggaggatttagtagttctactccaaaaaggggaattgcaattttggacgatgatgacttcctctcgatttttctggtgtttaacacattggcgatgcaaagctctgttctggcaatagttgctctaatatgggcacaactgggggatccagtacttgttcataaaacctttcatttggcattgccagcactctttgtttctctagtttcaatgtcctcagcattcttctgcggcgtggtggctacaacaaagcacaatccttggctttttgatagcattatctttatctctatcatcttcctttttgtggtagcttatctccttgccccttacgctatccctcagtttccgggcactccttttcttcaaagaattactaaatgttatctcgactttatgttgttgtttgttaatgaagatgatgttgatattgtctgcgagaagaagcaggagaccgtccatctttatgtcgcgaactaa

SEQ ID NO: 1481 - DNA, 2052 bp, Arabidopsis thaliana
  Clone ID: AT_F9H3.C1.o10.tg
atggatgtttctgaagcacgtctaagtagaattgagtcacagagttcaattgattcgtctcatgaccaaaggagacaaggatatttctccatgaacaagataaacaacggtcttcgctcactcagttcacgaggtttccttcgaaacagaggaaaagccataccgctgccaatgaaagataccgagaagactgtgccggagttcttagttaatctcaaattttccgatcttttcgatctccctggtgaatatgtgctgatgaatgcggagatgcttagcacacttgggaacgaagaatggctggagaaattgagaagccatggaacaccactaacatgtctcaagaacgatcgaggagattctgttcttcatcttgctgctacatggagtcatctagaactagttaagaacattgtctctgaatgttcttgccttctaatggagtcaaactctaaggaccagcttccacttcatgtggcagctcgaatgggtcacttagctgttgttgaggatcttgttgcgtcggttacatttttctcagctagactggctgaagaagatagggagatactgaatccatatcttctgaaggacataaatggagatactgctctgaacttggccttgaaaggacactatacggaggttgctctctgtttggtgaatgcaaaccgacaagcttcctttcttgcatgtaaagacggaatatctcccttgtatttagcagtagaagccaaggatgcatcacttgtaaaagcaatgttgggaaatgatggtcctcaaaggaaaaatttgaacttagaagggagaaaatatcttgcacacgctgcattgaattccttgagcacagatatccttgatgttattcttaatgaatatccaagtcttgtggatgagcgagatgaagaaggaaggacttgtctttcgtttggagcatccattgggtatcataaaggagtatgcaacctgttaaaccgatcaagaaagggtgtttttgtatgtgatgatgatggttcctatccaatccacctggcagtagagaaaggtcgtattaaagttgtcaaagagatttgcaaacgttgtccatattcaaagcttttgcttaacaaaaaaggtcagaacctccttcacatcgcagctgaaagtgggaaatttagaattctacgccacttgacagcacatgaacaaataaaccatctagctaacgagaaagatgtggatgggaatacaccactgcatctagccacaatatattggcgtcctcgagctgttcgtgagcttggagggaagaaaaacctgttgatacaaaacaataacggcttggtagctctggatattgctgagtcaaaactgcaaccacactacatctttcgagagaggttgacactgctagctttagtacaacttcacttccaaaatgatcctagatgcgcacatactatgattcaaacaagaccaataatgcctcaaggcggaaacaaagattacatcaacgctcttctagtagtggcagctcttataaccaccgtaacgtttacgtctggatttactataccaggtggttttaaagactctactccaaacgtgggcatggcaaatctaataactaaccctcgtctcatccttttcctgatatttgacattttggcactggaaacctcatttttagcagtagtttctctcatattggcgcaattaggtgatccgacattatatcagagttccgtaagggtggccatgatatcactgtatttcgctatgtatttcatgaccttagcattcttttttgtcatggttattgcagctgggaatgttagatggcttgtttatgtcatcttctgtttaattttctccattttaactctggcgttctcaaggtttatgcctcatcttctactacattattgtggctctagttataagttgatgatgccatttgttagttttgcaaattcatgtgatgatgacggacacgaaagtcctcagttctctgcgcacaagtctgagaagatctcaaacaatgatcaagttgaaatgtcagacactacttaa

SEQ ID NO: 1482 - DNA, 1434 bp, Arabidopsis thaliana
  Clone ID: AT_F18O19.C1.o4.tg
atggagaacataaccgcgcagctcaaacgaggtatctcaagacaattctcaactggttcgattcgtcgaacattgagccgacagttcacgcgtcagtcatctcttgaccctcgtaggaccaacatgaggtttagtttcggtcgtcagtcttctctcgatccgatcaggaggagtcctgattcttccaagagtgatgacgagccacatatgtcggtaccggagaatctcgattcgacgatgcagcttctctttatggctagcaaaggtgatgtcagaggaatcgaggagcttcttgacgaaggaattgatgttaatagcatcgatcttgatggccggacggcgcttcacatcgccgcttgtgagggacatcttggtgtcgttaaggctcttcttagccggagagctaacattgatgctcgtgatcgatggggaagtacggcggctgctgatgcaaagtactatgggaatttagatgtttacaatctcttgaaggctcgaggagctaaagttccgaaaactaggaagactccgatgactgtgtcgaatccacgagaagttcctgagtatgagcttaatccacttgagggagcatatcaagtagctaaatggaatggcacgcgggtttcagtcaaaatacttgataaagatagttactcagacccggaacgcataaacgcatttagacatgaattgacgttgctagaaaaagtccggcatccaaatgttatccagtttgttggagctgtcactcagaatataccgatgatgattgtagtcgagtataatccgaaaggagatttaagtgtatatctccaaaagaaaggacgtctttctccatccaaggcacttagatttgctcttgatattgccagaggcatgaactacctccatgaatgtaaaccagatccaatcattcactgtgatctaaagccaaaaggagggcaattaaagatctcaggatttggtatgataagattgtcgaaaatttcacaagacaaggcgaaagtagcaaaccacaaagcacatatagatctctctagtaaggagaatgcttcattcacatgcatgaaaactgaatctcttgattactacattgcaccagaggtttataaagacgaaatattcgacctaagggttgatgcacactcctttggtgtcattttatacgagataacagagggagtaccagttttccatccgagacctcctgaagaagttgcgagaatgatgtgcttagaaggaaagagacctgtattcaaaactaagtcaagaagttaccctccagatataaaagagttgatcgagaaatgttggcatccagaagcgggtattagaccgacattctctgaaattattattcgacttgacaaaatagtagcaaattgctctaaacaaggatggtggaaagacacattcaagttcccttggaaataa

SEQ ID NO: 1483 - DNA, 1065 bp, Arabidopsis thaliana
  Clone ID: AT_T27E11.C1.o20.tg
atgggtgattgggctcaacttgctcagtctgtgatcctaggtttgattttctcttaccttctcgctaagctgatctcgatcgtcgtcacgtttaaagaagacaatctctctcttactcgtcacccagaggagtctcaattggaaattaaaccggaaggagttgactcgcgacgtctcgattcctcttgcggtggtttcggtggtgaggcggattcgcttgtggcggagcagggtagctcccgaagtgatagcgttgccggtgacgacagtgaggaagatgatgattgggaaggcgtcgagagcacggaactcgatgaggcttttagcgccgccactctttttgtgactaccgccgccgcagatcggctttcgcagaaggtaccgagtgatgtgcagcagcagctttacggattgtataagattgctacggaagggccgtgtactgctcctcagccatcagctctcaaaatgactgctcgtgccaagtggcaagcatggcagaaactgggagctatgccacctgaagaggcgatggagaagtatattgagattgtcactcagctttacccaacttggttagacggtggcgtgaaagccggaagtcggggtggggatgatgcagcctccaactcaagaggaaccatgggaccagtttttagctctttggtttatgatgaggagtccgaaaatgagttgaagattgatgccatacacggatttgctagagaaggagaagtcgagaatttactgaaaagcattgaaagcggcattcctgtaaatgcaagggacagtgaaggtcgcacaccattgcactgggctatagaccgtggccacctcaacatcgccaaagttctggtcgataagaacgccgatgtgaatgctaaggacaacgaaggccaaacccctttgcattatgctgttgtatgcgacagagaagctatcgccgagtttctggttaaacagaacgcaaacacagccgctaaagatgaggatggaaactctccccttgatctctgtgaatcagactggccctggatccgagattctgcaaagcaggcagactaa

SEQ ID NO: 1484 - DNA, 1884 bp, Arabidopsis thaliana
  Clone ID: AT_F3F20.C1.o9.tg
atgagttctctggttcctgttatggagaagcaagagagcgttcgaggtaactctgtggaggaacagcagagtctcagatgcgttggtgcagagaatcaggtgagaaagggaagagctttggacaagcaagttagtttcctagctgtgaatgttgttgagaaacatggaatcaaaggaagagcaatggagaaacaggagagggcaatggagaggcagagaagctttcgtgggtttgttgagaagcagaaaagctttagggtagtaatggagagacagttaagtttcatgaatgttggtggtgagaggaagaagaagactgactcacctggtaaaagaggagattctcctcttcatctcgcagctcgaacggggaatttgggaaaggttatggaattgattcgagcttgtaacggcattgaagagttgaaggagttgtcatcaaagcagaatctagaaggagagacccctctttatagtgcagcagaaaatgggcattcattagttgttgaagagatgttgaaacatatggatcttgatactgcatcagttaaagctcgcaacggttttgatcctttccatgtcgctgcaaaacaaggccatattgaggcattgaagaaattgttggagacatttccgaatctggctatgacggtggatctatcgtgtacaactgcattgcacacggctgcttcacaaggacacactgatgtggtgaatcttcttttaaagacggattctcatttagctaagatagctaagaacaatggtaaaaccgcacttcattctgcagcgcgaatggggcacagagaagtggttaagtctttgataggtaatgatgcaagcatcgggtttagaactgataagaagggacaaacagcgcttcacatggctgtcaaaggtcagaacgaagggattgttcttgagttggtgaaacctgatcctgcgattttgagtgttgaggatagtaaagggaatacgccgttgcacactgccacaaacaaaggccgtattaagatagtgagatgtttggtatcatttgatggaattaaccttaatgctatgaataaggctggagatactgcacttgatatagccgaaaagattggaaatccagagcttgtgtcggttctgaaggaagcaggagctgcaacagctaaagatcttgggaagcctcgaaacccggctaagcaacttaaccaaacggtcagtgacattaaacacgaggtacagtctcagctccaacagtctcgccaaacgggtgttagggtgcggagaatcgcaaagagactgaagaagcttcacatcaatggtttaaacaacgctataaactctgcaaccgttgtggctgtcctaattgcaacagttgcatttgcagcaatcttcaccattcctgggcaatatgaagaagacagaacaaagggactgttgttattaggagaagcccgcatagccggcaaagccccgtttttagtcttcttcatatttgacagcttggcgctgttcatatctttggctgttgttgtggtgcagacttcagttgtggtgattgagcagaaggcaaagaagaatcttgtgtttgtgatcaacaagctcatgtggttggcttgtttgttcatatccgtagcctttgtttctctttcgtttatcgttgtgggtaaggaggacatttggctggcgatttgtgcaacgattattggcgggacgattatgctaaccacgataggtgcaatgtgttactgtgtggtcatgcataggatcgaggaatctaaactgaaaagcttaaggaaagagagaagcaaatcgaaatctttctcactatctcatatgccttcagagtcagagattctcaacggcgaattcaacaagagaatgtatgcactctga

SEQ ID NO: 1485 - DNA, 1404 bp, Arabidopsis thaliana
  Clone ID: AT_F24I3.C1.o210.tg
atgagcaatactttcgaagaatcactcaaatctatgtcattggattacctaaacctcttaatcaacggtcaagctttctccgatgtcactttcagcgtcgaaggccgtctagtccacgctcaccgttgcatcctcgctgctcgtagcctcttcttccgcaaattcttctgtgaatctgatccttcgcaacccggagctgaacccgctaaccaaaccggatcaggagccagagcagccgcagtaggaggagtcataccggttaactcagtcggttacgaagttttcttacttctacttcaattcttgtacagtggtcaagtctcaattgtaccacataagcacgagccaagatcgaattgtggagatagaggatgctggcacacgcattgcactgcagccgtcgatctctctttagatattttagccgccgctcgctactttggcgtcgagcagctcgcgttgcttactcagaaacatttgacaagtatggtggagaaagcctccattgaagatgtgatgaaagtgctcatagcttcaagaaagcaagacatgcatcaattatggactacttgctcttacttaatcgccaaatccggtcttccacaagagattctagccaaacatctcccaatcgaacttgtagccaagattgaggagctccgtctcaaatcttcaatgcctctccgttcactaatgcctcaccaccatgacctaacctcgactttagacctcgaagaccagaagatcaggaggatgagacgtgcattggactcctctgatgtcgagcttgtgaagctaatggtgatgggagaaggactcaatctagatgagtccctagctttgatttacgcggttgaaaattgtagtagagaggttgtaaaggcacttcttgagcttggagcagctgatgtgaactatcccgcgggtcccacagggaaaaccgctcttcacattgcggctgaaatggtgtctccggacatggtggctgttttactcgaccaccacgccgaccctaacgtccagacagtggatggaatcactcctctcgacatccttcgaaccctaacgtcagattttttgttcaagggggcaattcctggattgactcacattgagcccaataagcttaggctttgtctcgagctggtccagtccgcggcattggttatatcacgcgaagaaggaaacaataacagtaacgataacaacacaatgatctaccctaggatgaaagacgaacacacgagcggaagtagtttggattcaagattggtttatctgaatcttggtgctacaaatcgtgatattggagatgacaatagcaatcaaagggaaggaatgaatctgcatcatcatcatcatgacccatcaacgatgtatcatcaccaccaccaccatttctag

SEQ ID NO: 1486 - DNA, 2574 bp, Arabidopsis thaliana
  Clone ID: AT_F18A8.C1.o2.tg
atgagaggaggggctttgttatgcggacaagtccaagatgagattgaacagctttcgagagagagtagtcattttagtctttctactggaattttaccttcacttggtgcaagaagtaatcgacgagttaagcttaggagattcgttgtatctccttatgatcacaaatacaggatatgggaggctttcctagtggttcttgtggtttacacagcttgggtttcgcctttcgagtttgggttcttgagaaagccaaggccaccactatctatcaccgataacattgtgaacgcattcttcgccatcgatatcatcatgacattctttgttggttacctcgataaatcgacttacctcattgttgatgaccgtaaacagattgcatttaagtacttgcgttcttggttccttcttgatcttgtttcaaccattccctcagaggctgctatgagaatctcatctcagtcttatggattgtttaacatgcttcgtctttggcgtcttcgcagagtcggtgccttgtttgccagactagagaaagaccgcaacttcaactacttttgggtccgatgcgcaaaactcgtttgtgtcactctttttgcggttcattgtgctgcatgtttctattaccttatcgcagcgcgcaattctaaccccgcaaagacctggattggtgcaaatgtagcaaacttcctagaggaaagcttgtggatgagatatgtgacttccatgtattggtccatcactactctaaccactgttggttatggtgatctgcatcctgtgaacacaaaggagatgatatttgatatcttctatatgctcttcaacctcggattaaccgcttacttgattggtaacatgacaaatttggtagtccatggaacaagtcggactagaaattttagagatacaatccaagctgcttcaaattttgctcatagaaaccatttaccacctcgtctgcaagatcaaatgcttgcacatttatgtttgaaataccggactgactctgagggtctgcaacagcaagaaactcttgatgcactcccaaaggccattagatcgagtatatcacactttcttttctactccctcatggataaagtctacctgtttcgaggagtatccaatgacctgctttttcaactggtctcagaaatgaaagctgagtatttcccaccaaaagaagatgttatcttgcagaacgaagcgccaacagacttctacatccttgtgaacggaaccgcggacttggtggatgtagatactggaacagaaagcattgtgagagaggttaaagctggagacattataggggagataggggtgttatgctacagaccacaactgtttactgtgaggaccaaacgtttgtgccaactgttgcgtatgaaccgtacaactttcttgaatattattcaggccaatgttggtgatggtaccataatcatgaataatctacttcagcatttgaaagaaatgaatgatccggtgatgacgaatgttctgctggagatagaaaacatgcttgcacggggtaaaatggatcttcctctcaatttatgctttgctgcaataagagaagacgatttacttttacatcagttactaaagagaggacttgatccaaatgaatcggataacaatggcagaacacctctgcatatagcagcatcaaaaggaactctaaattgtgttcttcttctgttggagtaccacgcagaccccaattgcagagacgcggaagggagtgtaccactgtgggaagcaatggtggaagggcatgagaaagttgtaaaggtactgttagaacatggcagtaccatagacgcaggggatgtgggtcattttgcttgcacggcggctgagcaaggaaacttgaaactactaaaagaaattgttcttcatggtggagacgttactcgtcctagagccacaggcacctctgcgctccataccgctgtatgcgaagagaacattgagatggtaaagtatcttctggagcaaggtgcggatgttaacaagcaggatatgcatggttggacgccgagggatcttgctgagcaacaagggcatgaggatattaaagccttattccgagaaaagttacatgagaggagagtgcatatcgagacaagttcttcggtacctatactcaaaaccgggatccggttcctcggaagattcactagtgaacccaacatccgtcctgcatcaagagaagtgtctttcaggattcgagaaacaagagcaagacgtaaaactaacaacttcgataactcgttgtttggtatattagcaaatcaaagcgtacccaagaacgggctagctacggtagatgaaggcagaactggaaacccggtgagagtgacgattagttgtgcagagaaagatgacatagccgggaagctggtactgcttcctgggagtttcaaggagttgctagaattgggttccaacaagtttggtattgttgctaccaaagttatgaacaaagacaacaatgcagagattgatgatgtagatgttataagagatggagatcatctcatctttgcaactgattcttaa

SEQ ID NO: 1487 - DNA, 1806 bp, Arabidopsis thaliana
  Clone ID: AT_T16H5.C1.o20.tg
atggctgcaactgcaatagagccatcttcatctataagtttcacatcttctcacttatcaaacccttctcctgttgttactacttatcactcagctgctaatcttgaagagctcagctctaacttggagcagcttctcactaatccagattgcgattacactgacgcagagatcatcattgaagaagaagctaaccctgtgagtgttcatagatgtgttttagctgctaggagcaagttttttcttgatctgtttaagaaagataaagatagtagtgagaagaaacctaagtatcaaatgaaagatttattaccatatggaaatgtgggacgtgaggcatttctgcatttcttgagctatatctacactgggaggttaaagccttttcctatcgaggtttcaacttgtgttgattcagtttgtgctcatgattcttgtaaaccggccattgattttgctgttgagttgatgtatgcttcatttgtgttccaaatcccggatcttgtttcgtcatttcagcggaagcttcgtaactatgttgagaagtcactagtagagaatgttcttcctatcctcttagttgcgtttcattgtgatttgacacagcttcttgatcaatgcattgagagagtggcgagatcagacttagacagattctgtatcgaaaaggagcttcctttagaagtattggaaaaaatcaaacagcttcgagttaagtcggtgaacatacccgaggtggaggataaatcgatagagagaacagggaaagtactcaaggcattggattcagatgatgtagaactcgtgaagcttcttttgactgagtcagatataactctagaccaagccaatggtctacattatgcagtggcatacagtgatccgaaagttgtgacacaggttcttgatctagatatggctgatgttaatttcagaaattccagggggtatacggttcttcatattgctgctatgcgtagagagccaacaattatcataccacttattcaaaaaggagctaatgcttcagatttcacgtttgatggacgcagtgcggtaaatatatgtaggagactcactaggccgaaagattatcataccaaaacctcaaggaaagaacctagtaaataccgcttatgcatcgatatcttggaaagggaaattagaaggaatccattggttagtggggatacacccacttgttcccattcgatgcccgaggatctccaaatgaggttgttatacttagaaaagcgagtgggacttgctcagttgttcttcccagcagaagccaatgtggctatggacgttgctaatgttgaagggacaagcgagtgcacaggtcttctaactccacctccatcaaatgatacaactgaaaacttgggtaaagtcgatttaaatgaaacgccttatgtgcaaacgaaaagaatgcttacacgtatgaaagccctcatgaaaacaggtaaaagcttaaggaaatgtactttcaagttttattctctgaccacaagattgactgattcgaaaccgttcaacaacgcagttgagacaggtcggagatacttcccatcttgttatgaggttctggataagtacatggatcagtatatggacgaagaaatccctgatatgtcgtatcccgagaaaggcactgtgaaagagagaagacagaagaggatgagatataacgagctgaagaacgacgttaaaaaagcatatagcaaagacaaagtcgcgcggtcttgtctttcttcttcatcaccagcttcttctcttagagaagccttagagaatccaacatga

SEQ ID NO: 1488 - DNA, 1932 bp, Arabidopsis thaliana
  Clone ID: AT_F21B7.C1.o8.tg
atgaagtgtgacagtaaatctgaaacagtaagctcctcgtccacatctggctccctttcagatccagatcagtggactattttcaaagacaaggatgaatctgagattatgaatccagcgattttgtgtgctgtaagagcaggtgacaaagtctccctcctgaaaaggataaacgatgacgtaaaggtcactcaacgactcgtagacaatcaagggaattcaatacttcatattgctgctgctttgggtcatgtccatatagtggagtttataatctctacattcccaaatcttctacaaaatgtgaatctgatgggtgagacaactcttcatgttgcagccagagcaggcagtctcaatattgttgagattcttgttcgattcattacagagtcttcttcctatgatgcgtttattgccgctaaaagcaagaacggagatactgcactacatgccgcgttgaaaggaaaacatgtagaggtggctttctgcctagtaagtgtgaagcatgatgtatcatttgataagaacaatgatgaagcatctccattatacatggctgtagaagctggatatcacgagctcgtgcttaaaatgcttgaatcttcatcttccccatctatactagcttcgatgttcagtggaaaatctgttatacatgcagcaatgaaggccaatagaagaggtttgtttctatgtttgttcaaccttgtacgccaagtgttctttatatgttttaattatttcttggtcattgctttgacagatatcctaggtattgttcttagacaagatccaggacttattgaattacgcaacgaagaaggaaggacatgtctttcctatggagcatcaatgggatgttatgagggaattcgctatatactagcagagtttgacaaagcagcttcaagcctttgttatgtcgctgatgatgatggcttcactcctattcatatggcggcaaaggaaggacatgtcagaatcattaaggagtttcttaaacactgtcctgactcaagagagctacttaacaatcaatgtcagaatatctttcacgttgctgccatagctggtaagtcgaaagttgtcaagtatcttttaaaacttgatgaagggaaaagaatgatgaatgaacaagatatcaatgggaatacaccgttacacctagccactaaacacagatacccgatagttgtgaatatgcttacatggaacgatgggattaacctcagagcactcaacaatgaaggctttacagctttagatattgctgagacgatgaaggacaataacgcttacgtactttacaagagattgatttggatggctttggtatctgctggagcaccacatggcccaaacctgattcccttgactgtgtcacagagtagcaaacaaagtccagaaagatacaaggatagtgtcaatactcttatggtgactgcaacactcgtagcaaccgtgaccttcgctgcaggtttgacattacccggtggttacatgagttctgctccacatttaggcatggctgcattggtcaataagttgaattttaaggtatttctgttgttgaacaacattgcaatgtgcacttctgtggtaactgtaatggctctaatatgggcacaactgggtgatgcacttctgacaaagaaagcttttcgactagctttaccacttctgttaacagctgttgtatcaatgatgatggcatctgtggctggacttactcttgtggtgagcgatctcccatggctttcccatcttgtattagccatagattcagccttcttggtattcctgatgctacttatcattccttacgctttctcgtctacaagacatggctttctcagacatatcttctactttccttatttcttgatgcttttggttgttagcgaaggcagcaacaacatggatggttaa

SEQ ID NO: 1489 - DNA, 3051 bp, Arabidopsis thaliana
  Clone ID: AT_F1N21.C1.o13.tg
atgagtagcgtcgcagaggataattcctttacctgtgacatagcaaccatcttcgtggctatctgtcggaaccctcctgctaatccttcagattctttatttcaatatgaaattagtactctgtatcaagaagctcatagccgttggttgaaacctcctgaggtactcttcatattgcagaatcatgaaagcttgacgcttactaatacagctcctcaaagacctacaagtgggtctttgttgcttttcaataaaagggttcttaaattctttcgtaaagatggtcatcaatggcggagaaaaagagatggtagagctattgctgaagcacatgaacgacttaaggtgggtaacgctgaggcattgaattgttattatgctcatggagagcaagaccctacttttcggaggcgtatctactggatgttagatccggaatacgagcatattgtccttgttcattacagggatgtaagcgaacgagaagagggacaacaaactggtggacaagtttatcagtttgcaccaattctttccactcaaaatgtaagctacaatcagtacattggtgattcttcggacatatatcagcagtcttctacttcgccgggcgttgcagaggttaactctaacttggaaggcagtgcaagttcttctgagtttggacaggctttaaagatgcttaaggaacaactgagtatcggagatgaacatgttaattctgttgatccacactacattcaaccagaaagtcttgatagtctccagtttttagagtacagtgacatagatcaccttgctcaaccaacaactgtatatcagagaccagagaataacaaactagagagatgttatggaggcaattttggagcccaatacagtgccaagaatgattctaacaaactagagagatgctatggagggtatgttggtggagccgaataccattctagcaatctcatgctcgtaaagaatggttcaggaccttcaggtggtacaggagggagtggagatcaagggtctgaatcttggaaagatgtgttggaggcatgtgaggcttctatacctcttaactctgagggaagcacaccaagttctgcaaaaggattgctagctggattgcaggaagactcaaattggagttacagcaatcaggttgaccaatctacatttttgttgcctcaagatcttggttctttccaacttcctgcttcttattctgcactggtagctcctgagaataatggtgaatactgtggaatgatggaggacggaatgaaaatcggtctgcctttcgagcaagaaatgagagttacaggtgctcataatcaaaagtttactatccaggacatatcaccagactggggttacgcgaatgaaactacaaaggtgataatcattggatcatttctctgtgatccaacagaatctacatggtcttgcatgtttgggaatgctcaagttccttttgagatcattaaagaaggtgttatacggtgtgaagcccctcaatgtggtcctggaaaagtcaatttatgcattacttctggagatggactcttgtgtagtgaaataagggaatttgagtatcgtgagaagcctgacacatgttgccctaaatgcagtgagccacagacctctgatatgtccacaagtccaaatgagcttatattacttgtaaggtttgtgcaaacacttctatcagaccgatcgtcggaaagaaaaagtaacttagagtctggcaatgataagctgttgacgaaactgaaagctgatgatgatcaatggagacatgtcataggaacgatcatagatggcagtgcatcatcaacaagtacagttgattggcttctacaggaactgcttaaagacaagctggatacatggctgtcttcaagatcatgtgatgaagattacataacgtgttctttgtcaaagcaggaacaaggtattatccatatggttgcaggccttggcttcgagtgggcattttatccaatccttgctcatggagtcaatgtagattttcgtgatattaagggatggagcgctcttcattgggctgcacaatttggaagtgaaaaaatggtggctgcccttatagcttcaggggcatcggctggagcagtgactgatccaagtcggcaagatccaaatggcaaaactgcagcttcaatagctgcctctaatggccacaagggtcttgcaggttatctgtcagaggtggcgttaacaaaccatctctcatcgctcacacttgaagaaaccgagaattcaaaagacactgctcaagtgcaaactgagaaaactttgaattccatctcagaacaaagtccttccggtaacgaggatcaagtgtcattgaaagacacactggctgcagtacgaaatgcagctcaagcagctgcaagaatccaagcagcttttcgcgcacattcattcagaaagcgaaaacaaagagaagcagctttggttgcttgcttacaagagtatgggatgtattgtgaagatatagaagggatctcggccatgtcaaagctaacgtttggaaagggcaggaactacaattcagcagctttatctattcagaagaattttcgtggctataaagatcgtaaatgttttctagagcttcgccagaaagttgtaaagattcaggctcatgtgcgaggttaccaaataaggaaaaattacaaagtaatctgttgggcagtaagaattttagataaggttgtactcaggtggagaagaaaaggagttggactaagagggttcagacaagacgtagagagtacagaggacagtgaagacgaagacattctcaaggtgttccgcaaacagaaagtagatgttgcagtgaacgaggctttctctcgtgttctatcgatgtctaactctccagaggctcgccagcaataccaccgagtgctcaagagatattgtcagacaaaggctgagcttggaaaaacagagacattagttggagaggacgatgatgggttgttcgacatagctgatatggaatatgacactttgttttcattgccttga

SEQ ID NO: 1490 - DNA, 1407 bp, Arabidopsis thaliana
  Clone ID: AT_MRI1.C1.o10.tg
atgaggtttctaagcctcgtcggaaactcattcggttgttctgcgtccggcgaacgcttagtatcagcggccagagacggtgatttacaggaagctaaagctctcttagattacaatccaagactcgctcgttactctacttttggcgttcgtaactctcctcttcattactccgccgctcaaggccaccacgagatagtttctctgttggtggaatcaggagttgatattaatctccggaactaccgtggacagattcacagatcagattacttaaatggtggtactgctttacaccttgcggctttaaatggtcaccctcggtgtatcaggatcttgctttcggagtatataccaagtgttcctaattgctggagccttttaaagaataagaaaacttcagttgctggattcgattctagtgttcttcacgaagtgatcaacagagcagcagatggtggaatcacacctcttcatgtggcggctttgaacggacatatagagacggtgcagttactcttggatttgggagcttcggttactcaggtgctgggagtacagctctccattatgcttcatgtggtggaaacacgcagtgttgccagtaagggtgcttgtttagctgccgtaaactccaacggatggacaccaatgatggtagctcgttcatggcaccgaaactggctggaagaaatcctgaacccaacaacagaacaaccacaactccatttgccaaatgtcccctctcctttcctctgccttcctttaatgagcattgtcaatattgctcaagaatgcggctggcgagaaaacgattgtctgactccatgtcgtgacccttgtgccgtttgtttggaaagaaaatgcactgtggcagcagatggatgtgctcatgagttctgcacaaactgtgcattatacctaagcaccacaagcataacatcgtcaaagacctcaaacgtcacaccaggctctgtcccgtgtcctctctgtcgcaatggcattgtatctttcaccaaacttccccatacaacggcaacaacaagaacatcaacatcatcaagaacaagcatctccttgtccttctgcacttgctcctctgatgtcttagacacagctctcctaactaaccctcactacagttgtaaaccggttgtgtcaagaacgggttctcgaactccacaatccgctagatcatcagcgtttcggtctcttagctgccgccggtttcctccaagtctctgccttggtggctcagatgttgatgaacctcgaagccggttaattggtggatcatattcaagatccggtgtaggattcaggcgatcaacgtcgcaggttgaagggaaacgttcttggttttctgcacttaaccattgtgttacaaccggtggaagtgcttgctaa

SEQ ID NO: 1491 - DNA, 1239 bp, Arabidopsis thaliana
  Clone ID: AT_F14L17.C1.o30.tg
atggatttgagactccaacaagctgctgagtctggaagcatcaatgagttgtatgctcttattgatgagaatccatacatacttgagaacattgatgcggtgccatttgtgagcactcccctacatgtagctgcagtttttggaaacatagaatttgccatggagatgctgaatcttaagccctcttttgccagaaagctgaacacaagcggttacagtccattgcatctcgctgtggaaaaggaacaaagcgactttgtctcccatatgctctggcatgatggtggcctgtcccgtgtcaaagggagaaatgatgtgaacgtggatcgccaaaatgctttgcatctagctgtgatgaatgatagatttgaagttctccaggttctcacgggatggatccagagaatgagccaaaaagatgcttactatatcgagaaccgagttctgaataaaagggattttgacttcaacacggccttgcaccttgcagcatataagaatgatcagcaggccttgaaactattactaaaatgccggttggtggagccgaacctagttaatattgatgatttaacattcgttgatatcttaaggacccagggagagaacgcaggtggtgggaacctagatttggaacaagctgttataaaaactgggtgtgtagaggcggcttctatgccaaaattcaaggaagagtctgatttgttgaaatcaccaatcaattttatgacatactattccacgtccatgaaacgcatgaagtcttccacttcagatcaagatcgcggagcatttctgattgtatgcactttgataataacagccacttatcagatggccctccagcctcccggaggtgtacaccaatctgagaatgcgaatgcgaatgcgggttctgtggtgatgaaacagacattcttcatccttctttggatttccaacaccgttggtttctgctgcgctgtattctacaccttttgtctcataccactcggtcagttgtttacgatatggtttttttatatagggacatgtctgtgcatttcttatgcactagcaatggcagtaatctcaccacaccctctagtgtttctctctgctacctttgctctcttccttgtttttgctctctatctcttgcttgaagctttcgtagatacttggcggaagcatcggacggtggtacctaagtcccgattcagctggttttggaaggttttacaatattattatatctga

SEQ ID NO: 1492 - DNA, 1035 bp, Arabidopsis thaliana
  Clone ID: AT_F5J6.C1.o15.tg
atggcttcaagctcagagaaaacacctcttattccttcagatgagaaaaacgataccaaggaagagagtaagagtactactaaaccagaatcaggctcaggagctccaccttcaccttcaccgactgatcctgggcttgatttcaatgcttttgatttctccggcatggctgggatcctcaatgatccaagtatcaaggaattggctgagcaaatagctaaagatccttcatttaaccagttagctgagcagcttcagagatctgtgccaaccggatctcatgaaggaggtctacctaactttgatccacaacagtatatgcagacaatgcagcaggttatggagaatcctgagtttagaacaatggctgagcgtcttggtaacgctttggtgcaggatccacaaatgtctccctttttggaggctcttggtaaccctgcagcatcagagcagtttgcagagcgtatggcgcaaatgaaagaagatcctgaattgaaacctatactagctgagattgatgctggtggtccttctgctatgatgaagtactggaatgataaagatgtgttggcaaagctgggtgaagcaatgggtatagctgttggagcagaccagactgttgcagctgaacctgaagaggccgaagaaggggaagaggaagagtctattgttcaccagaccgctagtcttggtgatgtcgagggtttgaaagctgccttggcatctggtgggaacaaagatgaagaagactctgaaggaaggactgctttgcattttgcatgtggatacggcgaggtgagatgtgctcaggttcttctggatgctggagcaaatgcaaatgcgattgacaaaaacaagaacacaccattgcactatgctgctggttatggaaggaaagagtgtgtaagcctcctcctagagaatggtgctgcagtaactcagcaaaacatggacaataaaaatcccattgatgtggccaggctaaacaatcagctagatgtggtgaaactacttgagaaggacgctttcctctga

SEQ ID NO: 1493 - DNA, 2559 bp, Arabidopsis thaliana
  Clone ID: AT_K14A17.C1.o6.tg
atggacggcgacggtttaggcagactaatcggctcggagattcatggattccataccttacaagatcttgatgtacagacaatgttggaggaagcaaaaagcaggtggctacggccaaacgagatccatgcaatcctctataacccgaaatacttcactatcaatgtcaagccagtgaacttacccaatagtggcagaattatattattcgaccgtaagatgttgaggaacttcagaaaggatggtcataactggaaaaagaaaaaggatggaaggacagtcaaagaggctcatgaacacctgaaagttggtaacgaggaaaggattcatgtatactatgcgcatggtgaagataacactacctttgttcgaagatgttattggttactggataaggctcgagagaacatcgtccttgtacattaccgtgatacacaggaggcagctacaacatcgggggactcaatctctagtccaatctccgtctcggaacaaacattccctaatcgcgtggcagctgaagatattgatacagttgttagaaatcatgatattagccttcatgatatcaatacgcttgattgggatgagctgctagtaccaaccgatcttaataaccaatctgcaccaaccgtagataatctttcatatttcacagaaccgctccaaaatgctgcaaatggcactgcagagcatgggaatgcgacagtggctgatggatctcttgatgctttgcttaacgatggtccacaaagtcgagagagttttggaaggtggatgaattcatttatcagcgaatctaatggctcactggaggatccttcctttgaacccatggttatgcctaggcaggatccattagctcctcaagctgtatttcattctcactctaacatacctgagcaagtgtttaacataaccgatgtttcacctgcttgggcctattcttccgagaaaactaagattctggtaactgggttcttgcatgacagttatcaacatctcgaaagatcaaacctttattgcgtttgcggtgacttttgtgtccctgcggaatatctccaggctggagtctaccgttgcatcatacctccacactcgcctggtatggtaaacctctatcttagtgcagatggacacaaaccaatcagccaatgtttcagattcgaacaccgtgcagtcccagttcttgataagaccgtccctgaagacaatcaagattccaaatgggaagagtttgagttccaagttcgactttctcatcttctgtttacgtcttccaacaaactcaacgttctctccagcaaaatctcacctcataacctgcgagatgctaaaaaactcgctagcaaaacaaatcatctcttaaacagttgggcttatctagtcaagtccatccaggggaataaggtatcgtttgatcaagcgaaagatcatctcttcgagctttctctgaagaacaggcttaaggaatggcttatggagaaagtgcttgaaggtcgcaacacattggattatgattctaaaggcctcggcgtgatccacctctgtgccagtcttggatacacttggtcagtccagctgttctcattgtcaggcttatcgttgaatttccgtgataaacaagggtggactgctcttcattgggcagcatactacggaagggagaaaatggtggctgctcttctctctgctggggcaagaccgaacctggtgacagactcgacgaaggataatcttggtggatgcatggcagctgatttggcacagcaaaacggatatgacggtttagctgcttatcttgctgagaaatgtttggttgctcagtttagagacatgaaaattgctggaaacatcactggcgatctggaggcttgcaaggcagagatgttgaaccaaggcactctaccggaagatgagcagagtctcaaggatgctcttgcagcatacagaacagctgcagaagcagcggctcggattcaaggtgcgtttagggaaaaagcgctaaaggcagcacggtcaagcgtgattcagtttgctaacaaagaagaagaggccaagagcataatcgcggcgatgaagattcagaatgcgttccggaaatatgatacacgtaggaagatagaagccgcttaccggattcaatgcaggttccaaacttggaaaatacgaagagagtatctgaacatgcggcgccaagcaattaggatccaggctgctttcaggggattacaagcaaggaggcagtacaagaagatattgtggtcggtaggagtattggagaaggcagttttgaggtggagacaaaagagaaaagggtttagaggactccaggttgcagcagaggaggattctcctggtgaggcacaggaagatttctacaagacaagccagagacaagcagaggagaggctcgagagatctgtagtgcgagtacaagccatgttcaggtctaagaaggctcaacaggattacagaaggatgaaactcactcatgaagaagctcagtcttgttatggtgtgacacagttggagtacggttgcctggaagatatttga

SEQ ID NO: 1494 - DNA, 1311 bp, Arabidopsis thaliana
  Clone ID: AT_F14L17.C1.o24.tg
atggatccgagactacaacatgctgctgaaaccggaagcatcaatgacttttatgctctgattgaggagaatccttacattcttgataacatcaatgccgtgccatttgttaacactccgctccatgtagctgcagcttctgacaacattccatttgccatggagatgctgaatcttaagccatcgtttgccagaaagctgaacacaagtggctacagtccattgcatcttgctgtggaaaaagatcatagagagtttataacatggctgctttggcgtgatcccggacttgttcgcgttaaagggagagaaggaatcacacctttccatctcttagcgattagaggagacgtaaatcttgtagcagagtgtctcaagtattgccctgtatgtattcaagatgtgagtgtgaatggccataacgctcttcaccttgctgtgatgaatgatagatttgaaattcttcaagtcctcaccggttggctccaaagaatgagccaaaaagattctgcttccaccgaatctgatttcttgaatagaaaagatttagcacacaacacgcctttgcatcttgcagcatataaggaagatcatcaggcggtaaaactgctgctacagtgtcagctggtgaaactgaacgaagtaaatgcggatggtttaacattccttgatatcttaagaaacaatggacagagtagagacttggataaggatttggaacaagttgttgtaaaaaccgggtgcaaggaggcggcttctcttccgcaactcgagaaaccgtctgatcagtttaagtcaccagtcactttcttggctcattgctccattggcatcagacgcctaaggtccgacacttcagaagaaggccgtgcagtcttcttgattatatgtactttgatactcacatccacttatcaaactgcactccagcctccaggaggtgtacaccagtccgagggtggtggtaccgcagtaatgaaacagacattcttcatcgtcctttgggtttctaacactataggcttctgttgcgctctactctacacgttttgtctcctaccaatcggtagcttgtttacaacatggttcttttggattggagcgtctctgggagtttcttatgcgcttgctatggctataatctcacccaaccctctattgtttctttgtgcggcctttaccttgtacctgctctttcctatgtatctctttatggaaattttcatagccctgaggctgagccatctgaaggctgcagtaaatcgaatgtttgttacatttgtgaaacagagagggactttgagaatctaa

SEQ ID NO: 1495 - DNA, 1725 bp, Arabidopsis thaliana
  Clone ID: AT_F24B22.C1.o30.tg
atgggaatcttggataaaggcaaacagcttcaccaagaagacgtaatagtggaagtaggagagccaagtgggtcatctccaaatgaagatcctagttcactgcccaatgttgaggatcatacttcagaagatgttacaaaaccacatagccggaatttaatgtataaagctgttctgacaggagattggaaaacagccagcactttaatatcgagaaaagagtgtaatgtcgtggagcaaattactggtaattctgagattgctcttcacatagctgttgcagcaaagcacaaggattttgtgagaaatctactcagagaaatggatccccctgacttgtcactgaaaaacaaagacggcaacacacccttgtcttttgctgccgcgttgggagacattgagactgctgagatgttaataaacatgatccgagatcttccggatatttcgaacgagaaaacaatgacaccaatccacatcgccgctttgtacggccatggagaaatggttcaatatcttttctccaaaacaagcatcaaagatctcaatgatcagcaatatctgaatctctttcataccatgatatcagctgatatttatggtgtatttgcagatgtacctctgtggatgttggaaagagtggatttgtatagaaaagaactagccctttatccaaatagtaacaaagccttgcacttgttggctcgcaagacttctgccatttcccataaaagccagcttaacttgtttcagcaagtagcaagttcttggctactctttgatgctgcggaattgggaaatgttgagattttagttattcttattcgttctcatctagatctgctatggatagttgataataataaccgaactttattccatgttgctgctttatatcgtcatgaaaatatcttcagcctaatctatgaacttggaggcatcaaggatttgatagcatcttataaagaaaaacaatctaaagatactttgttgcatcttgtggcacggttaccacctatgaatcgtcaacaagttggatcaggagcagcacttcatatgcaaaaagagctcctttggttcaaggctgttaaagaaatagttcctcgttcatacatcgaaaccaaaaacactaagggcgaactagcgcatgatatattcacggaacaacacgaaaacttacgcaaagaaggagagagatggatgaaagaaaccgcgacagcatgtatgctcggagcaacgctgatagcaactgtggtctttgcagcagccattactataccaggtggaaatgatgattcaggtgacaaagcaaatacgttgggcttcccaaattttagaaagagattattgttcgatatatttaccttatcagattcggttgccctcttctcatcgatgatgtctatcgtgatatttttatcgatcttcacttctcggtacgcagaagaggattttcgttatgatttaccaacaaagcttatgttcggactttcggcattgtttatctcgatcatctctatgattcttgccttcaccttctcgatgatcttgatccgtgttgaaaaagcttccttgagcttagtcctcatctcttgccttgcttctctcacggctctcacgtttgcttacttgtattttcacctttggtttaacactctacgctcagtctatatttctatgtttctcttccttggacgtaaaagaggtatccgtatcttcgtctaa

SEQ ID NO: 1496 - DNA, 2331 bp, Arabidopsis thaliana
  Clone ID: AT_F23C21.C1.o2.tg
atggcgggttttatcaatcttgaggattccccaatgtttcaaaaacaggtcttctccttggaagggacaagtgatgagcttaaagatcgttgtcagaagttatacaaaggtgttaagaagttcatgggagctttaggagaggcatctactggagttagtgcctttgcagattctcttgaagagtttggtgctggacatgatgatccagtcagtgtttcaattggaggtccagtaatatctaagttcataaatacacttcgagagctctcctcttataaggagtttcttcgctcacaggtggagcatgtattacttgagaggctgacaaactttatgactgttgatctacaagaagcaaaggagtctcggcgtcggttcgataaagctgtccattcttatgatcaggcacgcgaaaagtttgtgtcgctaaagaagaataccagaggagacattgttgctgagttggaagaggatttggagaactcgaagtcagcatttgagaaaagtcgtttcaatctagtaaattcactgatgaccattgaagcaaaaaagaagtacgagttcttggaatctataagtgcaattatggattcccatttcaaatattttaagcttggttatgatctattaagtcaattggagccttacatccatcaggtattgacatacgcacaacagtcaaaagaacagtctaagattgaacaagatcgatttgcacaacgcattcaagaattcaggactcaatctgaattagacagccaacaggcctctgctaaagcagatccctccgatgttggtggaaaccatgtttatagagctatcccccgtaaaaacgtagaagcaaactcagtttcaacagcagacaaggaagtaactaaacaagggtatctattaaagcgatcagctagtttgagagctgattggaaaaggagattctttgtgcttgacaaccatggatccctatactattacagaaacaccggtaataaatcagcgaaatctcagcattactacagtggtttaggagagcatagtagcggcgtctttgggagatttcgtacaagacacaatcgatcagcttcacagggaagcctagattgcaatatgatcgatctccgtacttcactgataaaattggacgcagaggacacagatcttcgactctgttttagaattatatctcctcaaaagacttacacactacaggctgaaaatggagctgataggatggattgggtaaataagatcacagcagctataacaatacgtctgaattctcattttctgcagcagtcaccagcaagatacttggataaaaagaatactagttctggtcctgccactgaaaacctcaccctgaatcaaaaagaagattataatcaaagactaaatgtgggggatgacgtccttacaatactcagagaaattcctggaaataacacttgtgcagaatgcaatgcacctgaccccgattgggcatcattgaatcttggagttttgatgtgcattgaatgctctggtgttcacaggaatctcggcgttcatatatccaaggtgagatcgctcacattggatgtgaaagtatgggagcctacaatcttggacttatttcggaacttaggcaacggatactgtaattcagtctgggaggagctacttcatcaccttgacgatgacagtgaaaagggatcgacagacacacttgcatcagtttcgaaaccatcttcagaagattggtttactctgaaggagaaatatattaacggaaagtacctggagaaagcactagttgtcaaagatgaaagagaagcaaattctactgcctcaagtagaatatgggaagcggttcaaagcaggaacataagagacatctaccgactcattgtaaaagcagatgcaaatatcatcaataccaagttcgatgatattactgaccttgatgtatatcaccaccaccatgttgatgcaccagatgaagtaaagaaaaggcacgatccaaatgcgtgtcagagaatcaagaattcgaacgaagcaagaaactgtcttcaaggctgctcattgttgcatgtggcgtgtcaaagcggtgacccaatcttgcttgaactgctgttgcagttcggggctgacataaacatgagagattaccacggacgaactccattacaccattgcatcgcatcagggaacaacgcatttgcaaaggttttgctgagaagaggtgctcgtccatcaatagaggatggtggaggattaagtgtgttggaaagggcaatggagatgggagccataaccgatgaagagctcttccttctattagcagagtgtcagtaa

SEQ ID NO: 1497 - DNA, 981 bp, Arabidopsis thaliana
  Clone ID: AT_K14B20.C1.o3.tg
atggaagaagcagatcagttatgtttagctgctaaatccggcgacttgaaaaaggttcaaactttaatttactccggcgccgacgttactcactttgataacgacggtttaacgccgttaatgcacgccgctaaaatcggaaacgcagagatagtaacggcgttactcgaatccggagctccatggaacgcattatctccatcaaatctctcagcaggagatttcgccatggaagcaggacatcaagaaactttcgatcttcttctcaaaaccgggatccaatcagagctaatcttaggaacaatcgcaagaaaccaaacaaagaacgaatattctaatcaagaatatcttcaagacagagttagtttcagtgaagacaagttaatggatagtgaaagcaaaggtgtgatgatggcttgggaaaaaccattaatggaagctcacgctaaagctatttgtctcaacggtggtcacattcttaacgttggtttcggtatgggacttgtcgatacagcgattcaacgatacaatccggttaaacacacgatcattgaagctcatcctgaagtttataagcgtatgattgaatctggttggggagagaaagagaatgtgaagattgtttttggaagatggcaagatgttcttgataagcttgatgataattcttttgatgggatcttttttgatacttatggtgagtattatgaagatttaagagagtttcatcagcatcttccgaggctgttgaagcctgatggtgtttattcgtatttcaatgggttttgtggaagcaacgcgttttttcatgttgtgtattgcaatttggtgactttggagattgagaatttagggtttagcactcagttgattccattgccggttaaggattgtcttggggatgaagtttgggaaggtgtcaagcaaaagtattggcagcttgatacttattatctccctgtttgtcagtttagtgactga

SEQ ID NO: 1498 - DNA, 1776 bp, Arabidopsis thaliana
  Clone ID: AT_T32N4.C1.o3.tg
atggcacaaggaagtgatataaacggactaacttgtagtctctttcccctgattgtgatggacagttctgaagcacatctagatagaattgaggcacagaggtcaacggatgtgtctcatgaccaacagaaaaaaagatacttcccaatgaatctgataaacaaagtcgcaagcaaactctgttcacgaggaggagatggcgccacgccacctatgggagacaatgaatctgggctagagttcctcaacaacctcaaattatcggatcttttccatctcccgggtgaaaatgtccagatgaatacggaagtttttagcggactgagtgatggggacaaagagtgtctggagatgttgaaaggcgttggaacgccaatggcatgtctcaagagcgatagaggagattcagttcttcatcttgctgctagatggggtcatctagaactagtgaagaacattatctctgaatgcccatgccttgtattggagttaaacttcaaggatcagcttccgcttcatgtggcagctcatgccggtcattcggctattgttgaggctcttgttgcgtcggtaacatttttttcagatagactggctgaagaagatagagagagactaaatccatatgttctcagagacaaatatggaaatactgctctgcacttggccattgaaggacgctatatggagatggctgcctctctggtgaacgagaaccagaatgcttcttttcttgaaaataatgagggaatatcttccttgtacatggcagtagaagctggagatgtgactcttgtgaaagaaattttgaaaaccgcaggtaacaatgaccttgaagggaggaactctaacttagattcaaagttggaagggagaaaacatcttgtacatgttgctttgaatgccagaagtataggtgtccttgatgttattcttaacgaatatccaagtcttgaggacgagcgagatgaagaaggaaggacttgtctatcctttgcagcatccatagggttttataaaggagtatgcaacctgttagaccgatcaacaaagaatgtttatgtctgtgacgaagatggttcttttccaatacatacggctgcagagaacggccatatcagaattgtcaaagagattctaaaacgttgtccacattcaaaacacatgctcaacaaacttggccagaacgttctccacattgcagcaaagattggggaacataatcttgtaaaatcgttgatgcgaagtgatgatacaaaacatttgggtgttggtcaagatgtggatggtaatacacctttgcaccttgctgtcctaaattggcgctaccgatcaattagaacgctagcttcggatgtaaagatactgcaactacgaaacgataacggcttaacagctaggggtattgccgagtcagtgctgaaacccaactacatctttcatgagaggttgacactggcattcttattagacgctcacgcgtttaggggttgtggatctgttaagtcgttaacaaaaccatcagaaccactagaccatgaaaagagcagagattacgtcaacactcttctactggtagcagcacttgtagccacaatgacgtttgctgcaggttttacaataccaggtggctttaatagctctgctccacacttaggaagagcaactttgaccactgacccaaatctcttcttttttctgctatttgacatattggcaatgcaaacatcagttgcatcaatatgtactcttatatatatgggcgcagttgggtga

SEQ ID NO: 1499 - DNA, 1875 bp, Arabidopsis thaliana
  Clone ID: AT_F25C20.C1.o11.tg
atggcaaggtcttcgccggcaaatattccggccactactatagatgattatgctcacagtcccgtccactacgccgtcgttgtaggagatcacgccggtttgactcgtctggtttcgtctttgcctaaactaaccgacccggaacaaatccacaccgagtccgactcaatgagccaagagcgagtcgcggagaaaatctccaccgtcatcgaccgccgtgacgttccctttggagagacgcctctccatttagccgtacgtctcggcgacgttttcgcggcaaagactatatcttccgccggtgctgatatcacgctccaaaacgccgccgggtggaactccttgcatgaggctttgtgtcgtcggaactcagagatcacggaggcaattctccgggaccatcaccgttcggcgtggtgcaaatggagacggagacttcctcatctcatcgccgtactcagccgcatgagagatttctacatggagatatcatttcacttcgagagctccgtgattccattcgtcggaaaaatcgctccttccgatacttacaagatatggaaacgcggtggagatttacgcgccgatacttcattagccggattcgacggtttcaagatacgccgcgccaatcagagctttctctttcttagtgatggagatgagtttcttgatgtgtctcctggtacgttgcttgtgttaaacagagacgataaaacgatcttgaacgctttcgaaaacgctaaagatccgattagcgatagcgatatagctggcttttgtggtcaatctagcttgtaccgtccggggatggatgttactaaagcaaagctcgttgagattacgaattggcgacggcaagcgaagattgaaactgtcggagagtggaaagctaaagcttacgatgtcgaaaacgttagttttagttttaaatcaagaaaagtcggaaaagagcagggtttgcgtttggacgagactcgtcggagtgtgtcagaaccgttacggccgcagaggcgggagcagaggaggagatcggtttctttaccggaagcggcgattctggtggcgaattcttctgtggggcggatcaaagaaaaggagattgtgaagagtttgcgtccttcggtttggttaacggatcagtttcctttgaaaacagaggagttgcttccgttgcttgatattttagccaaccatgtcaaggctgttcggagaatgcgagagctgcttaccaccaagttcccggcgggaacttttccggtcaagttgtccataccggtgatcccaacagtaaaagtagtcatgacattcagcaagttcgtggctcttccaccgttggatgaattctacacaccgctctcaagtccaaaacatctattagctgcaatggaagaccaacatgacgtgcacgatgatgaaaaattagatagaagaatctcaagttcacgtccatcgttttcaacgccttcttggttgagactgaacatcaatgccaccggcaagagctcacggcggcgtttggtggatgaggaacaagtggtggatccattcacgataccaacagggtataagtggactagtaactcagataattcagtctttaccaagaagagctccaagaatcagaggtacataagatattgggatcattataaaatggcgagtgaagcacctagttgggcggatcaatgggggaccggaggaattggggtgatggctgcggaggagacaactgacggcaaaaaagacgtcaccgggaaaaagtccggcaagaccaaagcagggattaacaaagccaagattgttgtatttattggtgtcaattggatgaagaatcttgtgcagaggaagaagaaggattctacttcttcatag

SEQ ID NO: 1500 - DNA, 1596 bp, Arabidopsis thaliana
  Clone ID: AT_T19D16.C1.o20.tg
atgtttcagggatatgacttgttgaatcaactggaaccatttatccatcagatattaacatatgctcagcaatcaaaagaacagtctaagattgaacaagatcgactagcaagacgcattcaagaattcaggacccagtctgaattagacagccaacagctggtcgctaatgcagagtcgtctggtgctaacgggaaccgtgttggtgggaatatcccttacaaaaataccgaaacaagtttaacagcagacaaggaaggatctcatcatcactatagtggatcatctgaccataatactggagtttttggtcgatttcgggcaagacataatcgatcaggttcgctcactgagggcagcttaggctataatactattgatcttcgcacttctttgataaaactagacgcagaagacatggatcttcgtctctgtttcagaattatttctcctcaaaaaacttacacacttcaggctgaaaatggagcagataggatggactgggtaaataagatcacaaaagctatagggacgcttctcaattctcattttctgcaacagtcacctgtgcgatacttggataaagacaactccagttctgctcctgctaatgctgtcgtctccggggatcaaattcgacataatgattcaagacaaaatatcggggatgatgtctcaacaatactcagaggacttccgggaaataatgcatgtgcagagtgcaatgctcctgagcccgattgggcatcgttaaatcttggagttttgttgtgcattcaatgctctggtgttcacaggaatctcggggttcatatatccaaggtgaggtccctctcattagatgtgaaagtgtgggagccaacgatcttggacttatttagaaatttgggtaatgtatactgtaattcactgtgggagggactacttcaccttgacgatgactgcgaagacggatcagcattgtcgcatgcttcagtttcaaaaccatgtccagaagattcctttagtgtgaaggagaaatacattctaggaaagtacctggagaaagcattagtcatcaaggatgaaagtgaagcaaacctttctgctgcgagtagaatatgggaagctgttcaaagcagaaacatacgagaaatctatcgacttatagttactactggggatgtaaatatcatcaataccaagtttgatgatataactgatatcgatgcatatcaccatattgatgcagcagagaaagcagtaaagaaaagacatgatccaactgtatgtcagagaattaaagaatccaacgaaccaagaagctgtcttcaaggatgctccttgctccatgtggcttgtcacattggtgactctgtcttgcttgaattgttgttgcagtttggtgctgacctaaacataagagattatcacggaaggactccgttgcaccattgcatatcatcagggaaccacaaatttgcaaagattctactgcgaagaggagcacgtccgtcgatagaggacgatggagggctaagcgttctagaaagagcgatggaaatgggagcgataactgatgaagagctctttcttctcttagccgagtgcgcataa

SEQ ID NO: 1501 - DNA, 2289 bp, Arabidopsis thaliana
  Clone ID: AT_MLD15.C1.o5.tg
atggagaaatttgtattatcatatttaccattggttccttatcggtattatgcaagaaatagagggaatctgagtttcgatttcactgagatgttcgactcctactctctttatcccaccggaaaactatctccggtggttgattcgtacgtcaccgccgagctcgacggcgaagatatgagagacgactacgcgtttttagagtccggtttaaaagacaacaaatctcagtttatctcttacgcaaaacgcatcttagtcggagaagacgctgaatcagagagaatcgaagatttaaagcttcttaccgcttgttgcagttacgattccatcaactgtgcttcgtcaatcatcaacggcgacgttggatcggttccatatatcaacgatatttgttccgatacaggactctcgctgttgcacacagcggctgagtctcacgcgccactgtgtgttgagatgcttctgaaacgacgcgctcgtactgatatgagaagcaaagacgaacgcgctttgattcctctggagctttctctctccaatgtcagactgatcgttttgcttggtgacaaggacttgacggttgtgaaactactcgctgagaagacaaaggaagtggacgttgtggcttatgcatatgccaaggctggtgagatagtttcgttgactgcattgttgattgtagcaagtgggaagatcagagaggcaactgtggcattacgggatgatgatgatgatgattctgtggcaaaacgggagagaaagacgatctatgaggcagttattcaagaggcgttgcgtagtaacagcttgacgcaaagtgtatgcagtgagaaaagaatggttctgcttagagagattgagcttcttcagctctttggtgctgcagtttttagtgaatctgtggataagcaaacttcaccacttatctccattgtgcaggcaggagatgaagctgttcttgagctgtttataaacaccaacttcgatgtcaacgagaaaaatatagaagggaatactgttcttcaatgtagcctgaaaggatcgtctgtgccacataaccagcaaaccagaatcatgaacctacttattgcacacggtgctcgagttaaccaaaagaacaagttgggtttatctgcagttcactttgctgctgcaaatggcaatttatctacacttgagattctactagcggccaaccctgacttggttaacatgaagacggtaatcaaagagacgccactattcttcgctgtgaagaataatcatcttgactgcgtggagcttcttcttcgatgtggtgcaattacggagattcataacctacgcaaagaaacagaacttgcacagtcacaaagtgcagcagtttcaccaaatgcaagtgatgaggaaactcttggatttctcggagattctgttccaacatggctcaaaacatttgtaacctggcttcctctgtacctccgagatacatcagcgaactggaaaggggctggatatcccctgtcatccttcaaagccgattttcgtgctgtttttggaatggatctcgatcacacctctcttgatttccctaagcacatcgactttgtcaaatactttccaagactctgtcaaatgaaagtcgtccccataggtaaacttggagctgcaacacactgggtcatgctacccaccaaatctaagtgttctcagctcaaagaaagacctcctgagccactcattatcactaagaatgactctgttgcttctcccagcaaaccaaaagccttatcagttcctccagattttaaattcatacaagaagcacatgactctaaaaccttcaaagcttcaccacaaccaaaagctcaacctcctcctcccttaacagcatcgtacaacaacaaccaacgtcaactaaaacacccggttcttgagacacttacaaagatcagaaacagcacttctgtcttctttctccgtgagtttgacttttatcaaagctatgagacatgtttaaaggaaggcatgtgtttctggtgcaacaagaacatgattcgatgggcaaacttcccttgcagacacaaactttggtgcagctcttgtaaacaacagattactcaatctacttcaggagagaagatccttgaggaagaccatcataagtgtgtggtctgtgatgcaaaagtggaacgtttcgtcttgtctccaccgtttgaatccggtcaccataggattttaagtgatcgccctaacaacgccgaattagccacttctttccttcagttcctcagcataaggaagtaa

SEQ ID NO: 1502 - DNA, 3129 bp, Arabidopsis thaliana
  Clone ID: AT_T26C19.C1.o4.tg
atgttggacaaatactctcagaagcacgacatcgatggcttcgtcctcctgaaatctgtgaaattttacagaattaccaaagatttcaaatttctactgagccacctactacaccatcaagtacagctaaagtttttcataaacattcagtgtagaatggaacttaaaagttctaagactgatgttcatggtgggtctgtttttatgtttgatcgaaaggtgctcagatacttcaggaaagacggtcacaattggaggaagaaaaaagatggaaagactgtgaaggaagctcatgagaggttgaaggcgggaagcgttgatgttctacattgttactatgcgcatggacaggacaatgaaaactttcaaagacgcagttactggttgcttcaggaagaactttcccacatagtttttgttcactacctcgaagttaagggtagtagagtttctacttcttttaaccggatgcaaaggactgaagacgcggctcggtctcctcaagaaactggggacgccttgaccagtgaacatgatggttatgcttcttgcagcttcaatcaaaatgatcatagcaatcattcacaaactactgactcagcaagtgtcaatggttttcactctccagaacttgaagatgctgaatcagcatacaatcagcatggaagttccacagcttactctcatcaagaacttcagcagcctgcaacaggaggaaaccttactggttttgatccttactatcaaatctctttgacgcccagggatagttatcaaaaagagcttcgcacaatccccgtaactgattcttcaattatggtagacaaaagcaaaactatcaacagtcctggagtaacaaatgggttaaaaaacagaaaatccattgattcccaaacctgggaagagattctgggaaattgtggttctggagttgaagccttacctttgcagcctaacagtgagcatgaagtgctggaccaaatactcgaaagctcttttacaatgcaagattttgctagtctacaagagtccatggtcaaaagccagaatcaggagttaaattcaggacttacatctgatcgtaccgtgtggttccaaggacaagatatggagctaaatgctataagcaatctagcttcgaatgaaaaagctccatatctatctacgatgaaacaacatctgttacacggtgcattgggcgaagaaggtctgaaaaagatggacagtttcaatcgctggatgagcaaagaacttggagatgttggtgttatagctgatgcaaacgagtcctttactcaatcaagttcaagaacctactgggaagaagttgagagtgaggatgggtccaatggtcacaactctaggagggacatggatggatatgttatgagtccttccctctcaaaggaacagctctttagcatcaatgacttctctccaagctgggcttatgtgggttgtgaagtggtggtttttgtcactggaaaattcttaaagactcgggaggagactgaaattggcgagtggtcttgcatgtttgggcaaacagaagttccagcagatgttatatctaatggtattctccaatgtgttgctcctatgcatgaggctggaagagttcccttttatgtaacatgttccaacagattggcatgcagtgaagtgcgtgaattcgagtataaggttgccgagtctcaagtttttgatagagaagcagatgatgagtctactattgacattcttgaggcaagatttgttaaactgttgtgctcgaaatctgaaaatacaagccctgtttctgggaatgacagtgatttgtcacaattgagcgagaagattagtttactacttttcgagaacgatgaccagttggatcagatgctcatgaatgaaatctcccaagaaaatatgaaaaacaaccttttgcaggaatttctgaaagaaagcttacactcatggcttttacaaaagatagcagaaggtggaaaaggtccaagtgttttggatgaaggtggccaaggtgtattacattttgcagcttctcttggttacaactgggccttagaaccaacaataatcgctggtgtaagcgttgattttcgcgatgtaaatggttggaccgcacttcattgggcagctttctttggcagggagaggataattggttcactcatagctcttggtgctgctcctggaactttaactgacccaaatccagatttcccatcaggaagcacaccttctgatctagcctatgctaatggtcacaaaggaattgctggttatctctcagaatatgccttaagagctcatgtttctttgctcagtctaaatgataaaaatgccgaaactgttgagatggctcctagcccatccagctcatcattgacagactcgttgacagctgtacgtaacgctactcaggcagcagctcggattcatcaggttttcagggctcagtctttccagaagaagcaactaaaagaatttggagataaaaagcttggaatgtcggaggagcgtgctctttcgatgcttgctcctaaaacacacaaatcaggaagggcacatagtgatgattccgtgcaagccgctgctattcggattcagaacaagttccgaggttacaagggaagaaaagactatttgattaccagacaaagaatcatcaaaatacaggctcatgtgagaggttatcagtttaggaaaaactacagaaagataatttggtcagtgggggtattagagaaggtgatattacgttggagacggaaaggagctggtttgcgcgggtttaagtcagaagcacttgttgagaagatgcaagacggaacagagaaagaagaagatgatgattttttcaaacaaggaagaaagcaaacagaggataggctacaaaaagctcttgcaagagtgaaatccatggttcaatatcctgaagctagagatcaataccgtagattgctaaatgttgtcaacgacatccaagaaagcaaggttgaaaaagctcttgaaaattcagaagcaacttgttttgatgatgatgatgatctgatagatattgaagcattgttggaagatgatgacacattgatgttgcctatgtcctcatctttgtggaccagttaa

SEQ ID NO: 1503 - DNA, 1761 bp, Arabidopsis thaliana
  Clone ID: AT_F27K19.C1.o160.tg
atggaaaaagatagtattatgtgcagtggaccaaagagcaatctctgctcttcaagaaccttaacagaaatcgaatcaaggcaaaaggaagaagaaacaatgcttctcctcgaattcgctgcttgtgatgatcttgactcgttcaagagagaggttgaagagaaagggcttgatttggatgagtcagggttatggtattgcagacgtgtcggttctaagaagatgggtcttgaagaaagaacacctttaatggttgcagctatgtatggaagcataaaggttttgactttcatcgtttccactggaaaatctgatgtgaacagagcttgtggtgaagagagagttactccgcttcactgtgctgttgctggctgttctgtgaatatgattgaagtcatcaatgtcttgcttgatgcttctgctttggttaactctgttgatgctaatgggaatcaacctttggatgtgtttgttcgagtttcgaggtttgtggctagtccgaggaggaaagcggttgagttgttgctgagaggaggaggtgttggaggattgatcgatgaggcggttgaagaagagatcaagattgtctctaagtatccagctgatgcttctttaccggatataaacgaaggggtttatggaagtgatgagtttaggatgtatagctttaaggttaagccatgttctagggcttattctcatgattggaccgagtgtgcttttgttcatccgggagaaaatgcgaggaggagagatccgaggaagtatccttacacttgtgtcccctgtcccgagttccgtaaaggatcatgcccgaaaggagattcttgcgagtatgctcacggggttttcgagtcgtggcttcaccccgcgcagtataaaacccggctttgtaaagatgaaacgggttgtgcaaggaaagtttgtttctttgctcataaacgcgaagagatgagacctgttaatgcttcaactggctctgccgtggctcagtctccgtttagcagcttggagatgatgccagggttgtctcctcttgcttattcttcaggagtttcgactcctccggtttctccaatggctaatggtgttccttcctctccaagaaacggcggatcatggcagaacagagtcaatacccttactccaccggctttgcagctcaatggtggaagcagattgaagtccacactgagcgctagagatatcgatatggagatggagatggaattgagactccgcggttttggcaacaatgtggaagagacgttcgggtcttatgtttcctctccaagtaggaattctcaaatgggtcaaaacatgaaccaacattatccatcttccccggtgagacaaccgccatctcaacacgggttcgaatcttcagcagctgcagcggttgcagtgatgaaagcgagatcaaccgcctttgcgaaacgtagcttgagcttcaaaccagctactcaagcagcaccacagtcgaatctctcggattggggatctccaaacgggaagctggaatggggaatgaaaggagaagagctgaataagatgagaagaagtgtttcctttggaatccatggaaacaacaacaataacgcagctagagactacagggacgagccagatgtgtcatgggttaactctttagttaaagacagtactgtggtgtctgagagaagctttggaatgaatgagagggttcggataatgtcgtgggctgagcaaatgtacagagagaaggagcagactgtggtgtaa

SEQ ID NO: 1504 - DNA, 1317 bp, Arabidopsis thaliana
  Clone ID: AT_F7A19.C1.o9.tg
atgagctccgattcaccggcggctggagacggtggcgaacaagccgctgcgggaacaagcgtgccttcaccttcatacgacaaacaaaaggagaaggcacgtgtgagtagaacatctctgatactatggcacgcgcaccaaaacgacgcagctgcagttcggaaactcttggaggaagatccgactttggttcacgctagagactatgacaaacgaacgcctctccacgtggcgtcgcttcatggatggatcgatgttgttaaatgtctgcttgagtttggtgctgatgtcaatgctcaggataggtggaagaacacgccactggctgatgcagaaggagctaggaagcagaaaatgattgaactgctgaaatctcatggtggtttgtcttatggtcaaaacggaagtcactttgaaccaaagcctgtgccaccaccaattccaaagaaatgtgactgggaaattgaacctgctgagctggatttttcaaatgctgcaatgattggaaagggttcatttggtgagattgtgaaagcctattggagaggaacaccggtagctgtgaaacgtattcttccttctctttcagatgatagactggttattcaggacttcaggcatgaggttgatttgctagttaagcttcgccatccaaatatagtccaattcttaggagcggtaaccgaaagaaagccccttatgttaatcactgagtacttacgcgggggagatcttcatcaatacctcaaggagaagggcggtcttactccaacaactgctgtcaactttgctttggatatcgcgagaggaatgacatatcttcacaatgaacctaatgttatcattcaccgagatcttaaaccaaggaacgttcttctggttaattctagtgcagaccacttgaaagttggagactttggacttagtaagctcataaaagttcaaaactctcatgatgtctacaaaatgactggagaaacaggaagctatcgttatatggctcctgaagtattcaagcatagaagatatgacaagaaagtcgatgtcttctcctttgcaatgatactttacgagatgcttgaaggagagccaccatttgcgaaccatgagccatatgaagcagccaaacatgtatctgatggacatagacctacattccgttccaaaggatgcacaccagatctaagagagttaattgtgaaatgctgggacgcagacatgaaccagagaccgtcgtttctggacattctcaagagacttgaaaagatcaaggaaactctaccatcagatcaccattggggcttattcacttcataa

SEQ ID NO: 1505 - DNA, 1764 bp, Arabidopsis thaliana
  Clone ID: AT_F9H3.C1.o12.tg
atgggtaaggttcaagagtttgaaaaggttatggaggagaatgaaattcctgttcttgatcaggtcacttttcaggggaatacgattctgcatcttgcagctatttatggtcatgaccacctagtgcggcgtatccttgcctatgagctaaacattcttagaaattggaaacgtggcttaaattgcaacttcgtcccaagtttctctcattatcagactcttttggtgagacgaaactacaagggagaccttgctctccatgtagcagctgctgcaggacacaagttgatagttggccttcttattgattgcctaaggcagcttccgcaagatataactatggtgattggatcagagcaaatggtaattggaaacattttcagagtttccaacaatgatgggaatactgcattgcacctctccctgaaaggaaaccatgtatctgtttctttgcaacttgttcgtgaagatcgtagcacttgctttcttctggacaaggaggatgtatctccactgtatatggcagctgaagctggatatgtttcacttgtggagcatatgttacggggtttggatgcaagctttgttgggaaatccgttttgtgtgctgcagtgaaaagccagaatcttgatatattgacagctgtattagagagtgactcagatctggtagaatcgagggatgaagatggaagaactccacttgccactgcagcatccattggttatgacattggagtgcagcatatgctaaccagatttgcaagttctacacagggtcaaaacgttcttcatgtcgctgctaaaagcgggaatgcacgagctgttggctatctgctcagaaaatctgacgtcaaaaggttaatcaatgaacaagacatagaaggaaacacaccgttacatttagccagcagtaattctcatcccaaggtttggttgatatggatggcattggtggctgctggtaccactagagctccacgagttcatctgagagcagacatccctggtctgacaacagatgaggacttaatcctaaaaattcacaaggatagagtaaacactctccttgtggtggcaacactagtggctacaatggcttttgctgcaggcttgagtgtgccactaggttacaacagcacagagttcaagtcaaatgtcaaacattcttacgaagaatctgcatttcatgcttttgtcatctgcaatagcattgccgtatatactgctgttatatcgacagttgctcttatagggacacaattggctgacctaaaatgcatgctgaccaccttcaagtttattgtgccactcctggggttttctattatcgccatgtctttggcttttgttgcaggcttatacctggtcttgggacatcattattggcttgccatatttgtcttggcctcaggcggtttctatctcatggctctacttctgctcatcatcccttacgcttcgccttatacttttacactatcaagaagcctgaattctttagtacagaatatgtcgaaggaagatgttgattccgtaaatcaactagttcctgcaccaacagaagagttggcattgatcaaagccatccaagtcaatcgctgtatacaaggtaatattggggtaacatctttgtcatattacctgttgaaacacgtagctccaatcaatgttctactacatctaaagctgtggaaccattatagtttggttttttcaggtcacctctatgatggtcccaagaaaacatactcacaactttag

SEQ ID NO: 1506 - DNA, 525 bp, Arabidopsis thaliana
  Clone ID: AT_maf19.C1.o230.tg
atgctccaagaaccgtcggctgcattctccctccggcgtaactcattcagacgccgatctcccagatcaaatgtcgatgacagaggctggaatccgctccatatcaaagccagaaaaggcgatctgaaatctgtcaagcagcttctcgaccaaggaatggatgtgaatgctctagcatggggacccaaatcaaaaggagtgagtgcacttcaccttgcagcagagggaggtcacattgaagtcatggatttactcctagaacgtggggccaacattgatgctaaaacatggggctcatgcgggtggactcctctccacgctgcagccaaagagcggaagagagaagcagtgaagtttctggtggagaacggcgcattcttggcagatgatataactgataccaggtttaatccgccggtgcattactgtcacggccttgaatgggcgtacgaggaaatgaagaagcttaacagcgagtcttcttcttcatctggtggagacacatcttccagttctgacaactga

SEQ ID NO: 1507 - DNA, 1722 bp, Arabidopsis thaliana
  Clone ID: AT_F12G12.C1.o160.tg
atgatgatgcaagaaaaaagtcaccttaaatcactggagaagaagaagatggttgcaccaattatcgatgccatcctcgcaaacgacgtgtccactttactcgctctcgcagaggggaatctatcggtattgagggagagataccactgggattctctcggtgggacggttttgcatctagcgactgaacttgggcataaggaaattgtcgaggcgataattaagctttgtccttctctagtcggtgttaccaaccttgatggcgacactcctcttcattttgctgcacgctggggacatgcgaccattgtggctcagatattagcgtctggatatgctgagttcaccccggtcaacggacgaggagaaactgccttcgttgttgcttgccgctacactaaccccgatgtcgctagtcttatattggaagaaacaagttctatcacaatcggggaattttatgcaacgtttgttcttggagaatatacggatatcgcaaggagaatgctagagaggttcccaaaactagcttggaatgccgatggagaattgtcaaccccattgcatcatgcgtgcaacgccaacaacctcgagataacaaaaatgttgctagagattgatgaaagccttgcagagagggtcaacaaagatggtttcacacctttgcatttggcggccatgaaatgctcaattccaattctgaaggagttttcggataaggctccaagatatttcgacatactaacaccagcaaaagaaaccgtcttccatctagctgcggaacacaaaaatatactagcgttctatttcatggcagagagtcccgatagaaacaatcttctccaccaggtagatagatatggcaacactgtactacacactgcggtcatgtccagctgctattccgtgatagtcagcatcacttatgaaacaacaatagatctctctgccaaaaataatagaggtttgaaagcggttgatcttatcaacgtcgatgatgaagattatagtaaaatatcccggtggctcaggtttgatgcaaaacaaattcgaagccttagtgatcctaatcatcaacaagggaacaaaaacatgggagtattatctgagtataagaagatgcagatatttgaaacgccttcaaagagggaaagtaaaatgcatgcagaagcattgctgaacgcaaggaacacaatcacaatagttgcagttttgattgcctcggttgccttcacctgcggtataaatcctcctggtggtgtctatcaagaaggaccctacaaaggaaaatcaactgcgggaagaacgttggccttccaagtgttttctataagcaacaacatcgcattgttcacatccctttgcattgtaatccttcttgtcagcattataccttacaggacgagaccactcaagaacttcttaaaactaacacataggatactttgggtggctgtggcatccatggcactcgcttatgtttccgcagcttccataatcataccgcatgtcgaaggaaaaagatggttgttcacaactgttctttctatctctaccttgatgctcggaggtctgtttgcgtttatgacctataaagtcatcagacactggttgaagaagatgacatttaacccaatgatgattattatgtcagcgtttacttctatatccataggtgttgactggctagccgctggaagtgacggctattacttctactga

SEQ ID NO: 1508 - DNA, 1959 bp, Arabidopsis thaliana
  Clone ID: AT_K5F14.C1.o6.tg
atgaagattaataagcaaggacaaacagcattcatattagcatgcctcaacaatcacctcgatgctgcacttaccctcgtagaaaatatgcggtctatgacgatggtggaacttgatgcagcctttacaggacagcaaccagttatcatagataaaatgctggagaaattcccgagcctagttcttgatgtggatgaagagcagtcgacgctattgcataaagccgtgacacaaaggaacgaggaatatgcgacgaaggtaatcgacctctgcccatcactcgttagcgttactaacgtcgacggaaacactcctcttcatttagctgctgaaattggaaacataaatatcctctggaaaatgttggagaccggagaagcagagtgcatgaagattaataagcaaggacaaacagcattcatattagcatgcctcaacaataacgttaattctgccagaatccttgtagaaggaacgagttctatgacgatggtggaacttaatgcagccttttcagaacagcaacaagttatcatagattccatactagagaaattcccgaacctaattcttgatgctgatgaagagcagtcgacgctattgcataaagcgtgcaaatcaggaaaccttgagatggcaaggacactattagatgttgatgttaatcaagaaattgcagaaaaggtggataaagatggtttgacccctttgcatcgcgcggtgataaacggttcagttgaaatcctaaaggagtttctatgcaaggctccttcgtctttcaacataaccacacaaggaacaatcgaaacagttttccacttagctgcgaaataccaaaaaaccaaagcattcatcttcatggcccagagtgcaaacatacgccaacttctttacagcctcgacgcagaggacaacactgtacttcatgttgccgcctccgtagactccacttctctagtacgccacattctttcggaaacaacaattgatgtcaccttgaaaaacaagaaaggttttgcagccgttgacctaatcgacaaagagggtgtagactttcctctactctctctatggttccgggatgaagcagaaaaaattcaacgccctgcgaggtatgttaaatttgcacatgaacctgtagaactcatccgaaacacaaacaatggggagaagttaagttctgaaagtcgtgcgatggatttgctaagagaaggtagagatcctagaaacaaggaacgtgaaatgcattcagagagtctacagaacgcaaggaacactattactattgtcgctgtcttgattgcatcggttgctttcacatgcgggataaaccctcctggtggtgtccaccaagacggacccttcatcgggaaagcaaccgcagggagaacattggcttttaagatcttctcggtagcaaacaacattgctttgtttacatcactaagtatcgtcactcttctggtcagcattatatcctatagaacgaaagcactgaagatgtgtgtggtcatagcacataagatgatgtggttggccgtggcatccatggcaactgcttatgctgcatcggcatggatcactgtgccacataacgagggatctaaatggttagtctacaccacttctgctatcgctagcgttgcgctaggaagtatgtttgtgtatgtgtcatttatgatggttaaacacattttgaagaaggataaattgagacgtaaccagtctcacgggaaaaccccaagtacgaccttggacatggaagccgctgggaggcaggaggcttcacttacgaaattattggttatcactcatcggctgatgtgggtcgatgtagcagccatggaaagtgcttatttggcggcatcatcgatcactttaccacattttggagacgttatgctactctgctatcgctggcttgacgttaggcggtatgtttgtttaaatttcggttag

SEQ ID NO: 1509 - DNA, 1995 bp, Arabidopsis thaliana
  Clone ID: AT_F28J7.C1.o8.tg
atgcctccgacctactttcctctccgttgggagagcaccggcgatcagtggtggtacgctactcccattgattatgctgccgccaacagccagtacgacctagtccgtgagcttctccgaatcgactccaataacctcattaagctcacttccctccgcagaattcgccgcctcgaaaccgtctgggacgacgattcccagttccacgacgtcgccgcttgcagatcacgcgtcgccagaaaacttctcgccgcctgcgacgaaggcggctcgccgggatccaagaggaacactcttatccgctctgggtatggtggctggctgatttacacggcagcctctgccggagatctagcgtttgttcacgatctcctggagagaaatcccctgttagtgttcggcgaaggagagtacggcgtcactgatatactctacgcagctgccagaagtaaaaacgacgacgttttccgtctcatttatgattttgcggttactccgaggtttggaacaggtggcatcgagcagcaaaccggagagattccggcggcttacaaatgggagatgaagaacagagcggttcactctgcttcgagaggaggcaatctgatccttctcaaagaacttctctccgattgttctgttgaacatgtcttggccttccgagacaaacagggctccactatcctccactcagccgccggaaaaggaaaaactcaggtggttaaagagcttgtggcttcatcataccatttagttgacgccgtggacaaccaagggaacacggctttgcacgttgcagcttaccgtggccacgctgatcttgtggatgttctcatctcggcatctccatctttgatctccgccagaaacaacgccggagatactttccttcacgccggaatctccggtttccagactcctgcgttcgaaaggcttgacaagcatacggagctcatgaaccgtctgatcacttccgcagcctcgaaatcccaaggggattttgtaaattataggaacaatgagggacgcacggctcttcacttggccatctctgggaatgttcctctggagttcgttgagatgcttatgtctgtgaaatccattgatataaacatacgtgacaacgctggtatgactccgcttgatctgatcaggcagaagccgctgtctccaacgtctgatctcctgttccgacgactcgtatcagccggagggatgttcagttgtcgtgatcaaagcatcacaagtgtcgtcgcgtctcacttgaaggacagaggaaacttttacagccctggagctcgtttcaagacatcggacgctgagatgttcctaagcaccagacttgaagttgcgcctgaaaagattggtgttgttgtccctagacacgtgagatccagttcctgttgcattgagattggtcagctaaacgtgatggatgagaatcatcatctcaagaaatgcagaaacgcgtctgttaactctacaacagagagattgaagagcgttttccactggccgcgagtcaagaaacaacctggccattccaagaacaattctgatattagcatcatttcgacaacacttgagacgcaagaaactcctgtccctctccgtcagagattctcaaaaagcagcacttcttcccttgatccgcctaataacaataaaagaacgttggcggtaagaagtaaccagtctagtcccagagccaagaagaaacggtttgggtcggtgcggtcacggtcgagctcattctcgaaaatatccatccactcttcttccacttcttcgacttcgagcatggttgatcttaaacagaagggagtgctgattgatacgagcatagccggaccatctggattgaaacggtcagagccggtgaaaaataaggtaagcgagaagcagggttcggtgaggagtagattgaagagccattacttctgctttggtacttcagctttgtcagtgaaaacgccggctactgtcttggtataa

SEQ ID NO: 1510 - DNA, 1476 bp, Arabidopsis thaliana
  Clone ID: AT_F13H10.C1.o8.tg
atgagcaatcttgaagaatctttgagatctctatcgttggatttcctgaacctactaatcaacggtcaagctttctccgacgtgactttcagcgttgaaggtcgtttagtccacgctcaccgttgtatcctcgccgcacggagtcttttcttccgcaaattcttttgtgggacagactcaccacaacctgtcacaggtatagacccgacccaacatgggtccgtacccgctagcccaacaagaggctccacggccccagctggaattataccagtgaactcagtcggttatgaggtttttctgttgctacttcagtttctttatagcggacaagtctccatcgtgccgcagaaacacgagcctagacctaattgtggcgagagaggatgttggcacactcattgctcagccgccgttgatcttgctcttgatactctcgccgcctctcgttacttcggcgtcgagcagctcgcattgctcacccagaaacaattggcaagcatggtggagaaagcctctatcgaagatgtgatgaaagttttaatagcatcaagaaagcaagacatgcatcaattatggaccacctgctctcacttagttgctaaatcaggtctcccaccagagattcttgccaagcatctccctattgacgtcgtcaccaaaatagaagagcttcgtcttaaatcttctatagctcgccgttctctaatgcctcacaaccaccaccatgatctcagcgtggctcaagacctagaagatcaaaagattagaaggatgagacgagctttggattcatcagacgtggaactagtgaagctgatggtaatgggagaaggactcaatcttgatgagtcgttagcattgcattacgctgttgaaagctgtagtagagaagttgtgaaggctttgcttgagcttggagctgccgatgtgaattatccggcgggtccggcagggaaaacacctttgcacatcgcggctgagatggtctctccagacatggtggctgttctgttagaccaccatgctgatcctaatgtgaggacagttggtggaatcacgcctcttgatatccttagaacattaacttcggatttcttgttcaagggggcagttcctggattgactcacattgaaccgaataaacttaggctttgcctcgagcttgttcaatccgctgcaatggtgatatctcgagaagaaggaaacaatagcaacaaccaaaacaatgataacaataccgggatttaccctcatatgaatgaggagcacaatagtggaagcagtggagggagcaataacaatttggattcaagattggtttatctcaatcttggagcaggtacgggtcagatgggtccaggtcgagatcaaggggatgaccataacagtcagagggaaggtatgagtcggcatcatcatcatcatcaagacccatctacaatgtatcatcaccatcatcaacatcacttctag

SEQ ID NO: 1511 - DNA, 1374 bp, Arabidopsis thaliana
  Clone ID: AT_T20K14.C1.o110.tg
atggaccaaagatcattagaagctgctgctaaatctggaaacatcgatctactatacgaactaatccatgaagatccatacgttcttgataaaaccgaccacgtgcccttcgttaatactcctctccatgtggcagccgtcaatggaaaaacagagtttgccatggaaatgatgaacttgaaaccatcttttgctcggaaacttaacgccgacggacttacaccgttacacctcgccgtggaacacggtcacttctggttagtacttgaagtagttaaggttgatccaagtcttgttcgtattaaagggagacatggtatgacgccattgctagttgcggtaagtagaaagaagattgatctgatgtcagaattcttcttgggttgtcccgaaagcattgtggacgcaaatgtgaacggagaaaacgctcttcacatcgccgtgaataactacgaccaaagagaaggattaagcgttcttaaagttctcatgggatggatcttaagattgtgtcaaaaagatgcagagtggatcgagacaagagtcataaaccgaagagacaaagacggtaacacgcctttacatctcgcggcgtacgagatcaatcgtcaagctatgaaattgttgttagagagctccaagattaacgtcaacattgagaacaagaacggtttaaccgtgttcgacattgctgtgttacacaataacagagagatagagagaatggttaagagacatggtggaaaacgttcggtttctcttgtcaagattaagacaacatcggatatactcgcgtcgcagctttcttggagagaatcgagacggacgaagaagattcggttttattcttggatctctgaagagagaagaaacgctcttttagtggtcgcaactctcatcgtcacagctacatatcagacggttctccaacctcccggaggcgtgtctgatggcggtggtcaaaagagtggaacaagcggtccgaaagcgggttcagtggttatggacgaggtctactttatctggttatggttgtggaacagtgcggggttctgctttgcgattgagatgatgatacgtttgttgagtttaggacaagagagtatgttttggtattaccctctgttcgttcctatggtcttggcttactctgttgcaggggatgtgatcaagccgaacgcaagagcgtacacgatcgcaggtgtgggtgcgatcgtggttcttataatttggggattggtagtttggttttgggaatgggtgcagtctaagagaaccaagcaacgtggacccaagagtggattggtttgggaaggtttcactacgttggatcaagctagaggtgttgcgcctaatcggtatgtgattaggtaa

SEQ ID NO: 1512 - DNA, 579 bp, Arabidopsis thaliana
  Clone ID: AT_T1O16.C1.o16.tg
atggactcatcagagatcgaagtagtgcctctagattccaactctcaccaaagccctaccgaatcaccaaccatcaccgacgtcttctccgcctccgcttacggcgatctccaccaacttaaacatttcgtcgaacataatggctcttccgtctcacttcccgacgataatggcttctacgctcttcaatgggcggcactcaacaattccctccacgttgctcaatatatcatccagcatggtggtgatgttaattcagctgataatatacaacagacaccattgcattgggcagctgttaaaggctccattgatgttgctgaccttttacttcaacatggagctcgtattgaagctgttgatgtcaatggcttcagggcttgttgctgctgtgatcataggcttcagattcttgtaagattttgtcgatctacgacatgttttgttgtgcaggcagttcatgttgcttctcaatatggacaaacagcattcgtgaatcatattattgtggactatgcagctgactataacgcactagatattgaagggaggagtccgctacactggtatggatactag

SEQ ID NO: 1513 - DNA, 1500 bp, Arabidopsis thaliana
  Clone ID: AT_F28I8.C1.o22.tg
atgtctccaattgagaattcctcatcttggacactcgaatccgacctagaagatctagacctcgacctccaagactacaaaccatccgtaccattaaagaaagtcccaaacggagacattttcgaagcctcacgcgccggtgacgtcgatagactccggtaccttgttgaaaccggagtcaacgtcaacgcacgtgaccgttgggactctgttgctctttactacgcttgtctcgctggtcacatagactctgctcgattgcttctagagaacggtgcgatttgctctgaacatacttttgatggtgatcgttgtcattatgcttctcttaatttaaggattcggaagcttctgaaggcttttgaagctcgtcctcctcctcttgctcctttgcaagcttctcttagagatacctttttgggatgttgtcataatcgagattatcttcaacaagaagaagctaatcttgatgtctctgatactctgagtgagtttggtagttcgaattactttccaccggatgtgatgttctatgtgcaaggtagacctattgaagcacacagggttatcttaagtgctcgatctccgtttttcaagcagaagtttgagaatgaatggaaagaccggagagaagttcggttttcgaaagagaagctttcgttggagatatctgttgatgatatggaagatcttgttaggatttgcaaagtttgtaaatgtgaatcactgcagaaaatcattgagaaggaactgattcaccagagatatgctgagtataagactcatagagatcttgataactccatgaaacggtttatcttacagggtatatcacttccagaggaagacaggcttcctgcttctttgcataggattcttcgagtttcactagcgaaatcgtttgttggtgatgtaatagattcatctgttggggatacgagagttggtgattctgtggaaagtcttgctgatgtttgtgttagagttgataaaagaaatttctactgccatcaagctgaggagatctttgatgttgcatctcgctacttgctgtttccgcttaaacgtgctgtggctgacgccttgttgcctcacttggaaactgccacacctgcagaactctgtcaatggctggttttgtcagatatgtacggagtgttgaagataagagagtactgcctggacttggttgcttgtaattttgaggcatttgttgaaacccacgagttcagggcaatgttattaacattgcctccaccatcaggagactcttcacttcgaaccactgttccaagtgcaccaggtgccatgatgaccacagaccaagggaatctccttgatgatctgagagagaagtggcttgaagcagaggctttagagcttgacatgagagacgagagtgctttgattttcgataagcgccttgcaatgcttgtggaaatagcagagcgagagaaatccgaatcagaagctgaggactacaaagacaccagcgcatga

SEQ ID NO: 1514 - DNA, 1914 bp, Arabidopsis thaliana
  Clone ID: AT_F9H3.C1.o9.tg
atgttgacaagggatgagatagttgaccttagaaataccacttaccaatctatatctcaagcattgtggagttggttctgcaagcatttggaaatattgaagttgggaaaagccttccctgagccctccagcatcaagcgccaaattatcaatatgggaaggtctgatctggattttgaccgtcagaagaaagacgcaagctctaggatgttttatgcagacgaaaccgggcgtacgcactctctcgatttgtcaactctcttcaatgacacaagtgaaactgtgccaatgggtccaaagaccatcgccgctgtaagagcaggtgatgaaacttacctgagagatatgaaatttgatgttaacattgctttaagctcagtgaacgatcatgggaatacaatgcttcatcttgctgcagccgcgggtcacaccgacttagtgtgttatatactcaatgcgtacccaggtctgcttatgaagtcaaattccatgggggaagttgctctccatgttgcagcaggtgcaggccatctcgctgttgttgaggctctggttagttttatcaaagatatatcttgtaataagcctggtgttgccaaaaagatatactttgccaaggacagacaccaagacaatgctttacatgtctctttaaaaagaaaacatttgaaggtggcttcctgtttggtttgtgcagagcaaagtttgtcttttgtagcaaacaacgatggggtttctcccttgtatttagctgttgaagctggacaggctgatcttgcaaaaacaatgtggcaacattcaaataatggatcaagtagcacatctactttagcttcaaagattggaggaagatccatagtacatggcgcgatgaaggctaggagaaaagacaaggctctagacagtgtttatgtcagtgatgatgatgggtcctttccaattcatatggccgtgaagtatggttatgtcaaaattctcaaggcaattcttaaacgttgtccagacgcacttgagttacttgacagagaaaatcaaaatgttcttcatgttgcggcaaagaatggaaaaatcgaagtcctcaaatttattttaagatgttgtaaggataagaacaaggaaaagttgattaatgaagaagatgcaaatggaaacacgccattgcatttggccaccaaaaactggcaccctaaagttgtgagtatgctcacttgggacaacagagttgacctgaaaacgctgaaccatgacggtgtcacagctctagatatcgctgagaaaaacatggattccagctacacattttttgagaggttgacttggatggctttgatatctgctggtgcaccaagaggtcccaaactaatattatcgactccagtaacacaaaactcagatggtggaaagtacaaagatcgggttaatacacttctgttagtggccactcttgtagccactatgactttcactgcagggtttacactaccagggggttacaatggttctgttcccaactttggaatggcaacattggccaagaaaacagcgttccaagtgtttctggtattcgacaccttggcgatgtactgttctatcataacaatagttgctctcatttgggcgcaattgggcgatctttctcttatcatgaaagctttcaaccttgcgttgccacttctcggacttgcgcttacatccatgtcaatagcttttatggctggcacgtatgctgcagtttacgggcttcttattgttggagttttgactagttcatatcttgattttctattgctgtttgttaatgaagatgatgatgaaaaaaattacaccaccggctcatctcacacgtgtgtgaagagtggggagtccatgggatcttcaagcggggtccaagcggaaaagtcgaaagtgctttaa

SEQ ID NO: 1515 - DNA, 1632 bp, Arabidopsis thaliana
  Clone ID: AT_F24B9.C1.o17.tg
atggaaggggaagaagacactgtggcgggttctagcataccaaagaagaaaatgatgaaacagctgacaggaaaacgcgacgacactctgcttcattcagcagtgagacacggaaacaaagacagagttgttgagattcttacgaaaaccagagagtctgagttgaatcagctgttggggaaacagaaccagtcaggcgaaaccgcactctatgttgcagcagagtatggtgatgtagagattgtcaaggagatgatcaactgctatgatcttgctctcgttgagatcaaagcaaggaacggatttgatgctttccacattgctgcaaagcaaggagatctcgatgtgttgaaggttttagcagaggctcattcggagttagcgatgacggtggatctatcaaacactacggcactgcacacagcggcaacacaaggacacactgaagtggtaaactttcttttggaactgggaagcagccttgctggaattgccaagagcaatggtaagacggccctgcactctgcatcaaggaacgggcatgtcaaagtcattaaggctctcttggcatccgaacctgcgatcgcaataaggatggacaagaagggccaaacagcccttcacatggcggttaaaggaacaaatgttgaggtcgtggaggaacttatcaaagcagataggtcttctatcaatatagccgacacaaagggaaacacagcgttgcacattgcagcccgaaaaggcagatctcagattgtcaagttgctattagccaacaacatgacagacacaaaagctgttaaccgatcaggcgaaaccgcacttgacacagcagagaaaattggaaatccagaagtggctcttattttacagaaacatggtgttcccagcgccaagaccattaagccatccgggcctaaccccgctcgggaactgaaacaaaccgtaagcgatatcaagcatgaggttcacaatcagcttgagcacacacgcctgaccagaaaacgtgttcaaggaatcgccaaacagcttaacaaaatgcacactgaaggtcttaacaatgcaatcaactcgactactgttgtagctgttcttattgccacggtcgcttttgcagcaattttcactgtcccggggcagtatgtagaagacacaagtaaaattccagatgggcattccctcggggaggcgaatattgcatcgacgactccgttcataattttcttcatctttgattcgatcgcactcttcatctccttagcggtcgtggtggttcagacatcagtggtggtaatagagagcaaggccaagaaacagatgatggctgtgataaacaaactcatgtggcttgcctgtgttctcatctctgttgcctttttggctttgtcgtttgttgttgttggtgaagaagagaagtggctagccatttgggtgactgctatcggggcaactataatgattacgacgttagggacgatgtgctactggataatacagcacaagatcgaagctgccaatttaagaaacattagaagatcctccatcaacagtatatctggatcctgggggattccccagcttacggattctgatattctccagaacgagtgtaagaaaatgtatgcaatctga

SEQ ID NO: 1516 - DNA, 1971 bp, Arabidopsis thaliana
  Clone ID: AT_T6K12.C1.o24.tg
atgccaccgccgatatttcctctccggtgggaaagtaccggagaccagtggtggtacgcttcaccaatcgattgcgccgccgcaaatggtttatacgacgtcgtcatcgagctgcttcatcaagatacaaaccttctcgtaaaactcacctccctccgccgtatccgccgcctcgaaaccgtctgggacgacggagacggaaataacttccatgtggctctaaaccgctcccgcgtcgcgagaaggctattggaagagtgcgaaatcggaaacggagacaattccctcatcagagctggctacggtggctggctgctgtacacagccgcttcagctggagatttagaattcgttaaaaagcttttagagagagatccgcttctcgtgttcggagaaggagagtacggcgtcactgatatcctctacgcggcggcacgaggacgaagcgacgacgttttccgtcttctcctcgatttcgcgttgttaccggctgatatcgccggcgtcgaagaaatcgacggcgaaaaattaacagagaaacagttaatagtcaaagaagagatggttaaaagaggggtccacagtgcggcgagaggcggacacgtggcaatcctcgatgaactcttactcgctaacaaatacgacgccgttgcaaaactcagagatgcttatggttctactctgttacactctgcttctagcagagctcaaatccaagtggtgaagtatcttatatcgaagtatgattcaatcatggaggttaaagacagccatggaaacacagcgttgcatatagcagcttacaagggtcatttagatgtagtggaagctcttataaacgaatctccaccgttgatttccattgttaatggagatggtgacacgtttcttcacacggtcgtgtctggttttgctgcgtctgggtttaagcggttagatcggcagatggagcttttgaagatgttagtctcaagaagctggtccgttgacttttctgagattgtcaacgttagaaattgtaacggaagaactgtgattcatttagctgtgatggataatcttaacgccgttagacctgacgtcgttgagattctgatgagaatccctggcgttgatcttaacgtcgttgattcttatggaatgacagccgttgatttgcttaaacgacaaacgcctcaaacggtggtttctgatttgttgatcaaacggcttgtatccgccggtggaagatcaaactgcggtgagaaagtttcgcggttgagagaagagcgttatggattctgcggtagtccaggaacgtcgtttgagatatctgattctgagatctttctatttacggcggcgagaacagataaaaccgctgcaaacgctgaattaagtccagacagagagagttttgatggaattagtgagtgttcaactgaaatttcgacgcattcgaaacgcaaacgccgcggtggcggcggtacaggagcgcgtcttaagcttcttttacggtgggcgaagagggaagaatcagaagaaaatcgtcgtttatccggagatgttaacaaccgtcgtgttcctctcagagagatgtattctccgtcgtcttgtagcagaggaaaagcgtttccgatgagaacagagagtggtgatcttccgagtttatcggtgagacttaaattcacacaagggttaatgaaaggagtggtggttcaggaatctccgaggttcgtgttttctcctccggctgtatccgattactctcgagctccgtcgtcggcttgttcgacgccgtttcagacgttttcttcggaattagggcgaagaacacctgccatgaagaaacagggatcatttatgaacagatacttgtgttttggtggtaaaggactagccattgatggttcttctgagatgatcagtaatggctctggtcatcgtccccagagtttcaaacgagtgatgtcgtctttggtttcttcttga

SEQ ID NO: 1517 - DNA, 1773 bp, Arabidopsis thaliana
  Clone ID: AT_T2E22.C1.o133.tg
atggctgcttcatcctatgtagacggagaaagagatatggagaaaggaggaatgatattactacagtcaagtgagaatcaaaatcctatgatagatccttcaccaacaccttcaccatctgcaactgctactgccccagctttggttttgtctaattcaggcaagagaatggatcaagctggcaagaaaaagtatgttaagcaagtcacgggtcgccacaacgacaccgagcttcacttagcggcccaacgaggtgatttggctgctgtgcagcagattctcaaggatattaactctcagatggaagggattctgagtggggaagagtttgatgctgaagttgcggagattcgagcatcgattgtgaatgaggtgaatgagttaggggagacggcgctcttcactgctgcggataaaggacatcttgatgttgtcaaagagctgttgaagtattcgagtagagagagtattgctaagaagaatcgttctggatatgatccacttcatattgctgccatacagggtcatcatgctattgttgaggtcttgctagatcatgatgcgacgcttagccagacatttggcccatcgaatgcaactccgcttgtgtctgcagctatgagaggccatacagaagttgtgaaccagctcttatccaaagctgggaatttgctagaaatttctcggtctaacaataaaaatgccttgcatctagctgcaaggcaaggacatgtggaggtcataaaagctcttctctccaaggatcctcagctagcgagacggattgacaagaaaggacaaactgcacttcacatggctgttaaaggccagagttctgaagtagtgaaattgcttcttgatgcagatcctgctattgttatgcaaccggacaagtcttgtaacacagcgttacatgttgccaccaggaaaaaacgagcagagattgtagaactattgttgtcactgcctgataccaacgccaatactttaacccgcgatcacaagacagcgcttgacatagcagaaggacttcccctctcagaagaatcttcatacataaaagagtgtcttgctcgtagcggggctcttagggcgaatgagctgaaccagccaagggacgagctgagaagcactgtcacccaaatcaagaacgatgtacacatccagctggaacagacgaaaaggacgaacaaaaacgtgcacaacatttcaaaagaactcaggaaactccacagagaagggatcaacaatgcaaccaattctgtaactgttgtggctgtattgtttgcaactgtagcttttgctgctatattcacagtgccgggaggagacaacaatgacgggtctgcagtggtggtgggccgagcatcattcaagatcttcttcatcttcaacgcactcgcgttgtttacgtctctggcggttgtggttgtccagatcacattggtgagaggagagacaaaagctgagaagagggtagtggaagtgatcaacaaactcatgtggttggcatcgatgtgtacatctgtggcatttttggcatcttcatacatagtggttgggcgtaagaacgagtgggcggctgagctggtgaccgtggttgggggtgtgataatggctggtgttcttggaaccatgacttattacgtggtaaaatcgaagaggacaaggtcgatgaggaagaaggtgaagagtgctcgcaggagtggttccaactcgtggcatcattcagatttctctaactcggaagttgatcctattttcgcaatctaa

SEQ ID NO: 1518 - DNA, 1266 bp, Arabidopsis thaliana
  Clone ID: AT_F13C5.C1.o120.tg
atggcgccggagaagattccggagccgtcggttcactcagaagaagaggtgtttgaggatggagaagagatcgatggtggtgtgagactaatgtatttggctaatgaaggtgacattgaagggattaaggagcttattgattcagggattgatgctaattacagagacattgatgatcggactgctttacacgtggcggcttgtcaaggattgaaagatgttgttgagcttcttcttgatcggaaagctgaggttgatcctaaagatcgttggggaagcactccatttgcagatgcgatattttacaagaacattgatgttatcaagattcttgagatacatggagctaaacatccgatggctccaatgcacgttaagactgctcgtgaagtccctgagtatgaaataaatcctagtgagcttgatttcactcaaagcaaagagataacaaagggaacttactgtatggcaatgtggcgtggtattcaagttgcggtgaaaaagctggatgatgaagttttgagcgatgacgatcaagtgaggaagttccatgatgagcttgcattgctccaaaggcttaggcatccaaacattgtgcagtttcttggtgctgtaacccaaagtaacccaatgatgattgtgactgaatatttgcccaggggggatttgcgtgaattgctcaaacgaaaaggacaattgaaaccagctactgctgttagatatgcccttgatattgctagaaacattctgcgggatgattcagggcatctgaaagttgcagactttggagtaagcaagcttgttactgttaaagaagacaagccttttacatgtcaagacatttcttgtcgatatatagctcccgaggttttcactagtgaagaatacgatacaaaagctgatgttttctcatttgcattgatcgttcaggagatgatcgaaggccgaatgccgtttgctgaaaaggaagacagtgaagcttctgaagcttatgctggcaaacatcggccattattcaaagctccatcaaagaattacccacatggtcttaaaacgttgatagaagaatgctggcatgagaaacctgcaaagcgaccaactttcagagagatcattaaacgacttgagtccattcttcaccacatgggtcacaagcgacaatggaggatgaggccattgacatgctttcagaatttcgagcacaagaagaaacataattgggatttgagcagccatgacggctcatcatccggttcacatttgtga

SEQ ID NO: 1519 - DNA, 3024 bp, Arabidopsis thaliana
  Clone ID: AT_T5E8.C1.o210.tg
atggtggatcgcagatcttttggctctataactcctcctctccaattagatatggaacagttgctgtcagaagcccaacacaggtggcttaggcctactgagatttgtgaaattcttcagaactatcacaagtttcatatagcatcagagtctcccacccgacccgccagtggttcactttttctttttgataggaaggtactgagatattttaggaaagacggacataactggaggaagaagaaagatggtaaaaccataagagaagctcatgagaagctcaaggtaggaagcatagatgtgctacattgttactatgcacatggggaagccaacgagaatttccagagacgttgctactggatgcttgaacaacatttgatgcatatcgtttttgtgcactacttgcaggttaagggtaaccggaccagtataggaatgaaagaaaacaattcaaattctgtaaatggcacagcttcagtgaatattgattcaacagcaagcccaactagcacattgtcatcattatgtgaagatgctgataccggggatagtcaacaagcaagttccgtcttacgaccatctcctgaacctcaaactggaaatcgctatggttggacacctgctcctggcatgcgtaatgtttcacaggttcatgggaacagagtcagagaaagtgattcccagagattagttgatgtcagagctttggataccgttgggaattcgctgacaagatttcatgatcagccttattgtaataatttgttgactcagatgcagccttctaatactgactcaatgctggtggaagaaaattcagaaaaaggtgggcggttaaaggcagagcatatcagaaatcctcttcaaactcaatttaattggcaggatgacactgatctggcgttatttgagcaaagtgcacaagataattttgagacattttccagtctccttggcagtgaaaatctgcaaccttttggaattagttatcaagctcctccttcaaatatggactctgaatatatgcctgtaatgaaaatattgcgaagaagcgaagatagtttgaaaaaagtcgatagtttttctaagtgggctattaaagaacttggggagatggaggatttgcagatgcagtcttcacgtggagatattgcatggaccactgttgaatgtgaaactgcagcagctgggatctccttgagcccttctctctctgaggatcagcgtttcaccatagttgatttttggccaaaaagtgcaaagacagacgcagaagttgaggtcatggttattgggacatttctacttagtccgcaagaagtaactaaatataattggtcatgcatgtttggtgaagtggaagttcctgctgagattttagtagatggtgttctttgctgtcatgctccaccgcatacagctggtcacgtccccttttatgttacatgttccaacagatttgcttgcagtgaagtacgagaatttgatttcctttctggttctacccaaaaaatcaatgctacagatgtttatggtacctatacaaatgaagcatcacttcagttgcggtttgagaagatgcttgctcacagggattttgttcacgaacaccatatattcgaagatgttggggacaaacgaagacaaatcagtaaaattatgttgctaaaggaggagaaagagtatctccttccagggacatatcagagagactcaaccaaacaagaaccaaaaggacagctttttagggaactgtttgaagaagaactatatatatggctcatacataaagtgactgaagagggtaaaggtccaaacatattggatgaagatggacagggtattttacactttgttgcagcgcttgggtatgactgggccattaaaccggtgttagcagcaggagttaacattaacttccgtgatgccaatggctggtctgcccttcattgggctgcgtttagtggcagggaggaaactgtcgctgtgcttgtctctctaggtgctgatgctggggcattaacggatccatctccagagcttccattgggtaaaacagcagctgatttggcttacgcaaatggacacaggggaatttcgggatttcttgcagagtcttccttaactagttatcttgaaaagctaacagtggactcaaaggaaaatagccctgccaactcttgtggagaaaaagctgttcaaacagtctctgagcgaaccgctgctcctatgacctatggcgatgtaccagagaaactttccttgaaggattcacttactgctgtccgtaatgctacgcaagcggctgatcgtctccatcaagtattcaggatgcaatcattccaacggaaacagctgtgtgatattggcgatgatgaaaagattgatatctccgaccagttagctgtttcttttgcagcttctaaaactaagaatccaggacagggtgatgtctctcttagttgtgctgctacccatatccagaagaaatatcgtggttggaagaagagaaaagagtttcttttaatccgacaaagaatcgttaaaattcaggctcatgtgagaggacatcaggtccggaaacaataccgaacagtcatctggtctgtgggattactcgagaaaatcattttgcgttggagacgcaaaggtaatggtttgagagggtttaaacgcaatgcagtcgccaaaaccgtggaaccggaaccgcctgtatcagctatatgtcctaggatcccacaggaagatgagtatgattatcttaaagagggaagaaaacaaacagaggaaaggctacagaaggctctgactcgtgttaagtcgatggttcaatacccagaagcacgggatcaataccgtagactcctaacggttgttgagggcttccgtgaaaatgaggcttcatcaagtgcatctataaacaataaagaagaagaagcagtcaactgtgaagaagacgattttattgacattgagtctcttttgaacgatgacacattgatgatgtctatttctccttga

SEQ ID NO: 1520 - DNA, 2553 bp, Arabidopsis thaliana
  Clone ID: AT_k22g18.C1.o100.tg
atgcatttcgccaagctcgatgattctcccatgtttcgccaacagatgcaatctatggaagagagtgcggagttgctccgactgcgatgcttaaggttctataaaggttgcagaaaatacacggaggggcttggagaagggtatgatgcagatattggctttgtaaatgcacttgaatctttcggaggaggccataatgatcctgtttgtgttgcttttggaggtcctgtaatgacaaaattcactattgctctacgagaaatcgggacatacaaggaagtacttcgttctcaggtagaacacatgctgagtgatcggttgcttcaatttgtgaatggtgatgtccacgaagttaaggaagctcgtaaacggtttgacaaagctaccattacatatgatcaggcacgagaaaaatatctttcattaaggaagagcacacgattggatgtggctgccacaattgaggaggacctacatagcgcaagaacgacatttgagcaagcccggtttcatctggttagtgcactctctaatgcagagtctaaaaagagatttgagtttttggaagcagtcagcgggactatggatgctcatctccgtttcttcaaacaggcaagctttttcttgaaaacaattttcagagcaagaccacaaataactctggatccaatccgcttgggatatgaactactacatcaaatggagccttttattaatcaggtgttggcttatgcacaccagtctagagaatgtgcaaactatgagatggcatcacttaatgaaaggatgcaggaataccaaaggcaagttgatcgtgaaactagaaactcctgtgtttctccaacaggggatggcatgagacataactcaagaaactcccagaaagtcatcgaggccgtgatgcaatctgctgcaaaaggaaaggttcagactatcagacaagggtatctgtctaaacgttcctcaaacttgagaggtgactggaaaagaagattctttatccttgatagccgtgggatgctatactattaccgcaagccatggaattggtcttcaggaaatggaagtcgctctgttgttcacaggaatatggcttcagaaaacagtcctgggctgctaagtcggtggctgtcttctcattatcatggtggtgtgcacgatgaaaaaccagtggcacgtcacaccgtcaatctgctgacctcaacgatcaaagttgatgcagatcagaccgatctaagattctgctttagaataatttcaccaacaaaagtttatacattgcaggcagagaatgcacaggatcagatggactggatcgaaaaaataactggagtaattgcttctttgttgagtttccaaacacctgaaagagcaatcatgcgtctctctactgtggacggaggtgatactttctctgcaagtgattctggttctttagcagatccttatgatatcgaacaggcagaaagtggagaatccacagtggaacatcccatgacaggaggaaaccgttcgaggttctcagggtgcttgcagcaacatgatatggtaaagactgaaaagccaattgatgtcttgacaagggtattgggtaatgagagatgtgcagactgcggtgctcctgaacctgattgggcctctttgaacctcggtgtccttatttgtatcgagtgttctggtatccatcgtaaccttggtgttcacatttcaaaggtcagatcgctcactcttgatgtcaaagtatgggaaccatcggtcttgacgttattccaatcgttaggtaatgtatatgtaaactcagtgtgggaggagctgttgaactcggagagtagaacttccagtgctagtagatcttcgggcactcccaagtcagatcgaccaagaaagttgcttgtaaggaagcctggtttcaatgatcccatttcggtgaaagagttgttcatccacgcaaagtactcagagaggatttttgtccgcaaagcaatagacagtcagcattttcaggcagttttccaagagatatgggagaatgtccgtgccaacgacaagaaatcagtttacaggcacattgtctgctctgaagcagatgtgaatgctctacgtggtcaagcatcatacactgtgtctttgcccttatcaaagatgatgcaaatggaggaaacccttgaagcgaaattcaagagcattgaagaggagtttcaagagaatccagcgggatattctaactcaagaggtgacggggaaagtatggtcagagaagaaacttcaaacgactgttctttgcttcaccttgcttgtctttctgcggatatcggtatggtagaactattgcttcaatatggcgcaaaaataaatgcaacagattcaaaaggtcggactccacttcatcattgtatcatcagcaggagatatgcaattgcaaggttgctacttatgaggggaggagatccaaatgctgtggataaagacagtaacataccagtcaaatatgcttcacagacagacctcaatgatagcgaactgattgctttattaacagactccaaaagatga

SEQ ID NO: 1521 - DNA, 1389 bp, Arabidopsis thaliana
  Clone ID: AT_K14B15.C1.o17.tg
atgggacaacagcaatcaaaaggggaattgctgtatcagcaagttagttatggtaactctgaaggaattcgagctcttcatcgagatggtggagaccttgagtggatggatagagaaggaaaaactccgttgatcttggcttgtatgaactccgagctatttgatgttgctaagactttgattgagttgggttctaatgttaatgcttatcgtcctggtcgtcatgctgggactcctctgcaccatgctgcaaaaagaggtcttgagaacactgttaagttacttctttctcacggtgcgaatccacttgttcttaatgatgattgtcagacaccacttgaggtcgctagagtcaaagggtttagcaatgttgtacgtgcaattgagaaacacatctgcttgttctcgggttggatgcgtgaattttacggccctacctttctcgacttatttgctccgcagcttctttcaagaagagtatgggtagtcattgtacctactggttcaagaaaccctacaaagcctttcaagttggagctggttgtgtatgctagtctgcaagatgcacagccacgcacagtgatgcctttgtggaaagcaaacttggaagaaccaaaagcgaagcagtccgatacttcagtgatgatcgttgataactccacaatcccaagccgcaggatgaagaaacgaagggtctgcgcctcccacgggagacgtaggcctcaagtagttaggcaaacacgtcttaaattcgcaccttcgactgaaggtgacagccaacagctaaagtggttttgtgatgcatgtaaagggattccacagccgatgcatccaccggtcttcctccaagcaccaccatctgctccaccaccaccatcagaagatggactagccatgggaatgaacgcctcacttcacactactatgagtgacccatcaaatctcaatcaccattccatcggtcaagcaagttcctcatccggtccaagctcatcaactgcacctccctcaggaaaagcaagtgcctttggattcaatagccatggaattggcattgtgctagaatcttcaccatcagctcctccattgacagatgatgatatagctacagtagacgatggtccaattcattacccatcaatcgattcaacaccagtcgatctcccatctgctgcttctcttccagcttcaacagaaggtgaaaggaaagaagacgggaacactggaacgtgtgcgatatgtctcgatgctccatctgaagcagtctgtgtcccgtgtggacatgtcgcgggatgtatgtcttgcttgaaggagatcaaatccaagaattggggatgtcccgtctgtcgagccaagatcgatcaggttattaagctgtaccgtgtctga

SEQ ID NO: 1522 - DNA, 3222 bp, Arabidopsis thaliana
  Clone ID: AT_F20H23.C1.o18.tg
atgaacctgcaaactcctcgtaaaagctcactttcaggatctaggaaagatttgtggtttgctatacgggaaggttcgttggttgatgtggattcagcacttagcatactcaagaagactggtggcaatataaatttaaggaatgcctatggtctcactcctctgcatattgctgtatggagaaatcacattcctattgttaggagactgcttgctgctggcgctgatccagatgctagggatggagaatctggttggagtagtcttcaccgagctttgcattttggccatctcgcggtagctagcgtattgattgactcaggtgcttcttttactctagaagacataaaactgcgaacaccggttgatttggtctcaggtccagtggctcaggttattggcgagcaacaaagttcggtggctacagaggttttcagctggggaaatggtgcaaactaccaacttggaactggcaatcaacatgttcagaaggtaccagggagagttgattcactgcatggttgttttattaagttggtctccgctgcaaagtttcatagtgttgccattagtactcatggagaagtctacacgtggggatttggaaggggtggccgccttggacatcctgaatttgacattcatagtggtcaagctgcagtgattactccccgccaggtgatatctggtttaggatctcgccgtgtaaaagcagttgcggcagctaagcaccacactgttattgctacagaaggcggggatgtgtacacatggggttccaatagagagtctgatgttgtttgtgatgctcttgtagagggtcagcttggttatacctctgtggatactcaggcaacaccccgcaaagtgacttcattgaaggcgaagattgtagctgtttctgcagcaaacaaacacaccgccgtagtttctgactgcggtgaagttttcacttggggatgcaacaaggaaggtcagcttggttatggaacctccaactcagcatcaaactactctcccagattggttgattacttgaaaggaaaagtgttcacggctattgcatcttcaaaatatcacactctagtgtacacctggggtcatcggctggtgactccaagacgtgttatcatttcccggaatttaaagaaagctgggaacacactattgaattttcatcgaaggagacctcttcgattgactgcaatagctgcgggaatggtacacagcttggctctagcagaagatggtgcattcttttattgggtttcctctgactccaatcttagatgccaacagttgcattcgctgcacggtaaaacagttgtgagcatttcagcgggtaaatactgggcatctgctgttactagtacaggtgaagtttacatgtgggatgggaagaatggtaaagatattgcaccatctctttctcgcctccacaacttgaaaagggcaaccacagttgctgttggcgaaactcatcttctggttgttggttctctgtatcatcctgcatatgctcctattgtgcttaagaagtctcagacactgcaagctgataaatgtagggaagaagaaaatgaagaactggatgagggttttatgtttgacgatgtggaatccgtgaacgtgttgcaatccgtgcaatacgataatcctaaggagaggatagtgcctagcttgaaaagtttatgcgagaaggtggccgcggagtgtattgtagagccacgaaatgctattcaattgcttgaaattgcggattcgcttggagcagaggatcttaagaagtactgtgaggacattgtgattcgaaaccttgactttattttgacattttctccccaatctattgcaaatacatcacctgatgttcttgccaatcttgagaaattactggatgacagatcatctgaaacatggagctcccgaccacttccaaccccaacagccacatttcctgttgttattgacagtgaagaggaggaaagtgagagcgacattctaagaactcgtgacagccatgtgaaacacttttccagtattggtggtactcgaatggattcattcttgcaaccagaagatgagctgactcaacacaattccaaagaagtccgagctttgaggaaaaagttgcaacaaattgagatacttgaagcaaaacaatcgagaggacaacttcttgatggtcagcaaatagcaaaacttcaaaagaaactagatatcgaaagttcactggtagaacttggtattcctgtggaagagtttccagaggcaaaagcaacaacagctttaccgctagaaggaaaggccaacaagaagggaaaaaagaagaaaaagggtaatcagagatttgtacaagttgagacattccctgaatttggtgaagttaaagtggaaatagatacgatgcaagacaaagaaattgaagaaatctgtgaagctatcaagccaaagggtggcaaaaccatgttggatacgacgatgattagtgggttccccaaagaatcagactttgtctcactctcgcaaaagaaagataatccacccgattcgccgagaagcaagaaacttgcaacggcagcaaacaagaagaagaacagaaagggtgggctttccatgttcttgactggtgctcttgatgatgtccctaaacctgttgttgctcctccaccaaggcctaagattgaaggtcctgtgtggggtggggctaagatttctaaaggattatcttccctgcgggatattcaagatgaacaaagcaagacccgctctcatgaacctgttaggactactaaaaatcagtcaggggatgattctcctggtaaaagtgaaggaaagatattactgagttccttcttgacttcgaagccgattccgatggaaccagccaaaagtttgcagcaatctgatgtggaaaaaggaactcctccttgggcttcctctgaaactccgcgtaaactgtctcgaccttctctcagagatatccagatgcaggaggtgaagaagcaacagtctctgtcccacagtccaaagacaaaaacatcaggcttcacagtcgcaaccgggcaaggatctccatcagattcgcctggaactaatcgctggttcaaaccagagatagatgctccatcagcaatccgatcaatccagatagaagaaaaagccatgaaggatctccgccgcttctacagtagcgtgaaggtagtcagaaaccagccttga

SEQ ID NO: 1523 - DNA, 849 bp, Arabidopsis thaliana
  Clone ID: AT_MIK22.C1.o14.tg
atgtcgattgcaccaccgaccattgatcggcttccacgagatccgctgtgtaaactgttcattgtgttgcccaaagagaaacatattgaagaaagtcacgtttcaacgaagatgaacaatctgaacaaatccaaagagcctcccaagggagatataatagtggaagttggagagacatgtaggtcatgtcctaataaacatcacagtccactacacaatgttcaaagaaacttttcatgtgatgataaattacgagccaaaggtgtccaactctatcaagctgctctgaaaggagattggaaggcagccaatggtataatcattgaacaaaaatatattatctatcaaaaaatcaccagtaaatcggagactgttcttcacatcgctgttgctgcaaagcacgaggggtttgtaagaaatctacttggaagcttggagtcaaatgacttggccttgcgaaacgtggacggcaacacagccttatgttttgctgctgcatcgggagtcgttgagattgctaaaatgctgatcgagaagaataaagatcttccgatgattcgtggaggtggaaaaacgactccaatccacatggcagccttattcggtcatggagaaatggttaaatacctttacaagaatacacgctttagagaattcaatgatgaagagtttgtaaatctctttcatgctgtgatatcagctgatatctatgtgaggtctattcacagatgtagctctggagatgttagagaacgagggaaggaaaaaagtactagccctttggacaaatataaacaaagagacagccttgcacttgatggctcgcaagccttctgcagttggccgtag

SEQ ID NO: 1524 - DNA, 2265 bp, Arabidopsis thaliana
  Clone ID: AT_F13M7.C1.o20.tg
atggcaagcagcaccattgatgttaccaagtatggtcacagtcctgttcatcacgctgttgtcacaagggattatgccggtctcaagaaactattatccgctcttccgaagatgcgtgacccgtctgaggttcaaaacgaagcagcttctgtagctgaagagacaaaagcggattcaatcgcagctgttatagacaggcgtgatgtggttaatcgagacacggcacttcatttagctgtaaagctcggtgatgagacctccgcggagatgcttatggctgctggtgctgattggagcttgcagaatgagcatggatggagcgctctacaagaagctatttgtggtagagaagagaggatcgctatgattatcgttaggcattatcagcctctggcttgggctaaatggtgcaggaggctgcctcggcttgtggctacgatgcatagaatgagagatttctacatggagatcactttccatttcgagagttctgttatacctttcatttctagagtggcgccttcggatacttataagatttggaagaggggtgcgaatcttagagcggatatgacactggctgggtttgatggtttcaggattcaaagatcggatcagactatactttttcttggagatgggtcagaggatggtaaagttccttccggttctcttcttatgatatcacataaggataaggagatcatgaatgctctagacggtgctggagctgccgcatcagaagaagaagttcgtcaagaagtggctgcaatgtccaaaacaagcattttcagacccgggatcgatgttactcaggctgttctcttcccgcaattaacatggaggcgtcaagagaagacagaaatggttgggcaatggaaagcaaaagtgtatgatatgcacaatgtagttgttagcataaaatcaagaagagtaccgggtgcaatgactgatgaggagcttttctcaaacactaatcaagaaaacgacacagaaagcgaggatcttggagatatcttgacggaagacgagaagaggcagctggagttagcactcaagttggactcaccggaagaatcttctaacggcgagagctctaggatttctcaaaagcagaatagttgttctttcgaggatcgagaaattccagtaacggatgggaacgggtattgcaaacaggagaagaaaggatggttcagtggttggaggaaacgagaggaagggcacagacgaagtagtgttcctccaagaaactcgctttgtgttgatgagaaagtaagtgatcttcttggggacgatgattctccatctcgtggaggaagacagataaaaccgggaagacactcaacggttgagacagttgtgaggaacgaaaacagggggctaagagattcatcaaaagcttcaacatcagaaggcagcggaagcagcaaacgaaaagaaggaaacaaagagaatgagtacaagaaagggcttagaccagttctttggctttctgagaggttcccattacagacaaaagaacttcttccattgctcgatatccttgcaaacaaagtcaaagcaatccgacgcttgagagagcttatgaccacgaaactaccttcgggaacattcccagtcaaggttgctattcccgtaattcctacaattagagtactcgtcacatttacaaagtttgaagagctagaagctatcgaagatgagtttgttacaccgccatctagtccaacttcttcggtgaagaacagtcctagagaagaaacacagagctcatcaaacccatcctcctcatggtttcaatggatcaaaacaccaagccaacgtccatcaacaagctcgagctctggagggtttaatatcggtaaagccgaaaacgatcaagacccatttgcaattccaagaggatacaattggatcacagctgaagagaagaaaaagaaggtccaagagaagaataaagctaagaagggcaaattacctaagctcaaactcttgaacatgagcaatatctttgccataagcaatatcaggccagcttactttcctctgttcaaagcttttctcggcctccgtcttgatcttgaggttgcttttgagacggcaaggctcgctggagacggcagtgcagcttctcccgccgtgtctcttaggcggttgatgttgtcgccgccgtcttcctcctcctcctcggaagccaagttgaccatcttcgtctgtcgtgttggatatattaataatgtcgtcagaacaagtagtccttga

SEQ ID NO: 1525 - DNA, 2253 bp, Arabidopsis thaliana
  Clone ID: AT_T31B5.C1.o120.tg
atggaggagagcgcagaaatattgcgggaaagaagtctcaagttttacaaaggatgccggaaatacactgaaggactaggcgaggcatacgatggggacattgctttcgcaagtgcacttgaaacatttggtggaggccataatgatccaataagtgtggcttttggaggaccggtaatgacgaaatttacaattgcgttgagggaaattgggacttataaggaagttcttcggtcacaggtggaacatatactgaatgacagattacttcagtttgccaatatggacttgcatgaagttaaggcccgtgagaagtttttatctttgaggaaaggtacaaaaagtgacgttgctgctgctttagaacaggaacttcatacttcgaggtctatgtttgagcaagctcggttcaaccttgtgactgctctatcaaatgttgaagctaagaaaaggtttgaatttttggaagcagtcagtggaacaatggatgcacatcttcggtacttcaaacagggttacgaattactgcatcagatggaaccatatatcaatcaggtcttgacatatgcgcaacaatccagagaaagatcaaattatgaacaagcagcacttaatgaaaagatgcaggagtacaaaagacaggttgatcgagagagcaggtggggttcaaatggttctaatggatcaccaaatggagatggcatacaagcaatcggtagaagctctcacaaaatgatagacgccgtaatgcaatctgctgcaagaggaaaggggtctggaagccagctttctggacagagaaatagctccgagcttgggtctggactgcttagtaggtggctttcttcgaataatcatggacatggtggtgtccatgatgagaagtctgtagctcgtcatacagtgaacttactcacctcaacaattaaagtcgacgctgatcaatcagatctgaggttttgctttaggatcatatcacctacaaaaaactacacgttgcaggctgagagtgcactcgatcaaatggattggatagaaaagatcactggggttattgcatcactacttagttctcaggtccctgaacagcgtcttcctggtagtcccatgggaagtggccaccatcgatctgctagtgaaagtagctcatatgaaagttctgaatatgatcatcctactactgaagaatttgtatgtgagaggagctttttggggtacaatgaaaggccatcaagaagttttcagccgcaacggtccattagaaagggtgagaagcccattgatgctcttcgaaaggtctgtgggaatgacaaatgtgcggattgtggagctccagaaccagactgggcttctttaaatctgggggttcttgtctgtatcgaatgttctggtgttcaccgtaatcttggtgtgcatatatctaaggttaggtcactcactctcgacgtgaaagtatgggagccatctgttataagtttgttccaagctcttggaaatactttcgcaaacacagtttgggaggaattgcttcattcaaggagcgccatccattttgaccccggcttaacagtgtctgataaatccagggtgatggtcactggaaaacccagctatgctgatatgatatctatcaaggagaagtatatacaagctaagtatgcggagaagttatttgttcggagatcaagagacagcgatttcccacaatcagctgcacaacaaatgtgggacgcagtgagtggcaatgataaaaaagctgtttaccggctcattgtcaatggtgatgcggatgtgaattatgtgtatgaccaaacttccagttcttcgttaacactttccagagtaatattagtaccagaaaggccaaagcgtgaggatgttctactcagattaagaaatgagttacttgatagaacaggtagttcttcaaatatatctcctgagggaagcggaggttcctctctgcttcactgtgcttgtgagaaggcagaccttgggatggtagagcttttgctgcagtatggtgcaaatgtaaacgcctcagattcaagtggtcaaacgccgctgcactgttgtcttctcagaggaaaagtgacaatagcaagattgcttctcactaggggagcagacccggaagctatgaacagagaaggcaaaaccgctcttgatattgctgcagagtcaaattttactgatccagaagttcttgctctcctttcagacacaaatggatacaatcacagacagtgctga

SEQ ID NO: 1526 - DNA, 1959 bp, Arabidopsis thaliana
  Clone ID: AT_F9H3.C1.o13.tg
atgaagaacgagtctcggacatctgaagaaatcagcaagctaggaatattttcaggagtgggattttcaatgggaaggccggatgtgcacttggatcgacgagtagcagaaaaccatcaggcaataccaagaaacaatgtcagatccacaccatctctcgatttgtccactctcttcgacgaaaccagtgaaactaagccgatggatccaaagacgatggctgcagtaagagcaggtaaggaaaattacctgagaagtaataacagttacattagtgttgctccaaccttagtgaacgaccgtggaaatacaatacttcatcttgctgcttcatcgggtcacgtaagccttgtgcgttatataatccagaaatgcccaggtttgctactgaagtcaaatatgatgggagaagttgctctccatttggcagcagaagcaggccatctagatgttgtatggaatctaattgatttcataaatgatatatcttgtactaaccttcctgttgcaaaaaggatatattttgctaagaacaaaaaccaagacactgctttgcatgttgctttgaaagggaaacatgaggtggtcgcttcctatttggtctctgcagcgaaatctttgtcttttgttgcaaacagagatgggttttctcccttgtatcttgctattgaagctggacatacaagtcttgtgacaacaatgtgtcacggaacaaatgaattaagttcaaaggttggaggaagatccattgtacatgcagcattgaaggctaataggaaagatatccttgatgctttacttagcaaagatgcaagtcttatcaacttgagagatgaaggaaggacttctctttcttttggagcatccataggatattatcaagggttttcctatcttttcgacaaaaatcgagacaaggtttatgtcagcgatgatgatggcttatttccaactcatatggcggccaagtatggtcatgttcaaattcttgaggaaattcttaagcattgtccagaggcaattgagttgcttgatagagacggtcaaaatattcttcaccttgcggcaaagtatgggaaactcaaagtcatcaagtttatcctaagctgttgtaaggataagaacaagaaaaagttgattaatgaacaagatgtgaatggaaacacaccgttgcatctagccaccataaactggcaccctaaagttgtgagtatgtttacttgggaccatagagttgacctgaaaaaaagaaactacattggtttcacagctttagatgttgctgaggagaacattgattcgagctacatagttcaccagagattgacttggatggctttgatcaatgctggtgcaccaaaaagttctactccaattacagaaaatcttagatcattcaagaagccagatggtggaaagtacaaagatcgagtcaatactcttatgttggttgcaactctagtagccactatgactttcactgcaggattcacattacctggtgggtacaacgactcttttccccacttgggaatggccgttttggccaagagaacggcttttcaagtctttcttgtatgcgacacattggcaatgtactcttctatcataacaatagttgctctcatttgggcacaactcggtgatctttctatcatactcaaagccttcaacatagcacttccatttctcggacttgctcttacatcaatgtcaatagcatttatggctggcacgtatgttgcggtaagccatctccccttgcttggttatttcgttttgggtattggaatcatcttcctattggttttgttgctgctccttgttccttatgtgtctccatatgctcatgcccaaccccttcttcgacacattttctactatccctatttccttaagcttttggctgctggtgacaacaaaaatattgttgatgtgtacactgcatcagatgaatga

SEQ ID NO: 1527 - DNA, 1017 bp, Arabidopsis thaliana
  Clone ID: AT_MYN8.C1.o8.tg
atggctgattggtatcagcttgcacagtctataatctttggtttgatcttcgcttaccttctcgctaagctaatctctatcctcctcgcttttaaagacgagaatctctcactcactcgtaaccacacgactcaatcggagtatgagaacttgcgaaaggtcgaaactttaactgggattagcggcgagactgattctcttatagctgagcaaggtagcttgagaggtgatgaagatgaatcagatgatgatgattgggaaggtgtcgaaagtacagaacttgatgaggcatttagtgctgctacggcttttgttgctgctgctgcatcggataggctttcgcagaaagtttctaatgagttgcaacttcagctttatggattgtataaaattgctactgaaggaccttgtactgctcctcaaccatcagctcttaaaatgactgctcgtgccaagtggcaagcatggcagaaattgggtgctatgcctcctgaggaagcgatggagaagtatatcgaccttgttactcagctttacccagcttgggttgaaggtggctcgaaacgaagaaatcggagtggtgaggctgcaggccccatgggaccggtttttagctcattggtgtacgaagaggaatctgacaatgagttgaagattgacgccatacacgcctttgctagagaaggagaagtcgagaatctattgaaatgcatagaaaatggcatacccgtaaatgcaagagatagtgaaggtcgaacaccactgcattgggctatagaccgtggccatcttaacgttgctgaagctctggttgataagaacgcagatgtgaatgctaaagacaatgaaggccaaacctctctacactatgctgttgtgtgcgaaagagaagcactcgccgagtttctggtgaagcagaaagctgatacaaccattaaagacgaagacggaaactcgcctcttgatctctgtgaatcagaatggtcttggatgcgagagaagaaggattccaattag

SEQ ID NO: 1528 - DNA, 3045 bp, Arabidopsis thaliana
  Clone ID: AT_MSJ1.C1.o6.tg
atgtttagctacagagttgtagtatcaatgtgtttcttacccttttatgaacttgtagatatcaagcaattgctgtcagaagcacaacacaggtggctgagacctgctgagatttgtgaaattcttcggaatcatcagaagtttcatattgcgtcagagcctcccaaccgaccacccagtggttcactctttctcttcgataggaaggtgctcagatatttccgaaaagacgggcacaattggaggaagaagaaagatgggaaaacagtgaaagaggctcacgaaaagctgaaggtaggaagcattgatgtgttacattgttactatgcacatggagaagataatgagaacttccagaggcggtgctactggatgcttgaacaggatctgatgcacattgttttcgttcactacttggaggttaagggtaaccgaatgagtaccagtggaactaaagaaaaccattcaaattctctgagtggcacgggttctgtaaatgttgattccacagcaacccgatccagcatattgtcaccattatgtgaagatgctgattctggaaatcgagatggttggacgtcagctcatgggaacagggtcaaaggaagtaactcccaaagatcaggtgatgtcccagcatgggatgcttcctttgagaattcattggcaagataccagaatctaccttataatgctccgttgactcagacacagccttctacttttggtttgatccccatggaagggaaaacagagaaaggttccctgttaacgtcagagcatcttagaaatcctcttcaaagtcaaactcctgttcaggaaagcgtgccattgcaaaaatggcccatggattcgcattctggaatgactgatgctactgatcttgccttatttgggcaaggagcacatgaaaattttgggacattttccagtcttcttggtagtcaagatcaacagtctagtagtttccaagctcctttcacaaataatgaagcagcatatatacctaaattaggccccgaggatcttatatatgaagcaagtgcaaatcaaacactacctcttagaaaagcattgttaaaaaaagaggatagtttgaaaaaggttgacagtttctctcggtgggttagtaaagaacttggggagatggaagacttgcagatgcaatcttcatctggaggtattgcatggacttctgttgaatgtgaaaacgcagcagctgggtcttccttaagtccttctctgtccgaggatcagcgcttcactatgatcgacttttggcccaaatggactcagacagactcagaagttgaggtaatggttatcgggacatttctgttgagtcctcaggaagtaactagctatagctggtcatgcatgtttggagaagtggaggttccggctgatattttagtagatggtgttctttgttgtcatgctccgccacatgaagtcggtcgagtcccgttctatataacatgttctgacagattttcttgcagtgaagtacgagaattcgatttccttcctgggtctaccagaaagttaaatgctactgacatttatggtgccaatacaattgaaacatcactccatttgcggtttgaaaacttgctggctctcagatgttctgttcaggaacaccatatatttgaaaatgttggggagaaacgaagaaaaatcagcaaaatcatgttgctaaaggatgaaaaagagcctcctctccccggaacaattgagaaagatctaacagagctggaagcaaaagagcgattgattagggaagagtttgaagataaattatatctgtggctcatccataaggtgactgaagagggcaagggtccaaatatattagatgaagatggacagggtgttctacacctagccgcagcgctggggtatgattgggcgataaagccaatcttagcagcaggagttagcatcaacttccgcgatgcaaatgggtggtctgctcttcactgggctgcattcagtggcagggaggatactgtcgctgtacttgtctcactgggtgctgatgctggagcattggcggacccatctccagaacatcctttggggaaaacagctgctgacttggcttatggaaacggacacaggggaatatcgggtttccttgcagagtcatccctcactagctaccttgaaaaactaacagtggacgctaaggaaaacagctccgctgactcctctggagcaaaagctgttctgacagtagctgagcgaacagctactcctatgagttatggtgatgtaccagaaacactttcgatgaaggattcacttactgctgtcttaaatgctacacaagcagctgatcgtcttcatcaagtgttcagaatgcagtcgttccagcggaaacagctctctgaacttggtggcgacaacaaattcgatatatccgatgagttagctgtgtcttttgcggctgcaaagactaagaagtcaggacacagtagtggtgctgttcatgctgctgcggttcaaatccagaaaaaataccgtggttggaagaagagaaaggagttccttctgatccgacaaagaatcgtcaagattcaggctcatgtgagaggacatcaagtccgaaaacaataccgagccattatttggtccgtaggattgcttgagaaaatcatcttgcgatggaggcgtaaaggtagtggcttacgcggtttcaaacgtgatacaatcagcaagccaacagaacctgtatgtcctgccccacaagaagatgattatgattttctcaaggaaggaaggaaacaaacagaggaaaggcttcaaaaggctctaacccgagtgaagtctatggctcaatatccagaggcacgggctcaataccgtagactattgactgtcgttgaaggcttccgtgagaacgaggtaacaattgcttcttctagctcggcattgaaaaacaacacagaggaagctgcaaattacaacgaagaagacgatttaattgacattgattctcttttggatgacgacactttcatgtctcttgcatttgaatga

SEQ ID NO: 1529 - DNA, 1470 bp, Arabidopsis thaliana
  Clone ID: AT_F20M17.C1.o16.tg
atggcgaatgtagtgggacagctaaaacgaggaatctcgagacaattctcaactggatcgcttcgtcgtacgcttagtcgtcaattcacgcgtcaagcttcacatgatcctcgccggaacaatatgcgatttagttttggtcgacaatcgtctttagatccgattcgtcggagtcctgatggttctaacggtccgcagcttgctgtaccggataatctcgacgctactatgcagcttctatttgtggcttgtagaggtgatgttgaaggtgttcaggatctgcttgatgaaggtattgatgttaatagtatcgatcttgatggtcgtacggctcttcatatcgctgcttgtgaaggtcatgtcgatgttgtcaagcttcttcttactaggaaggctaatattgatgctcgtgatcgttggggaagcacggcagctgctgatgctaagtattatggtaacatggatgttttcaacattttgaaagcccgtggagctaaagttccgaaaaccaaaaggacacccatggttgtggcgaatcctcgtgaagttcctgagtacgagttaaatccgcaggaacttcaaggaatatatcaagtggctaaatggaatgggactaaggtttctgtaaagatacttgataaggatctctacaaggattctgacactataaatgccttcaaacacgaacttactttattcgagaaggtacgtcatcctaatgttgtgcaatttgttggagctgttactcaaaatgtccccatgatgattgtgtccgagtatcatcctaaaggggaccttgggagctatcttcaaaaaaaaggtcgtctttctccagccaaagttctaagatttgccctcgatatagccaggcatgtgacttttttggcaagattgggaatgaattatcttcacgagtgtaaaccagaaccagtaatccactgtgatctaaaacccaaaaatattatgctcgatagtggaggacatctgaaggtggcgggatttggtttgataagttttgcaaagttatcatctgataaatcaaaaatccttaatcacggggcccatatagatccttcaaattactgtatggcacctgaggtttacaaagatgaaatatttgacaggagtgtggattcttactcttttggtgtcgtattatatgaggtagtaccttatggattcatacgttttggtgtcatcttatatccgatgattgaaggagtacaacctttccatcctaaacccccagaagaggcagtgaagctaatgtgtttagaaggaagaagaccttcgtttaaagccaagtccaaaagttgtccccaagagatgagagaattgattgaggaatgctgggatacggaaacttttgttagaccaacattttctgagatcatagttcgattggacaagatctttgtacactgctcaaaacagggatggtggaaagatacattcaagttcccttggtaa

SEQ ID NO: 1530 - DNA, 558 bp, Arabidopsis thaliana
  Clone ID: AT_K5F14.C1.o7.tg
atgaatctatacggatcatatctagacgacattgcagaccagataccggtcgacaggagtcggagtcagatgatcagaaagtacttaggtaaacaacggaaaaatttagatttgatagatgaagtcgtagaggccagacttatacgtcagttggaagccaatcaatcgattttggagaaaacagacaagcataaatacgactacgaggaatatgcgacgattttgcatagggaagagtacgaggaatatgcgacgaagataatcgacctctgcccttcactcgttagagttgctaacgtcgacggaaacactcctcttcatttagctgccgaaattggaaacgaatttatcctctggaaaatgttgaggtgtggagaagcagactgcaggaagattaataagcaaggacaaacagcattcatattagcatgcctcaacaatcacgtcgctgttgcacttaccctcctacaatatatgcggtctatgacgatggtggaacttgatgcagccttttcaagacatcaaccaggtttgaaattatcatcgcataagttatag

SEQ ID NO: 1531 - DNA, 2256 bp, Arabidopsis thaliana
  Clone ID: AT_F9H3.C1.o6.tg
atggcacgacgaggattaaggatggacaactctgaagcacatctagatagaattgaggcacagaggtcaacagatgaccaacataaacgaagatgcttccctgtgaatgtgataaaaaatctaggcacactcagttcacgcagtttccttcgacgcagaggagatgaagccacaccacctacgactacgatagacattgaatctgtgccaaagttccttaccactctcagattgttggatctttacaaccaccccggtgaatatgtggcaatgaattcagagatctccagcgcaatgcgagctgggaacaaagaatttctggagaagatggaaagctacgaaacaccaatgtcatgcttcaagaacaacaaaggagattccattcttcaccttgctgctgcttttggtcatcttgagctagtaaagagcatagtctctaaattcccatctcttctgttggagttaaattttaaggatcagcttccgcttcatgtggctgctcgtgatggtcatttaacagttgttaaagctcttgtagcatcggtaacattttgttcagatagactggctgaagaagatagggagaggctgaatccatatattctaaaggacaaaaatggagatactgctctccactcagccttgaaagacctccatgaaaaaacaaaagaactccatgaaaaaacaaaggatatgcattggctacgacgtagcaaatccaagtcactttctaatgaatctacacacctaatggagacagctgcttgtctagtcaatgcgaaccaagatgtttcgtttcttgcaaataaagatgaaatctcccccttgtatttggcagttgaagctggtaacgtatcacttgtaaatgcaatgttgaacagccatgttaataacgttcaagacaaaacctttaacttagccacacaattgaaagggagaaaatcgcttgtgcatgcagctttaaaggcaaagaatacagatgttcttgatgttattctcggtaaatacccgagtcttgtcaaagagcgagacgaaaaaggacgaacttgtctttcggttggagcatctgtagggttttatcaaggcatatgcaagctgttagacacatcaacgctaagcatctttgattgcgacgatgatggttcatttcccatccataaggcagtggagaaaggtcatgagaatgttgttaaagagcttctaaaacgttttccggattcagtagagcagcttaacaaagaaggtcagaacattttccacatatcagcaaagagtggcaaatccacattgtttcttatggaacatatcaataaagtcgatacgaagaatcatcttatggaggagcaagatatggatgggaatacacctttgcacctggccaccataaattggcgccctaaaactgttcgtatgcttactaaatttctttccatcagaaaaaaactcttggataaacataactccgttggcttgagacctctggatatcgcagagataaatctgcagtctgactacgtttttcgagagagaatgactttgatggtcttgctaggcgtttacaatctaagacagagaggtatttctttgctaccgactagcgggatgacactaagaagtagatcagaaaaactaggtgatggtgaaaaatacaaagaccgtgtcaacattcttctactggtggcagctcttgtagccactatgacgtttgctgcaggttttacaatgcccggtggctttagcagctctgctccaaacactggcatggctattttggtcgatgaccgttacctcacaacatttattatgaatgacactattgcaatgcttacctcagttttagcaatagttgctcttatctgggcacagttaggagatccagaactcgcgcacagagcgtttcatttggctttaccagcactcttcgttgctctactcttcatgtgtttcacattcttttatggcgttctggctacaatacagcataacatcgtgctttcacgcatcataagctttgtatttattatcttatttattatgaccggaaccctccttaccccttacgtgatcccgcaggtttacggccttcctattattggagttttgactagttcatatcttgattttctattgctgtttgttaatgaagatgatgatgaaaaacattacaccaccggctcatctcacacgtgtgtgaagagtggggagtccatgggatcttcaagcggggtccaagcggaaaagtcgaaagtgctttaa

SEQ ID NO: 1532 - DNA, 642 bp, Arabidopsis thaliana
  Clone ID: AT_F13G24.C1.o40.tg
atgactccagttgtgatccctcaaaatctccgtgtctttggccctgtttcccttaggaaatatcctttgagtctttcatctgtgaattctagtcagttctggtttatctgcaagatgctccaagagcagccggttgcgttgtcctttcggcctaactcatttaggcgccggtccatggaaacgggtgttgacagagatgacagggggtggactcagcttcacatcaaagctcgtgaaggcgatctcaaagctgttaaagagctccttgaccaaggagcagacgtgaacgctctagcttgtggacctaaatcaaaaggaatgactcctcttcaccttgctgccaaaggaggtcacatcgaagttatggacttgcttcttgaacgtggagccaacatggaagctagaacctctggtgcttgtggctggactcctctccatgctgcagctaaagaacggaaaagagaagctgtcaagtttcttgtggggaacggtgctttcttacctgatgatataaccgacagtaggttcaacccgccggttcagtactgtcacggcttggaatgggcttatgaagagaggaagaaactcagtgaagatacttctttatcttgtggagacacttcttgcagttctgcgaattga

SEQ ID NO: 1533 - DNA, 666 bp, Arabidopsis thaliana
  Clone ID: AT_T12E18.C1.o20.tg
atggctgcgattgagtatcgaggcgcaaacgcggttactaatttcgacattagtaattacattgaccggttaaagaagaaaggtgttttcccgttccctgtgaaccaagctaaccatcaagagggtattcttgttgaagccaaacaagaagttgaaacgagagaagcgaaggaagagcctagagaagaagtgaaacaacagtacgtggaagaaccaccgcaagaagaagaagagaaggaagaagagaaagcagagcaacaagaagcagagattgtaggatattcagaagaagcagcagtggtcaattgctgcatagactcttcaaccataatggaaatggatcgttgtggggacaacaatgagctggcttggaacttctgtatgatggatacagggttttctccgtttttgactgatcagaatctcgcgaatgagaatcccatagagtatccggagctattcaatgagttagcatttgaggacaacatcgacttcatgttcgatgatgggaagcacgagtgcttgaacttggaaaatctggattgttgcgtggtgggaagagagagcccaccctcttcttcttcaccattgtcttgcttatctactgactctgcttcatcaacaacaacaacaacaacctcggtttcttgtaactatttggtctga

SEQ ID NO: 1534 - DNA, 591 bp, Arabidopsis thaliana
  Clone ID: AT_F25G13.C1.o130.tg
atgatcactgggattccaaatcctaatgccagagcagcttataatcccgggccagcagaaacggttacaacggttatcgtggagaaaaaggctattgaagaaagaagccgaagaactcggtcaaaacatatgcatttcaggtctgattattcagatatctcaccggttaattctgattccatctcaccaaaataccagccgccgaaacgaagaaagcagcatagaagaaagcgagtacataaccaagaaccatgtttgatgagaggagtctactacaaaaacatgaaatggcaagccgccattaaagtcgagaagaaacaaatccacttaggcactttctcttctcaagaagaggctgctcgcttatacgatagggctgctttcatgtgtgggagggaaccgaactttgagctctcggaagaagttatacgagaactcaaacagcaaagctgggaagagttcttgaattgcacacgccgaacaattacgaacaaaaaaccaaagagtaggatagaacatgaggatacgaagatcaatgccagcatgccacatcaaccagaagaagaagagcaagattcagacaaaatgtga

SEQ ID NO: 1535 - DNA, 879 bp, Arabidopsis thaliana
  Clone ID: AT_F26K10.C1.o20.tg
atggactttgacgaggagctaaatctttgtattacgaaaggtaaaaatgttgatcattcttttggaggagaagcttcttccacgtccccaagatctatgaagaaaatgaagagtcctagtcgtcctaaaccctatttccaatcctcttcttctccttattcgttagaggctttccctttttctctcgatccaacacttcagaatcagcaacaacaactcggatcatacgttccggtacttgagcaacgacaagacccgacaatgcaaggccagaagcaaatgatctcctttagtcctcaacaacaacaacagcagcagcagtatatggcccagtactggagtgacacattgaatctgagtccaagaggaagaatgatgatgatgatgagccaagaagctgttcaaccttacatcgcaacgaagctgtacagaggagtgagacaacgtcaatggggaaaatgggtcgcagagatccgtaagccacgaagcagggcacgtctttggcttggtacctttgatacagctgaagaagctgccatggcctacgaccgccaagccttcaaattacgaggccacagcgcaacactgaatttcccggagcattttgtgaataaggaaagcgagctgcatgattcaaactcgtcggatcagaaagaacctgaaacgccacagccaagcgaggttaacttggagagcaaggaactaccggtgattgatgttgggagagaggaaggtatggctgaggcatggtacaatgccattacatcgggatggggtcctgaaagtcctctttgggatgatttggatagttctcatcagttttcatcagaaagctcatcttcttctcctctctcttgtcctatgaggcctttcttttga

SEQ ID NO: 1536 - DNA, 1014 bp, Arabidopsis thaliana
  Clone ID: AT_F17J6.C1.o20.tg
atgagacttgatgacgaaccagaaaacgccctagtggtttcgtcttcaccaaagacggttgtggcttctggcaatgtcaagtacaaaggagtcgttcagcaacagaacggtcattggggtgcccagatttacgcagaccacaaaaggatttggcttggaactttcaaatccgctgatgaagccgccacggcttacgatagtgcatctatcaaactccgaagctttgacgctaactcgcaccggaacttcccttggtctacaatcactctcaacgaaccagactttcaaaattgctacacaacagagactgtgttgaacatgatcagagacggttcgtaccaacacaaattcagagattttctcagaatcagatctcagattgttgcgagtatcaacatcgggggaccaaaacaagcccgaggagaagtgaatcaagaatcagacaagtgtttttcttgcacacagctttttcagaaggaattgacaccgagcgatgtagggaaactaaataggcttgtgatacctaaaaagtatgcagtgaagtatatgcctttcataagcgctgatcaaagcgagaaagaagagggtgaaatagtaggatctgtggaagatgtggaggttgtgttttacgacagagcaatgagacaatggaagtttaggtattgttactggaaaagtagccagagctttgtcttcaccagaggatggaatagtttcgtgaaggagaagaatctcaaggagaaggatgttattgccttctacacttgcgatgtcccgaacaatgtgaagacattagaaggtcaaagaaagaacttcttgatgatcgatgttcattgcttttcagacaacggttccgtggtagctgaggaagtaagtatgacggttcatgacagttcagtgcaagtaaagaaaacagaaaacttggttagctccatgttagaagataaagaaaccaaatcagaggagaacaaaggagggtttatgctgtttggtgtaaggatcgaatgtccttag

SEQ ID NO: 1537 - DNA, 630 bp, Arabidopsis thaliana
  Clone ID: AT_T12C24.C1.o26.tg
atgaataatgatgatattattctggcggagatgaggcctaagaagcgtgcgggaaggagagtgtttaaggagacacgtcacccagtttacagaggcataaggcggaggaacggtgacaaatgggtctgcgaagtcagagaaccgacgcaccaacgccgcatttggctcgggacttatcccacagcagatatggcagcgcgtgcacacgacgtggcggttttagctctgcgtgggagatccgcatgtttgaatttcgccgactccgcttggcggcttccggtgccggaatccaatgatccggatgtgataagaagagttgcggcggaagctgcggagatgtttaggccggtggatttagaaagtggaattacggttttgccttgtgcgggagatgatgtggatttgggttttggttcgggttccggctctggttcgggatcggaggagaggaattcttcttcgtatggatttggagactacgaagaagtctcaacgacgatgatgagactcgcggaggggccactaatgtcgccgccgcgatcgtatatggaagacatgactcctactaatgtttacacggaagaagagatgtgttatgaagatatgtcattgtggagttacagatattaa

SEQ ID NO: 1538 - DNA, 636 bp, Arabidopsis thaliana
  Clone ID: AT_T12C22.C1.o10.tg
atggtgaaaacacttcaaaagacaccaaagagaatgtcatctccatcatcatcatcttcatcatcctcatcaacatcatcatcatccataaggatgaagaagtacaagggagtgagaatgagaagttggggttcatgggtttcagagatcagagctcctaatcaaaagacaaggatctggcttggttcttactcaactgctgaagccgcggctagagcctacgacgcagcactcctatgtcttaaaggatcctcagctaataatctcaacttcccagagatctcaacttctctctaccatattatcaacaatggtgataacaacaatgacatgtcccctaagtctatacaaagagtagcagctgcagctgctgctgccaacacagatccttcctcatcatcagtctctacttcatctccattgctttcctctccatctgaagatctctatgatgttgtctccatgtcacagtatgaccaacaagtctccttgtctgaatcatcatcatggtacaactgctttgatggtgatgatcagttcatgttcattaatggagtctccgcgccgtatttgacaacatcactttctgatgatttctttgaggaaggagatatcagattatggaacttctgctga

SEQ ID NO: 1539 - DNA, 501 bp, Arabidopsis thaliana
  Clone ID: AT_F3M18.C1.o26.tg
atggcaccgacagttaaaacggcggccgtcaaaaccaacgaaggtaacggagtccgttacagaggagtgaggaagagaccatggggacgttacgcagccgagatcagagatcctttcaagaagtcacgtgtctggctcggtactttcgacactcctgaagaagccgctcgtgcctacgacaaacgtgctattgagtttcgtggagctaaagccaaaaccaacttcccttgttacaacatcaacgcccactgcttgagtttgacacagagcctgagccagagcagcaccgtggaatcatcgtttcctaatctcaacctcggatctgactctgttagttcgagattcccttttcctaagattcaggttaaggctgggatgatggtgttcgatgaaaggagtgaatcggattcttcgtcggtggtgatggatgtcgttagatatgaaggacgacgtgtggttttggacttggatcttaatttccctcctccacctgagaactga

SEQ ID NO: 1540 - DNA, 567 bp, Arabidopsis thaliana
  Clone ID: AT_T12C24.C1.o11.tg
atggcttctgccggcttaggtagccggagaaaggatccggtgtacagaggaatccggtgccgaagtgggaaatgggtctccgagattcgtgagccgaggaaaaccacgagaatctggcttggaacttaccccatggcagagatggcagcagccgcctatgatgtggctgctatggctcttaaaggaagagaagctgtcttgaacttccctggatccgtcgggtcatacccggttcctgaatcaacatccgcagcagatatacgagccgctgcggcagccgcagcagcaatgaagggatgtgaggaaggggaggaggagaaaaaggcaaaggagaagaagagtagtagttcgaagtcgagagcgcgtgagtgccacgtagataatgatgttggatcttcgtcgtggtgtgggacagagttcatggacgaagaagaagtcttgaatatgcctaatctgctggctaatatggcagaagggatgatggttgcgccgccgtcgtggatgggttctcggccgtcggatgactctccggagaattcaaatgatgaggacttgtggggctattga

SEQ ID NO: 1541 - DNA, 1065 bp, Arabidopsis thaliana
  Clone ID: AT_K19E1.C1.o9.tg
atggacgaatatattgatttccgaccattgaagtacacagagcacaagacttcaatgactaaatacaccaaaaagtcatcggaaaaactttccggtggtaagtcattgaaaaaggttagtatttgttatactgatcctgacgcaacagattcatcaagtgacgaagacgaagaagatttcttgtttcctcgccggagagtcaaaagattcgttaacgagatcactgttgagcctagctgtaacaacgtcgtcaccggagtttcgatgaaagatagaaagagactctcttcttcctccgatgaaactcaatctccggcgtcgagtcgtcaacgtcctaataacaaagtttcagtctccggtcagataaagaagttccgtggtgttagacaacggccatgggggaaatgggcggcggagattagagatccggagcaacgtcggaggatttggctcgggacttttgagacggcggaggaagctgccgtggtttatgataacgccgctataagactccgtggaccggacgctttaactaatttctccataccgcctcaagaagaggaagaagaagaagaaccggaaccggttattgaggagaaaccggttattatgacgacgccaacaccaacaacatcgagttctgaatcaactgaagaagatttacaacatctctcatctcctacttcggttctcaatcaccggtcagaagagattcaacaagtacaacaaccgtttaaatcagctaaacccgaaccgggggtttcaaatgcaccatggtggcataccgggtttaataccggtttaggtgaatcagacgattcatttcctttggatactccgtttcttgacaactatttcaatgaatcaccaccagagatgtcaatatttgaccaaccaatggatcaaattttctgtgaaaatgatgatatcttcaatgatatgttgttcttgggtggtgaaactatgaacattgaagatgagttaacaagttctagtatcaaagatatgggttcaacgtttagtgattttgatgattcattgatatcagatctattagttgcttaa

SEQ ID NO: 1542 - DNA, 792 bp, Arabidopsis thaliana
  Clone ID: AT_T2I1.C1.o20.tg
atggcgaattcaggaaattatggaaagaggccctttcgaggcgatgaatcggatgaaaagaaagaagccgatgatgatgagaacatattccctttcttctctgcccgatcccaatatgacatgcgtgccatggtctcagccttgactcaagtcattggaaaccaaagcagctctcatgataataaccaacatcaacctgttgtgtataatcaacaagatcctaacccaccggctcctccaactcaagatcaagggctattgaggaagaggcactatagaggggtaagacaacgaccatggggaaagtgggcagctgaaattcgggatccgcaaaaggcagcacgggtgtggctcgggacatttgagactgctgaagctgcggctttagcttatgataacgcagctcttaagttcaaaggaagcaaagccaaactcaatttccctgagagagctcaactagcaagtaacactagtacaactaccggtccaccaaactattattcttctaataatcaaatttactactcaaatccgcagactaatccgcaaaccataccttattttaaccaatactactataaccaatatcttcatcaaggggggaatagtaacgatgcattaagttatagcttggccggtggagaaaccggaggctcaatgtataatcatcagacgttatctactacaaattcttcatcttctggtggatcttcaaggcaacaagatgatgaacaagattacgccagatatttgcgttttggggattcttcacctcctaattctggtttttga

SEQ ID NO: 1543 - DNA, 927 bp, Arabidopsis thaliana
  Clone ID: AT_F20B17.C1.o12.tg
atggcaaaagtctctgggaggagcaagaaaacaatcgttgacgatgaaatcagcgataaaacagcgtctgcgtctgagtctgcgtccattgccttaacatccaaacgcaaacgtaagtcgccgcctcgaaacgctcctcttcaacgcagctccccttacagaggcgtcacaagatggactgggagatacgaagcgcatttgtgggataagaacagctggaacgatacacagaccaagaaaggacgtcaaggggcttacgacgaagaagaagcagcagcacgtgcctacgacttagcagcattgaagtactggggacgagacacactcttgaacttccctttgccgagttatgacgaagacgtcaaagaaatggaaggccaatccaaggaagagtatattggatcattgagaagaaaaagtagtggattttctcgcggtgtatcaaaatacagaggcgttgcaaggcatcaccataatgggagatgggaagctagaattggaagggtgtttggtaataaatatctatatcttggaacatacgccacgcaagaagaagcagcaatcgcctacgacatcgcggcaatagagtaccgtggacttaacgccgttaccaatttcgacgtcagccgttatctaaaccctaacgccgccgcggataaagccgattccgattctaagcccattcgaagccctagtcgcgagcccgaatcgtcggatgataacaaatctccgaaatcagaggaagtaatcgaaccatctacatcgccggaagtgattccaactcgccggagcttccccgacgatatccagacgtattttgggtgtcaagattccggcaagttagcgactgaggaagacgtaatattcgattgtttcaattcttatataaatcctggcttctataacgagtttgattatggaccttaa

SEQ ID NO: 1544 - DNA, 1698 bp, Arabidopsis thaliana
  Clone ID: AT_F11M15.C1.o5.tg
atgaattctaacaactggctcgcgttccctctatcaccaactcactcttctttgccgcctcacattcactcttcacaaaattctcatttcaatctaggtttggtcaacgacaatatcgacaacccttttcaaaaccaaggatggaatatgatcaatccacatggtggaggcggcgaaggtggagaggttccaaaagtggctgatttcttaggagtgagcaaatcgggggatcatcacaccgatcacaacctcgtaccttataacgacattcatcaaaccaacgcctccgactactactttcaaaccaatagcttgttacctacagtcgtcacttgtgcctctaatgctcctaataattatgagcttcaagagagtgcacacaatttgcaatctctcactctctctatgggaagtactggagctgccgctgcagaagtcgccactgtgaaagcctcgccggctgagactagtgccgataatagtagcagcactaccaacacaagtggaggagccatcgttgaggctacaccgagacggactttggaaacttttggacaacgaacctctatctatcgtggagttacaagacatagatggaccggtagatatgaagctcatctttgggataatagctgtagaagagaaggacaatcaaggaaaggaagacaaggtgggtatgacaaagaagagaaagcagccagagcatatgatctagctgcacttaaatattggggtccctctactactaccaactttccgataactaactacgagaaggaagtagaggagatgaaaaacatgacgagacaagagtttgtggcttctataagaaggaaaagtagcggattctcgcgtggtgcatccatgtatcgtggagtaacaaggcatcatcaacatggaagatggcaagcaaggatcggccgagttgctggaaacaaagatctctacttgggaacattcagcacggaggaagaagcagcagaagcttatgacatagctgcgataaagtttcgaggtctaaacgcggttacaaactttgagataaatcggtatgatgtgaaagccatcctggagagcaacacacttcctataggaggtggtgcggctaaacggctcaaagaagctcaagctctagaatcatcaagaaaacgagaggaaatgatagccctcggatcaaatttccatcaatatggtgcagcgagcggctcgagctctgttgcttccagctctaggcttcagcttcaaccttaccctctaagcattcaacaaccttttgagcatcttcatcatcatcagcctttacttactctacagaacaacaacgatatctctcagtatcatgattcctttagttacattcagacgcagcttcatcttcaccaacaacaaaccaacaattacttgcagtcttctagtcacacttcacagctctacaatgcttatcttcagagtaaccctggtctgcttcatggatttgtctctgataataacaacacttcagggtttcttggaaacaatgggattggtattgggtcaagctctaccgttggatcatcggctgaggaagagtttccagccgtgaaagtcgattacgatatgcctccttccggtggagctacagggtatggaggatggaatagtggagagtctgctcaaggatcgaatccaggaggtgttttcacgatgtggaatgaataa

SEQ ID NO: 1545 - DNA, 726 bp, Arabidopsis thaliana
  Clone ID: AT_k11j9.C1.o120.tg
atggcaactaaacaagaagctttagccatcgatttcataagccaacaccttctcacagactttgtttccatggaaactgatcacccatctctttttaccaaccaacttcacaactttcactcagaaacaggccctagaaccatcaccaaccaatcccctaaaccgaattcgactcttaaccagcgtaaaccgcccttaccgaatctatccgtctcgagaacggtttcaacaaagacagagaaagaggaagaagagaggcactacaggggagtgagacgaagaccgtggggaaaatacgcggcggagattagggatccgaacaaaaagggttgtaggatctggcttgggacttacgacactgccgtggaagctggaagagcttatgaccaagcggcgtttcaattacgtggaagaaaagcaatcttgaatttccctctcgatgttagggttacgtcagaaacttgttctggggaaggagttatcggattagggaaacgaaagcgagataagggttctccgccggaagaggagaaggcggctagggttaaagtggaggaagaagagagtaatacgtcggagacgacggaggctgaggttgagccggtggtaccattgacgccgtcaagttggatggggttttgggatgtgggagcaggagatggtattttcagtattcctccgttatctccgacgtctcccaacttttccgttatctccgtcacttaa

SEQ ID NO: 1546 - DNA, 921 bp, Arabidopsis thaliana
  Clone ID: AT_F21J9.C1.o70.tg
atggaagaagcaatcatgagactcgaaggtgccgagcacagagaaaccaacatccattctttgaaaagaaagccatcaagaacttcctcgacagctcctggctctcccggaggagtaactaccgcaaaagctgcctccggcgccggcgcttccggtgtctctacgataaggtaccgaggcgtgaggcgtaggccatggggtcgttacgcagctgaaatacgggacccattgtccaaggagagacgatggctcggaacatttgacacggccgaggaagcagcttgcgcatatgactgcgccgctcgagccatgcgtggtcttaaagctcgaaccaacttcgtctacccaatgccttctctcgactcttatcaccaccgtattttctcgtctcctccaatgaatatgttccttctacgagacgtgttaaactctcagtctctttctccgttaaccactttcgcttacccgccttgtaatctttctaacgtaaacgacgttgttcacgagtccttcactaacgtcaacgatgtctgtgaagatctctcgcctaaagctaagaggtcaagtaccattgagaacgagagcctgatatcaaatatctttgaaccagaaccagctagttctggtcttcttcaagaaattgttcaaggcttcttaccaaaacctatctctcaacatgcttctatacctccaaagagcaaccaacagtcggttggtgttttcccgacgatgccagagagcggttttcagacagatgttcgtttagctgacttccatgtcgaaggaaacggattcggtcaggttaaatatcatggagagttaggttgggctgatcatgagaatgggtttgattcagctaagatgcagcagaacggaaatggtggaatgttttatcagtattgctttcatgatgattattag

SEQ ID NO: 1547 - DNA, 753 bp, Arabidopsis thaliana
  Clone ID: AT_MWD22.C1.o13.tg
atggcttcttcacatcaacaacagcaagaacaagaccagtcagctttagatctcataacccaacaccttcttactgatttcccttccttagacacctttgcctccaccatccaccactgcaccacctcaactctaagccaacgcaaaccacctcttgccactatagcagttcctactactgcaccggtggttcaagagaatgatcaaaggcattacagaggcgtcaggagaagaccatggggtaagtatgcggctgagatcagagacccaaacaagaaaggtgttcgtgtctggttaggcacttttgacacagccatggaagctgcaagaggttatgacaaggcagcttttaaactacgaggaagcaaagctattcttaacttcccacttgaagcaggaaagcatgaggacttgggagacaacaagaagactatttctttaaaagcaaagaggaagagacaggtgacggaggatgaaagccagctgatcagccgtaaagctgttaagagggaagaagctcagatcactatcaatgtccagcctaaagagatacagaatgttcaagacgcacaaatagaagagaaaactaatgctccaccagagcttcgacttccagatgtacttgatgctaaggttgtaacatgttcacgtcatacaacatggcaagattacgtagactatttcaagtcaccaaatcaaaggaaacaaccagagagaaatactgaagatgaaagtgtactgattgcattttag

SEQ ID NO: 1548 - DNA, 570 bp, Arabidopsis thaliana
  Clone ID: AT_F2I11.C1.o80.tg
atggtacattcgaggaagttccgaggtgtccgccagcgacaatggggttcttgggtctctgagattcgccatcctctattgaagagaagagtgtggcttggaactttcgaaacggcagaagcggctgcaagagcatacgaccaagcggctcttctaatgaacggccaaaacgctaagaccaatttccctgtcgtaaaatcagaggaaggctccgatcacgttaaagatgttaactctccgttgatgtcaccaaagtcattatctgagcttttgaacgctaagctaaggaagagctgcaaagacctaacgccttctttgacgtgtctccgtcttgatactgacagttcccacattggagtttggcagaaacgggccgggtcgaaaacaagtccgacttgggtcatgcgcctcgaacttgggaacgtagtcaacgaaagtgcggttgacttagggttgactacgatgaacaaacaaaacgttgagaaagaagaagaagaagaagaagctattattagtgatgaggatcagttagctatggagatgatcgaggagttgctgaattggagttga

SEQ ID NO: 1549 - DNA, 1590 bp, Arabidopsis thaliana
  Clone ID: AT_MOE17.C1.o13.tg
atgatcaatccacacggtggaggaggagatgaaggaggagaggttccaaaagtggccgattttctcggtgtgagcaaaccggacgaaaaccaatccaaccacctagtagcttacaacgactcagactactacttccataccaatagcttgatgcctagcgtccaatcaaacgatgtcgttgtagcagcttgtgactccaatactcctaacaacagtagctatcatgagcttcaagagagtgctcacaatctacagtcacttactttgtccatggggaccaccgctggtaataatgttgtagacaaagcttcaccatccgagaccaccggggataacgctagcggtggagcactagccgttgttgagacggccacgccaagacgtgcattggacactttcggacaacgaacctcgatctatcgtggtgtcacaagacatcgatggactggtcgatatgaggctcatctatgggataatagttgtagaagggaaggccagtctaggaaaggaagacaaggtggatatgacaaagaagataaagcagcaagatcatatgatctagctgcacttaagtactggggtccttcaactactactaatttccccattacaaactacgagaaagaagtagaggaaatgaagcacatgacgagacaagagttcgtggctgccattagaaggaaaagtagtggattttcgagaggcgcttcgatgtatcgaggagttacaaggcatcaccaacatggaagatggcaagcaaggatcggccgagtcgccggaaacaaagacctctacttgggaacttttagcactgaggaagaagcagcagaagcttacgatatagctgcaataaagtttagaggacttaatgcagtgaccaacttcgagatcaaccggtacgacgtgaaagccattctagagagtagcactcttcccatcggaggaggcgcagctaaacggctcaaagaagctcaagctcttgagtcttcaaggaaacgcgaggcggagatgatagcccttggttcaagtttccagtacggtggtggctcgagcacaggctctggctccacctcatcaagacttcagcttcaaccttaccctctaagcattcaacaaccattagagccttttctatctcttcagaacaatgacatctctcattacaacaacaacaatgctcacgattcctcctcttttaatcaccatagctatatccagacacaacttcatctccaccaacagaccaacaattacttgcagcaacagtcgagccagaactctcagcagctctacaatgcgtatcttcatagcaatccggctctgcttcatggacttgtctctacctctatcgttgacaacaataataacaatggaggctctagtgggagctacaacactgcagcatttcttgggaaccacggtattggtattgggtccagctcgactgttggatcgaccgaggagtttccaaccgttaaaacagattacgatatgccttccagtgatggaaccggagggtatagtggttggaccagtgagtctgttcaggggtcaaaccctggtggtgttttcactatgtggaatgagtaa

SEQ ID NO: 1550 - DNA, 987 bp, Arabidopsis thaliana
  Clone ID: AT_F3F19.C1.o1.tg
atggaaaaagccttgagaaacttcaccgaatctacccactcaccagaccctaatcctctcacaaaattcttcactgaacctacagcctcacctgttagccgcaaccgcaaactgtcttcaaaagataccactgtaaccatcgccggagctggcagcagcacgacgaggtaccgcggcgtacgccggaggccgtggggacgatacgcggcggagatacgtgacccaatgtcgaaggagagacgttggctcggaacatttgacacggcggaacaagccgcttgtgcttacgactctgcggctcgtgcctttcgtggagcaaaggctcgtactaattttacttatccgacagctgtcattatgcctgaaccaaggttttctttttccaacaagaaatcttcgccgtctgctcgttgtcctcttccttctctaccgttagattcctctacccaaaacttttacggtgcaccggcagcgcagaggatctataatacacagtctatcttcttacgcgacgcctcgtgttcctctcgtaaaacgactccgtataataactctttcaacggctcatcatcttcttactcagcatcgaaaacggcatgcgtttcttattccgaaaacgaaaacaacgagtcgtttttcccggaagaatcttctgatactggtctattacaagaggtcgttcaagagttcttgaagaaaaatcgcggcgttcctccttctccaccaacaccaccgccggtgactagccatcatgacaactctggttatttctctaatctcactatatactctgaaaatatggttcaagagactaaggagactttgtcgtcgaaactagatcgctacgggaattttcaagctaatgacgacggcgtaagagccgtcgcagacggtggtttatcgttgggatcaaacgagtgggggtatcaagaaatgttgatgtacggaactcagttaggctgtacttgccgaagatcgtggggatag

SEQ ID NO: 1551 - DNA, 1167 bp, Arabidopsis thaliana
  Clone ID: AT_MLN21.C1.o1.tg
atgtgtggaggagctataatctccgatttcatacctccgccgaggtccctccgcgtcactaacgagtttatctggccggatctgaaaaacaaagtgaaagcttcaaagaagagatcgaataagcgatccgatttcttcgatcttgacgatgatttcgaagctgatttccaagggtttaaggatgactcggcttttgactgcgaagacgatgatgatgtcttcgtcaatgttaagcctttcgtcttcaccgcaactactaagcccgtagcttccgctttcgtctccactgtaggttcagcatatgccaagaaaactgtagagtccgctgagcaagctgagaaatcttctaagaggaagaggaagaatcaataccgagggattaggcagcgtccttggggaaaatgggctgcggagatccgtgatccgagaaaaggctcccgagaatggcttggaacattcgacactgctgaggaagcagcaagagcttatgatgctgcagcacgcagaatccgtggcacgaaagctaaggtgaattttcccgaggagaagaaccctagcgtcgtatcccagaaacgtcctagtgctaagactaataatcttcagaaatcagtggctaaaccaaacaaaagcgtaactttggttcagcagccaacacatctgagtcagcagtactgcaacaactcctttgacaactcttttggtgatatgagtttcatggaagagaagcctcagatgtacaacaatcagtttgggttaacaaactcgttcgatgctggaggtaacaatggataccagtatttcagttccgatcagggcagtaactccttcgactgttctgagttcgggtggagtgatcacggccctaaaacacccgagatctcttcaatgcttgtcaataacaacgaagcatcatttgttgaagaaaccaatgcagccaagaagctcaaaccaaactctgatgagtcagacgatctgatggcataccttgacaacgccttgtgggacaccccactagaagtggaagccatgcttggcgcagatgctggtgctgtgactcaggaagaggaaaacccagattttgctgttgggggatggtacaagtcacacctcaagctctatgcattggtatctcatgagcctctcttccatagagagtttctcttttaa

SEQ ID NO: 1552 - DNA, 462 bp, Arabidopsis thaliana
  Clone ID: AT_F11C1.C1.o100.tg
atggacgccggagtagcagtaaaagctgacgtggcagtcaaaatgaagagagaaagaccattcaaagggatcagaatgagaaaatgggggaaatgggttgcggagattcgagaacccaacaagcgttcaagactttggctcggctcttactctactcccgaagcggcggcgcgtgcatacgacacggctgtcttttacctcagaggaccaactgctacgctcaacttcccggagcttctgccgtgtacctccgccgaggatatgtcagcggcaacgatcaggaaaaaggcgacggaggtgggagctcaagtagatgcgataggggcgacggtggtgcagaacaacaaacgccgccgcgtttttagtcaaaagcgtgactttggcggcgggttattagagcttgttgacttgaacaagttacctgacccggaaaatctcgatgatgatttggtgggaaaatag

SEQ ID NO: 1553 - DNA, 402 bp, Arabidopsis thaliana
  Clone ID: AT_F19P19.C1.o19.tg
atggatcaaggaggtcgtagcagtggtagtggaggaggaggagccgagcaagggaagtaccgtggagtaaggagacgaccttggggtaaatacgccgcggaaataagagattcgaggaagcacggagagcgtgtgtggctagggacattcgacactgcggaagacgcggctcgagcctatgaccgagccgcctattcaatgagaggcaaagctgccattctcaacttccctcacgagtataacatgggaaccggatcctcatccactgcggctaattcttcttcctcgtcgcagcaagtttttgagtttgagtacttggacgatagcgttttggatgaacttcttgaatatggagagaactataacaagactcataatatcaacatgggcaagaggcaataa

SEQ ID NO: 1554 - DNA, 1095 bp, Arabidopsis thaliana
  Clone ID: AT_F2J7.C1.o8.tg
atgtcggctgtgtctgaatcggctgcgatttcgtctctgtttctaatctcctttgcaattcaatcgtcttcttcttcttcctcgtctgtcttgttctttggtctgagtctgacggctgttcttaacgctcttcgcttctgctccgaacagaggcttattcttgaggttccttccatttccatgggcttaagacttaaaaggacttgttctggtgttgaagtatttggggatatgaagtcctttgtgaaacctgagagagactctttgttgagaacagttcgtattgttttcactgatcctgatgctactgatgattcctcttcctctagcgatgaatggttacctaaacctcgaaaggtaaagcgttttgttcatgagattactttcctccctcaggtctccgagagttctcaggatcgtagcaatgctgtcaaaacccctagaaggaaatctactaggcagtttaagtatcctgtgggagttaggccgaggccatcaggcaaatttgctgctgagattttgaacccattcactaaaactaagaaatggttgggtacttatgaaactcctgcagaagctgagaaggcttatgttgacaagaaggttgagtatgatgcactggcttcttcaggttctgctgtttcctcatcggttgtaacagtgactagccagtgcttgcgttcccctacttctgcttctgtttcttgtgtaagtgctgatgatttgtctaaagaaaagacgtctctgaacaaagatgttgctgcgtctggtgattcaaccaccaaagaagtgttcactactttcgacttttcggatgtgaaaatacctgatctgagattcttagcagcagaagaggattctatggtttctaatgcaaatggtgcagagctagactttgattgtttccttactgactctaacattctgctggatgattactcattgctcgaaaatgatatcaacttcagcaggtttgaaaacagtcttccaagtgagctacctgactgtgatttcactgaaatggaattccagcttgatgatttcaaatttgcctatacagatcatctgacaacaccgcctctcggtttggtttaa

SEQ ID NO: 1555 - DNA, 1086 bp, Arabidopsis thaliana
  Clone ID: AT_F2J7.C1.o3.tg
atggaatacagctgtgtagacgacagtagtacaacgtcagaatctctctccatctctactactccaaagccgacaacgacgacggagaagaaactctcttctccgccggcgacgtcgatgcgtctctacagaatgggaagcggcggaagcagcgtcgttttggattcagagaacggcgtcgagaccgagtcacgtaagcttccttcgtcgaaatataaaggcgttgtgcctcagcctaacggaagatggggagctcagatttacgagaagcatcagcgagtttggctcggtactttcaacgaggaagaagaagctgcgtcttcttacgacatcgccgtgaggagattccgcggccgcgacgccgtcactaacttcaaatctcaagttgatggaaacgacgccgaatcggcttttcttgacgctcattctaaagctgagatcgtggatatgttgaggaaacacacttacgccgatgagtttgagcagagtagacggaagtttgttaacggcgacggaaaacgctctgggttggagacggcgacgtacggaaacgacgctgttttgagagcgcgtgaggttttgttcgagaagactgttacgccgagcgacgtcgggaagctgaaccgtttagtgataccgaaacaacacgcggagaagcattttccgttaccggcgatgacgacggcgatggggatgaatccgtctccgacgaaaggcgttttgattaacttggaagatagaacagggaaagtgtggcggttccgttacagttactggaacagcagtcaaagttacgtgttgaccaagggctggagccggttcgttaaagagaagaatcttcgagccggtgatgtggtttgtttcgagagatcaaccggaccagaccggcaattgtatatccactggaaagtccggtctagtccggttcagactgtggttaggctattcggagtcaacattttcaatgtgagtaacgagaaaccaaacgacgtcgcagtagagtgtgttggcaagaagagatctcgggaagatgatttgttttcgttagggtgttccaagaagcaggcgattatcaacatcttgtga

SEQ ID NO: 1556 - DNA, 486 bp, Arabidopsis thaliana
  Clone ID: AT_F23N20.C1.o12.tg
atgaagcgtattatcagaatctcattcaccgacgcagaagccaccgattcttctagcgacgaagacacggaggagcgtggaggagcatcccagactcggcgccgtgggaaacgcctcgttaaagagatcgtaatcgatccttccgattccgccgataaactcgatgtctgcaaaacacggttcaaaatcaggatcccggcggaatttctcaagacggcgaaaacggagaagaaatatcgtggagtgaggcagaggccgtgggggaagtgggtggcggagatcagatgtggaagaggagcttgtaaaggacgacgtgatcgtctctggctgggtacttttaacactgctgaggaagctgctctagcttatgataacgcttcaattaagctgattggacctcacgcgccgaccaattttggtttgccggcggagaatcaagaggataagacggtgattggagcttctgaggttgctagaggcgcgtga

SEQ ID NO: 1557 - DNA, 1005 bp, Arabidopsis thaliana
  Clone ID: AT_T13J8.C1.o60.tg
atgatggatgagtttatggatcttagaccagtgaagtacacagagcacaagactgttatcagaaagtacactaaaaagtcgtctatggagaggaagaccagtgttcgtgactcggccaggttggttcgggtctcaatgacggatcgtgacgccactgattcatcaagcgacgaggaagagtttctgttccctcgaagacgtgtcaagagattgattaacgagatcagagtcgagcctagcagctcttccaccggcgacgtctctgcttctccgacgaaggaccggaaaagaatcaacgttgattctacggttcaaaagccctctgtttccggccaaaaccagaagaagtaccgcggcgtgagacagcgaccatggggaaaatgggcggcggagattcgtgatcctgagcaacgccggagaatctggctcggtacttttgcaacggcggaggaagctgccatcgtctacgacaacgcagcaatcaaacttcgtggccctgatgctcttaccaacttcaccgtacaaccagaaccagaaccggtacaagaacaagaacaagaaccggagagcaacatgtcggtttcgatatcagaatcaatggacgattctcaacatctatcatctccgacatcggttctcaactaccaaacatatgtctcggaggaaccaatcgatagtcttatcaaaccggttaaacaagagtttcttgaaccagaacaagagccaataagctggcatcttggagaaggtaatactaatactaatgatgattcatttccattggacattacatttctcgacaactatttcaatgaatcattaccagacatctccatcttcgatcaacctatgtctcctattcaaccaacagagaatgatttcttcaacgaccttatgttattcgatagcaacgcagaagaatactactcctccgagatcaaagagattggttcatcgttcaacgatcttgatgattctttgatatccgatctcttacttgtgtga

SEQ ID NO: 1558 - DNA, 771 bp, Arabidopsis thaliana
  Clone ID: AT_T21F11.C1.o9.tg
atggaaaacagctacaccgttgatggtcaccgtcttcaatattccgttccgttaagctccatgcatgaaaccagtcaaaactccgaaacttacggattatccaaagagtcgccgttggtctgcatgcccttgttcgaaaccaacactacttcattcgatatctcttctcttttctcgtttaacccaaaaccagaacccgaaaacacgcatcgtgtcatggacgattccatcgccgccgtcgtgggcgaaaacgttcttttcggtgataaaaacaaagtctctgatcacttgaccaaagaaggtggtgtgaagcgggggcggaagatgccgcagaagaccggaggattcatgggagtgagaaaacggccgtgggggagatggtcggcggagataagagacaggatagggcggtgcagacactggttaggaacgttcgacacggcggaagaggcagcgcgtgcgtatgacgcggcggcgaggaggcttagagggaccaaagccaagaccaatttcgtgattcctccgctttttcccaaggaaatagctcaggctcaggaggataataggatgaggcagaagcagaagaagaagaagaagaaaaaagtgagtgtgaggaagtgtgttaaagtcacatcggttgcacagttgttcgatgatgccaattttataaattcttctagtattaaaggaaatgtgattagttctattgataatcttgaaaaaatgggtctagagcttgatttgagtttagggttgttgtctaggaagtga

SEQ ID NO: 1559 - DNA, 558 bp, Arabidopsis thaliana
  Clone ID: AT_T29M8.C1.o14.tg
atggaagggtcgtcttcttcgatgcagtcaaagtacaaaggagtgaggaagaggaaatggggaaaatgggtttcagagatcagacttcccaacagcagagaacgtatttggttgggctcttacgatactcctgagaaggcggcgcgtgctttcgacgcggctctttattgtctccgtggcaacaacgcaaagttcaatttccctgataatcctccggtgatctccggcggacgtaacttgtcgcgatctgagataagagaagctgctgcgaggttcgctaattcggcggaggatgattcaagtggcggagcaggatacgagatacggcaagaatctgcttcaacatcgatggacgttgattcggagtttttgagtatgcttccgacggttggttcgggtaacttcgcttcggagtttgggttattccctgggtttgatgatttctccgatgaatactccggtgatcgtttcagagagcagctttcgcctacacaagattattatcagcttggagaagagacttacgccgatggttccatgtttctttggaatttttga

SEQ ID NO: 1560 - DNA, 1176 bp, Arabidopsis thaliana
  Clone ID: AT_MVP7.C1.o8.tg
atgtgtgtcttaaaagtggcaaatcaggaagataacgttggcaaaaaagccgagtctattagagacgatgatcatcggacgttatctgaaatcgatcaatggctttacttattcgcagccgaagacgaccaccaccgtcatagcttccctacgcagcagccgcctccatcgtcgtcgtcctcatctcttatctcaggtttcagtagagagatggagatgtctgctattgtctctgctttgactcacgttgttgctggaaatgttcctcagcatcaacaaggaggcggtgaaggtagcggagaagggacttcgaattcgtcttcttcctcggggcagaaaaggaggagagaggtggaggaaggtggcgccaaagcggttaaggcagctaatactttgacggttgatcaatatttctccggtggtagctctacttctaaagtgagagaagcttcgagtaacatgtcaggtccgggcccaacatacgagtatacaactacggcaactgctagtagcgaaacgtcgtcgtttagtggggaccaacctcggcgaagatacagaggagttagacaaagaccatggggaaagtgggcggctgagattcgagatccatttaaagcagctagagtttggctcggtacgttcgacaatgctgaatcagcagcaagagcttacgacgaagctgcacttcggtttagaggcaacaaagccaaactcaacttccctgaaaacgtcaaactcgttagacctgcttcaaccgaagcacaacctgtgcaccaaaccgctgctcaaagaccgacccagtcaaggaactcgggttcaacgactacccttttgcccataagacctgcttcgaatcaaagcgttcattcgcagccgttgatgcaatcatacaacttgagttactctgaaatggctcgtcaacaacaacagtttcagcaacatcatcaacaatctttggatttatacgatcaaatgtcgtttccgttgcgtttcggtcacactggaggttcaatgatgcaatctacgtcgtcatcatcatctcattctcgtcctctgttttccccggctgctgttcagccgccaccagaatcagctagcgaaaccggttatctccaggatatacaatggccatcagacaagactagtaataactacaataatagtccatcctcctga

SEQ ID NO: 1561 - DNA, 711 bp, Arabidopsis thaliana
  Clone ID: AT_F15N18.C1.o180.tg
atggcagaggaatactacagcctccgctcggagagagtaactcagcttcttgtccctaactcggagtctgactcagtgagtgacaaaagcaaagctgagcaaagcgagaagaagactaaacgtgggagagactccggtaaacaccctgtttatcgcggagtaaggatgaggaactggggaaaatgggtgtcggagattcgtgagccgaggaagaaatcacgtatttggctgggaactttcccgacgccggagatggcggcgcgtgcacacgacgtggcggctctgagcattaaaggaacggccgctatactaaacttccctgaactcgctgactcattccctcgacccgtttcattaagccctcgagacattcagacagcagctcttaaagcagctcacatggaaccgacgacgtcgttttcatcttccacgtcttcgtcgtcgtctttgtcttctacgtcttcgctcgagtctcttgtgttggtgatggacctctcgaggactgagtcggaggagctcggtgagattgtggagcttccaagtctcggggcgagttacgacgtcgactcggctaaccttgggaacgagtttgtcttctatgactcagttgactactgtttatatccgccgccgtggggacagtcgtccgaagataactatggtcacggaattagccctaattttggccatggcttgtcatgggatctctaa

SEQ ID NO: 1562 - DNA, 735 bp, Arabidopsis thaliana
  Clone ID: AT_T5M16.C1.o23.tg
atggtgaaacaagaactcaagatccaagttactacttcctcatcatcactctctcattcttcatcttcttcttcttcttcaacgtcggcactacgtcatcaatcttgtaagaacaagataaagaagtataaaggtgtgaggatgcgaagttggggatcatgggttactgaaattagggcaccaaatcaaaagacaagaatctggttaggttcttactccaccgcagaagcagctgctagggcttacgacgctgctctcttgtgtcttaagggacctaaagctaatctcaacttccctaacatcaccactacttctccttttcttatgaacatcgacgaaaagacccttttgtccccaaaatcaatccaaaaggtcgccgctcaagccgctaactcctcttctgaccattttacccctccgtccgatgaaaatgatcatgatcatgatgacggactcgatcaccatccatctgcttcttcttcagctgcatcttcaccaccagatgatgatcatcataatgatgacgatggtgatttggtatcgttgatggaatctttcgtggattacaacgaacacgtgtctctgatggatccatcgctgtatgaatttggacataatgagatcttcttcaccaacggagatccgtttgattattctccacagttacatagctcagaggcaacgatggatgacttctacgacgatgttgatattccgctatggagtttcagttaa

SEQ ID NO: 1563 - DNA, 738 bp, Arabidopsis thaliana
  Clone ID: AT_F11M21.C1.o27.tg
atgaccacagaaaaagagaatgtcactacggccgtggccgtgaaagacggcggagaaaagagtaaggaagtgagtgacaagggcgtaaagaagagaaagaatgtaactaaggccctggccgtgaatgacggcggagaaaagagtaaggaagtgcgttacaggggtgtaaggaggagaccatgggggagatatgctgcggagatccgtgatccggtaaagaaaaaacgggtctggctcgggtccttcaacacgggggaggaagccgccagagcctacgactccgctgccataaggtttcgaggatcgaaagctactactaacttccctctaatcggatactatgggatttcttcggcgacgccggtgaacaacaacctttccgagacggtgagtgatggaaatgccaacctccctctcgttggagacgatgggaatgctttggcttctccggtgaacaacaccctttccgaaacggcgcgtgatggaacacttccatcggattgtcacgacatgttatctccgggggtggctgaagcggttgctggatttttcttagatctgcctgaagttattgcgttgaaagaggagcttgatcgagtttgtcctgaccagtttgagtccattgatatggggttgactattggtcctcaaaccgccgtggaagagcctgagacttcctccgccgtggattgtaagctgcgaatggaaccggatcttgacctcaacgcaagtccctaa

SEQ ID NO: 1564 - DNA, 780 bp, Arabidopsis thaliana
  Clone ID: AT_F6I18.C1.o30.tg
atggtatatataggcaaccaaaaagtggcggcgataggtattcgtgtgtcgaaatggataacatatcatggtttagctcttaatgtcactacagatctaacaccattcaactggatagttccatgtgggattagagaccggaaagttggaaacataaagggcttgcttgaagatggagaacacggaatggttgatgatttgaggttgatcgatatagttcacgagtctttactaaaggaattctctgaagctttccagcttcagatcgaaaagcaaacagtttcagatcctaatattctgggtgtccgaaagaggtcttggggcaaatgggtgtctgaaatcagagttccaaagactggacgacgaatatggctaggttcatacgatgctccagagaaggcagctagagcctatgatgctgctttgttctgtattaggggtgagaagggagtttacaattttcccactgataaaaagccgcagcttccagaaggttctgtccggcctctgtccaagctcgacatacagacaatagcaacaaactatgcttcatcagttgtgcatgtaccttcccatgccaccacactcccggcaacaacccaggttccctctgaagttcctgcttcctctgatgtttctgcttctactgagattacagagatggtcgatgaatattatctcccaaccgatgcaactgcagaatcaatattctcagttgaagacttacaactggacagtttcctcatgatggacattgattggataaacaatctaatctga

SEQ ID NO: 1565 - DNA, 834 bp, Arabidopsis thaliana
  Clone ID: AT_MQN23.C1.o6.tg
atggctttaaacatgaatgcttacgtagacgagttcatggaagctcttgaaccattcatgaaggtaacttcatcttcttctacttcgaattcatcaaatccaaaaccattaactcctaatttcatccctaataatgaccaagtcttaccggtatctaaccaaaccggtccgattgggctaaaccagctcactccaacacaaatcctccaaattcagacagagttacatctccggcaaaaccaatctcgtcgtcgcgctggtagtcatcttctcaccgctaaaccaacctcaatgaagaaaatcgacgtagcaactaaaccggttaaactataccgaggcgtaagacagaggcaatggggtaaatgggtagctgagattcggctacctaaaaaccgaacccggttatggctcggtacgttcgaaacggctcaagaagctgcattagcttacgatcaagcagctcataagatcagaggagacaacgctcgtctcaatttcccagacattgttcgtcaaggacactataaacagatattgtctccgtctatcaacgcaaagatcgaatccatctgcaatagttctgatcttccactgcctcagatcgagaaacagaacaaaacagaggaggtgctctctggtttttccaaaccggagaaagaaccggaatttggggagatatacggatgcggatactcgggctcatctcctgagtcggatataacgttgttggatttctcaagcgactgtgtgaaagaagatgagagtttcttgatgggtttgcacaagtatccttctttggagattgattgggacgctatagagaaactcttctga

SEQ ID NO: 1566 - DNA, 999 bp, Arabidopsis thaliana
  Clone ID: AT_MPE11.C1.o4.tg
atggctgaacgaaagaaacgctcttctattcaaaccaataaacccaacaaaaaacccatgaagaagaaaccttttcagctaaatcacctcccaggtttatctgaagatttgaagactatgagaaaactccgtttcgttgtgaatgatccttacgctactgactactcatcaagcgaagaagaagaaaggagtcagagaaggaaacgttatgtctgtgagatcgatcttcctttcgctcaagctgctactcaagcagaatctgaaagctcatattgtcaggagagtaacaataatggtgtaagcaagactaaaatctcagcttgtagcaaaaaggttttacgcagcaaagcatctccggtcgttggacgttcttctactactgtctcgaagcctgttggtgttaggcagaggaaatggggtaaatgggctgctgagattagacatccaatcaccaaagtaagaacttggttgggtacttacgagacgcttgaacaagcagctgatgcttatgctaccaagaagcttgagtttgatgctctggctgcagccacttctgctgcttcctctgttttgtcaaatgagtctggttctatgatctcagcctcagggtcaagcattgatcttgacaagaagctagttgattcgactcttgatcaacaagctggtgaatcgaagaaagcgagttttgatttcgactttgcagatctacagattcctgaaatgggttgcttcattgatgactcattcatcccaaatgcttgtgagcttgattttctcttaacagaagagaacaacaaccaaatgttggatgattactgtggcatagatgatctggacatcattggtcttgaatgtgacggtccaagcgaacttccagactatgatttctcagatgtggagatcgatcttggtctcattggaaccaccattgacaagtatgctttcgttgatcatatcgcaacaactactcccactcctcttaatatcgcgtgcccataa

SEQ ID NO: 1567 - DNA, 1746 bp, Arabidopsis thaliana
  Clone ID: AT_T10B6.C1.o90.tg
atgaactcgatgaataactggttaggcttctctctctctcctcatgatcaaaatcatcaccgtacggatgttgactcctccaccaccagaaccgccgtagatgttgccggagggtactgttttgatctggccgctccctccgatgaatcttctgccgttcaaacatcttttctttctcctttcggtgtcaccctcgaagctttcaccagagacaataatagtcactcccgagattgggacatcaatggtggtgcatgcaataacattaacaataacgaacaaaatggaccaaagcttgagaatttcctcggccgcaccaccacgatttacaataccaacgagaccgttgtagatggaaatggcgattgtggaggaggagacggtggtggtggcggctcactaggcctttcgatgataaaaacatggctgagtaatcattcggttgctaatgctaatcatcaagacaatggtaacggtgcacgaggcttgtccctctctatgaattcatctactagtgatagcaacaactacaacaacaatgatgatgtcgtccaagagaagactattgttgatgtcgtagaaactacaccgaagaaaactattgagagttttggacaaaggacgtctatataccgcggtgttacaaggcatcggtggacaggtagatacgaggcacatttatgggacaatagttgcaaaagagaaggccagactcgcaaaggaagacaaggaggttatgacaaagaagaaaaagcagctagggcttacgatttagccgcactaaagtattggggaaccaccactactactaacttccccttgagtgaatatgagaaagaggtagaagagatgaagcacatgacgaggcaagagtatgttgcctctctgcgcaggaaaagtagtggtttctctcgtggtgcatcgatttatcgaggagtaacaaggcatcaccaacatggaaggtggcaagctaggatcggaagagtcgccggtaacaaagacctctacttgggaactttcggcacacaggaagaggctgctgaggcttatgacattgcagccattaaattcagaggattaagcgcagtgactaacttcgacatgaacagatacaatgttaaagcaatcctcgagagcccgagtctacctattggtagttctgcgaaacgtctcaaggacgttaataatccggttccagctatgatgattagtaataacgtttcagagagtgcaaataatgttagcggttggcaaaacactgcgtttcagcatcatcagggaatggatttgagcttattgcagcaacagcaggagaggtacgttggttattacaatggaggaaacttgtctaccgagagtactagggtttgtttcaaacaagaggaggaacaacaacacttcttgagaaactcgccgagtcacatgactaatgttgatcatcatagctcgacctctgatgattctgttaccgtttgtggaaatgttgttagttatggtggttatcaaggattcgcaatccctgttggaacatcggttaattacgatccctttactgctgctgagattgcttacaacgcaagaaatcattattactatgctcagcatcagcaacaacagcagattcagcagtcgccgggaggagattttccggtggcgatttcgaataaccatagctctaacatgtactttcacggggaaggtggtggagaaggggctccaacgttttcagtttggaacgacacttag

SEQ ID NO: 1568 - DNA, 948 bp, Arabidopsis thaliana
  Clone ID: AT_F15G16.C1.o20.tg
atggagagacgaacgagacgagtgaagttcacagagaatcgtacggtcacaaacgtagcagctacaccatctaacgggtctccgagactggtccgtatcactgttactgatcctttcgctactgactcgtctagcgacgacgacgacaacaacaacgtcacggtggttccaagagtgaaacgatacgtgaaggagattagattctgccaaggtgaatcttcttcctccaccgcggcgaggaaaggtaagcacaaggaggaggaaagcgtagtggttgaagatgacgtgtcgacgtcggtgaagcctaaaaagtacagaggcgtgagacagagaccttggggaaaattcgcggcggagattagagatccgtcgagccgtactcggatttggcttgggacttttgtcacggcggaggaagctgctatagcgtacgatagagccgcgattcatctcaaaggacctaaagcgctcacgaatttcctaactccgccgacgccaacgccggttatcgatctccaaacggtttccgcctgcgattacggtagagattctcggcagagccttcattcaccgacctctgttctaagattcaacgtcaacgaggaaacagagcatgagattgaagcgatcgagctatctccggagagaaagtcgacggttataaaagaagaagaagaatcgtcggcgggtttggtgttcccggatccgtatctgttaccggatttatctctcgccggcgaatgtttttgggataccgaaattgcccctgaccttttgtttctcgatgaagaaaccaaaatccaatcaacgttgttaccaaacacagaggtttcgaaacaaggagaaaacgaaactgaagatttcgagtttggtttgattgatgatttcgagtcttctccatgggatgtggatcatttcttcgaccatcatcatcactctttcgattaa

SEQ ID NO: 1569 - DNA, 699 bp, Arabidopsis thaliana
  Clone ID: AT_MSG15.C1.o10.tg
atgtcgaataataataattctccgaccaccgtgaatcaagaaacgacgacgtctcgtgaagtctcaatcacattgcctactgatcaatctcctcaaacctcaccaggatcatcttcttctccttcaccgagaccttccggtggatcaccggcgagaagaacggcgactggattatccggcaagcactctattttcagggggattcgactacgtaacggaaaatgggtatcggagattagagagccacgtaaaacgacaagaatttggctcgggacttatccggtaccggagatggctgccgccgcttacgacgtggctgcgttagctttaaaaggacccgacgccgttttgaattttcctggtttagctttgacttacgtggctccggtttcaaactctgctgcggatataagagcggctgctagtagagcagcggagatgaagcaaccggatcagggtggggatgagaaggtattggaaccggttcaacccggcaaagaggaagaattagaagaagtgtcgtgtaactcgtgttcgttggagtttatggatgaggaagcgatgttgaatatgccgactttgttgacggagatggctgaagggatgttgatgagtccaccgagaatgatgatacatccgacgatggaagatgattcgccggagaatcatgaaggagataatctttggagttataaatga

SEQ ID NO: 1570 - DNA, 771 bp, Arabidopsis thaliana
  Clone ID: AT_T8B10.C1.o150.tg
atgggaaaacaaatcaacatagagagtagtgctactcatcatcaagacaatattgtttccgttataacagccacgatatcctcctcctccgtcgtaacgtcttcgtcagactcttggtctacctccaaaagatcgttagtgcaagacaatgactccggagggaaacggcggaagagcaacgttagtgatgataacaagaatccgacgtcgtatagaggagtgaggatgaggagttggggaaaatgggtgtcggagattagagagccgaggaagaaatcaagaatatggcttggcacttatccaacggcagagatggcagctcgtgctcatgatgtggcggctttagctattaaaggcaactccggttttcttaatttccctgaattatccggtttgcttcctcgtccggttagctgctctcctaaggatatacaagctgcagctaccaaagccgccgaagcaaccacgtggcacaaaccggttatcgataagaaattagctgatgagctaagccactctgagttgttgtctaccgctcagtcttcgacttctagtagtttcgtgttttcttcggacacgtcggagacttctagtacggacaaggaaagcaacgaagagacggtgtttgatttgccggaccttttcacggacgggcttatgaacccaaacgatgcgttttgtttatgcaacggcacctttacgtggcagctttacggagaggaggatgtagggttcaggtttgaagagccgtttaattggcaaaatgactaa

SEQ ID NO: 1571 - DNA, 663 bp, Arabidopsis thaliana
  Clone ID: AT_MPF21.C1.o9.tg
atgtctgccatggtctcggccttgacacaggtggtttctgctcgctctcagactgaggctgaaggtgctcactctcagactgaggctgaaggtgctcactcttcttcctcttcggctggacataaaagaggatggcttggaatcgattctgctcctattccctcatcatttgctcgtgtagactcttcacataatccgatcgaggaagcaagggagaaaaaaaggaggtacagaggagtaaggcagagaccatggggcaaatgggcagctgagatacgtgatccacatagagccgctagggtttggctcgggacgtttgatacagcggaggccgcggctagagcctacgacgaggctgcactccggttccgtggaaataaagcaaagctaaatttcccagaggatgtaaggattcttcctcctccccctcctcttcttcgttcaccagctgacacggtggcgaataaagcagaagaggatctgataaattattggagttatacaaagttgttgcaaagttcaggccaacggtcatttctcgagcgaggacaagaagagagtagtaacatatttgaacattcaccaatggaacaacctctgcctccttcaagttctggtccaagttcctctaattttcctgcaccttctctacctaatacatag

SEQ ID NO: 1572 - DNA, 1701 bp, Arabidopsis thaliana
  Clone ID: AT_F12B17.C1.o140.tg
atggagatgttgaggtcatctgatcagtctcagtttgtctcctatgacgcttcttccgccgcttcctcctctccttatctcctcgataatttctatggttggtcaaaccaaaaacctcaggagtttttcaaagaagaagctcagttagcagcagcagcttcaatggcggattcaacaatcttaacaacattcgtagacccacaatctcatcattctcagaatcacatcccaaagctcgaagattttctcggtgactcttcttctatcgttcgttactccgacaacagtcaaaccgacacacaagactcttccctcactcaaatctacgatccacgtcaccaccataaccaaaccggcttttactccgatcaccacgatttcaaaaccatggccggttttcaatccgctttctctactaactccggttcagaggtcgatgactctgcttctatcggaaggactcatcttgctggagactatttgggacacgtggttgaatcttctggtccggagctagggtttcacggtggatctaccggagctttgtcacttggtgttaacgtcaataacaatactaatcaccggaatgataatgataatcattaccgaggcaataacaatggtgagagaatcaacaacaacaacaacaatgacaacgagaagacagattctgagaaggagaaggctgttgtggctgtggaaacatcagattgttctaataagaagattgctgatacgtttggtcaaaggacttcgatttacagaggtgttactcgacatagatggacgggaagatatgaagcacatctatgggataatagctgtaggagagaaggtcaggccaggaagggacgtcaaggtggatatgacaaagaagataaggcagctcgagcttacgatttagcagctctgaaatactggaatgctactgctaccaccaatttccctattacgaattactcgaaagaagtggaggaaatgaagcacatgaccaagcaagagttcattgcctccctcaggaggaagagtagcggtttctctagaggagcttcgatataccgaggtgttacaaggcatcatcaacaaggacgttggcaagcaaggattggccgagttgctgggaacaaagatctttaccttggaacctttgcaacggaagaggaagcagctgaagcgtatgacatagcagcaatcaaattcagaggaataaacgctgtaactaactttgagatgaaccgttacgacgttgaagccatcatgaagagtgcacttcccatcggtggtgcagctaaacgtcttaagctctctttggaagctgctgcttcatcagagcagaaaccaatcctcggtcatcatcaacttcaccatttccagcaacaacaacaacaacaacagcttcagcttcagtcatctcctaatcacagtagcattaacttcgctctctgtcctaattcagcagttcagtctcaacagatcattccttgtggaatcccttttgaagcagctgctctttaccaccaccaccaacaacaacagcaacaccaacagcagcagcagcaacagaacttcttccagcattttccggcgaatgcagcttctgactcgaccgggtctaacaacaactccaacgttcagggaacaatgggacttatggcaccaaatccggctgagttcttcctctggcctaatcagtcttactaa

SEQ ID NO: 1573 - DNA, 786 bp, Arabidopsis thaliana
  Clone ID: AT_F16L1.C1.o5.tg
atgacaacttctatggatttttacagtaacaaaacgtttcaacaatctgatccattcggtggtgaattaatggaagcgcttttaccttttatcaaaagcccttccaacgattcatccgcgtttgcgttctctctacccgctccaatttcatacgggtcggatctccactcattttctcaccatcttagtcctaaaccggtctcaatgaaacaaaccggtacttccgcggctaaaccgacgaagctatacagaggagtgagacaacgtcactggggaaaatgggtggctgagattcgtttaccgaggaatcgaactcgactttggctcggaacattcgacacggcggaggaagctgctttagcttatgacaaggcggcgtataagctccgaggagattttgcgcggcttaatttccctgatctccgtcataacgacgagtatcaacctcttcaatcatcagtcgacgctaagcttgaagctatttgtcaaaacttagctgagacgacgcagaaacaggtgagatcaacgaagaagtcttcttctcggaaacgttcatcaaccgtcgcagtgaaactaccggaggaggactactctagcgccggatcttcgccgctgttaacggagagttatggatctggtggatcttcttcgccgttgtcggagctgacgtttggtgatacggaggaggagattcagccgccgtggaacgagaacgcgttggagaagtatccgtcgtacgagatcgattgggattcgattcttcagtgttcgagtcttgtaaattag

SEQ ID NO: 1574 - DNA, 1668 bp, Arabidopsis thaliana
  Clone ID: AT_MSF19.C1.o5.tg
atgaagaacaataacaacaaatcttcttcttcttctagctatgattcttctttgtctccttcttcttcatcctcctcccaccagaactggctctctttctctctctccaacaataacaacaacttcaattcttcctcaaaccctaatctcacttcctccacatcagatcatcatcatcctcacccttctcacctctctctctttcaagctttctccacttctccagtcgaacggcaagatgggtcaccgggagtttcacccagcgatgccacggcggttctttccgtataccccggcggtcctaaacttgagaacttcctcggcggaggagcctcaacgacgacaacaagaccaatgcaacaagtgcaatctcttggcggcgttgtcttctcttccgacctacagccaccgcttcatcctccgtccgccgccgagatctacgactctgagctcaagtcaatagccgctagcttcctaggaaactactccggtggacactcgtcggaggtctctagcgtacataaacaacaaccgaatcctctagctgtctcagaggcttcgcctactccgaagaagaacgtagagagttttggacaacgtacctcgatttatagaggagtcacaagacatagatggactggaagatacgaagctcatctatgggataatagttgccgaagagaaggccaaagcagaaaaggaagacaaggtggttatgataaggaagataaagcagctagagcttacgaccttgcagctcttaagtattggggtcctacaactacgactaatttcccgatatcaaattacgaatctgaacttgaagaaatgaaacacatgactcgacaagagttcgttgcttctttaagacggaaaagcagtggattctctaggggtgcctccatgtacagaggcgtcactagacatcatcagcatggtcgatggcaggcacgaattggaagagttgcaggcaacaaagacctttatcttggcacatttagcactcaagaggaagctgcagaagcttatgatatagcagcgatcaaattccgcggtctaaatgcagtcaccaatttcgacatcagtcgatatgatgtcaaatcaattgctagctgtaatctccctgtgggtggactaatgcctaaaccttctccagcaaccgcagcggctgacaaaaccgttgatctttctccatccgactctccatctctaaccacaccgtccctcacgttcaatgtggcaacaccggtcaatgaccatggaggaactttttaccacactggtataccaatcaaaccagacccggctgatcattattggtccaacatctttggattccaggcaaacccgaaagcagaaatgcgaccattagcaaactttgggtcggatcttcataacccttctcctggttatgctataatgccggtaatgcaggaaggtgaaaacaactttggtggtagttttgttgggtctgatgggtataacaatcattccgctgcatcgaacccggtctcagcaattccgctgtcctcgacaactacaatgagtaacggtaacgaagggtatggtggaaacataaactggattaataacaacatttcaagttcttaccaaactgcaaaatcaaatctctctgttttgcacacaccggtttttgggttggaatga

SEQ ID NO: 1575 - DNA, 1314 bp, Arabidopsis thaliana
  Clone ID: AT_K21L13.C1.o1.tg
atggcggattcaacaaccttatctacttttttcgatcattctcagactcagattccaaagctggaagatttcctcggtgattcctttgtccgttactctgataaccaaacagagacccaagactcttcttctctcactccattctacgatccacgtcaccgcaccgttgccgaaggagttacagggttcttctctgatcatcatcagccagatttcaagacgataaactcgggaccagaaatcttcgatgactcaacaacttccaacatcggtggtactcatctctccagtcacgtggtggagtcatcaacgacggcgaagttagggtttaacggtgattgcaccaccaccggaggagttttgtctctaggggttaacaacacatcagatcaacctttgagctgtaacaatggcgagagaggtggaaacagtaacaagaagaaaacagtttctaagaaggaaacatcagatgattcaaagaagaagattgtcgaaacattgggacaaagaacttcaatttatcgtggagtcacccgacatagatggactggaagatacgaagcgcatctatgggataacagctgtaggagggaaggtcaagccagaaaaggacgtcaaggtggatatgacaaggaagatagagcagctagagcctatgacttggcagctttaaaatactggggttctactgctactacaaattttccggtctcgagttattcaaaagaacttgaggaaatgaatcacatgaccaagcaagagtttattgcatctcttaggaggaaaagtagcggtttttcgagaggagcttcaatatatagaggtgtcacaaggcatcatcaacaaggtcgctggcaagcaagaatcggccgtgtcgcaggaaacaaagatctttacctcggaacctttgcaaccgaagaggaagcagcagaggcttatgacattgcagccataaagttcagaggaatcaacgcagtaactaactttgagatgaacaggtatgacattgaagctgtcatgaatagttctttacctgtaggaggagcagctgcgaaacgccacaaactcaaactcgctcttgaatctccttcttcatcatcctctgaccataacctccaacaacaacagttgcttccgtcctcttctccctcggatcaaaaccctaactcaatcccatgtggcattccatttgagccttcagttctctattaccaccagaacttctttcagcattatcctttggtctctgactctacaattcaagctcctatgaaccaagctgagtttttcttgtggcctaaccagtcttactaa

SEQ ID NO: 1576 - DNA, 807 bp, Arabidopsis thaliana
  Clone ID: AT_F10M10.C1.o180.tg
atgcattatcctaacaacagaaccgaattcgtcggagctccagccccaacccggtatcaaaaggagcagttgtcaccggagcaagagctttcagttattgtctctgctttgcaacacgtgatctcaggggaaaacgaaacggcgccgtgtcagggtttttccagtgacagcacagtgataagcgcgggaatgcctcggttggattcagacacttgtcaagtctgtaggatcgaaggatgtctcggctgtaactactttttcgcgccaaatcagagaattgaaaagaatcatcaacaagaagaagagattactagtagtagtaacagaagaagagagagctctcccgtggcgaagaaagcggaaggtggcgggaaaatcaggaagaggaagaacaagaagaatggttacagaggagttaggcaaagaccttggggaaaatttgcagctgagatcagagatcctaaaagagccacacgtgtttggcttggtactttcgaaaccgccgaagatgcggctcgagcttatgatcgagccgcgattggattccgtgggccaagggctaaactcaacttcccctttgtggattacacgtcttcagtttcatctcctgttgctgctgatgatataggagcaaaggcaagtgcaagcgccagtgtgagcgccacagattcagttgaagcagagcaatggaacggaggaggaggggattgcaatatggaggagtggatgaatatgatgatgatgatggattttgggaatggagattcttcagattcaggaaatacaattgctgatatgttccagtga

SEQ ID NO: 1577 - DNA, 624 bp, Arabidopsis thaliana
  Clone ID: AT_MBK20.C1.o1.tg
atggcgagttttgaggaaagctctgatttggaagctatacagagccatctcttagaagacttgttggtttgtgatggtttcatgggagattttgacttcgatgcttcttttgtctcaggactttggtgtatagaaccacacgttcctaaacaagaacctgattctccagttcttgatccggattctttcgtcaacgagttcttgcaagtggaaggggaatcatcatcatcatcatcaccagagctgaattcatcgtcatcaacatatgagactgatcagagtgtgaaaaaggcagagaggttcgaagaagaagtagatgctagacattaccgaggagtgaggcgaaggccgtgggggaaatttgcagcagagattcgagatccagcaaagaaaggatcaagaatctggctaggaacatttgagagtgatgttgatgctgcaagagcctatgactgtgcagctttcaagctccggggaagaaaagccgtgctcaacttccctcttgacgccgggaaatatgaagctccagcgaattcaggaaggaaaaggaagagaagtgatgtgcatgaagagcttcaaagaactcagagcaattcatcttcatcttcctgtgatgcattttag

SEQ ID NO: 1578 - DNA, 570 bp, Arabidopsis thaliana
  Clone ID: AT_F3M18.C1.o27.tg
atggcgtcaacgacgtgtgcaagagaggtgcattacagaggagtcagaaagagaccttggggtcgctacgctgctgagatacgagatccttggaagaaaactagggtttggttaggcactttcgacactcccgaagaagctgctcttgcttacgacggcgctgctcgtttcctccgtggtatcaaagccaaaactaacttcccttctcctctctctctcgacctcaaccacctcccttccgctccctcagccgcaaccgccgccgcaaataaccaaccccaccaacaccaacagctctggttcgctgcgcctcctcctgttcctccaagctccgaccatcatcaccaacaccaccgcatttttctccgaaccggtgtgctaaacgacaaaacttcagattactcttctacagaagcgccgctttacttcacctcctcgcctaacacagccacgtcatcgcctggttatcaagtggttgggtttccgatgatgaattcttctccttcccctgttacggtgagacgtggcttagccattgacctcaacgagcctccgccgctttggctttga

SEQ ID NO: 1579 - DNA, 819 bp, Arabidopsis thaliana
  Clone ID: AT_T19P19.C1.o170.tg
atggcagccatagatatgttcaatagcaacacagatccttttcaagaagagctcatgaaagcacttcaaccttataccaccaacactgattcttcttctcctacgtattcaaacacagtcttcggtttcaatcaaaccacatctctcggtctaaaccagctcacaccttaccaaatccaccaaatccaaaaccagcttaaccagagacgtaacataatctctccaaatctagccccaaagcctgtcccaatgaagaacatgaccgctcagaaactctatagaggagttagacaaaggcactggggaaaatgggtagctgagatccgtttacccaagaaccggacccgactctggcttggaactttcgacacagctgaagaagcagccatggcttatgacctagctgcttacaagctaagaggcgagttcgcgagacttaatttcccacagttcagacacgaggatggatactacggaggaggtagctgtttcaatcctcttcattcctctgtcgacgcaaagctccaagagatttgtcagagcttgagaaaaacagaggatattgacctcccctgttctgaaacagagcttttcccgccaaaaacagagtatcaagaaagtgaatatgggttcttgagatctgatgagaattcgttttcagatgagtctcatgtggaatcttcttcgccggaatctggtattactacgttcttggacttttcggattctggatttgatgagattgggagtttcgggctggagaagtttccttctgtggagattgattgggatgcgattagcaaattgtccgaatcttaa

SEQ ID NO: 1580 - DNA, 1167 bp, Arabidopsis thaliana
  Clone ID: AT_F18A5.C1.o10.tg
atgatcacaccaatacacacacaacactccttaattctcgtatatataaacatttattctccacctattttgtcaaaattaagaacaggcttcattctctggacaaacactcaaaaaacaaacaaaaaaaggaacatggaagatcagtttcctaaaatagaaactagcttcatgcacgacaagctcttgtcttctggaatctacgggttcttgagttcttcgacgccgccacaacttctcggtgttccaatatttttggaaggtatgaaatctcctcttcttcctgcttcttcgactccgagctactttgtgtcgcctcatgatcatgagctcacatcttctattcatccatctccggtagcttctgttccttggaactttctagaatcttttcctcagtctcaacatcctgatcatcatccttctaaacctccaaaccttactttgttccttaaagaaccaaagctactagaactttctcaatccgaaagcaacatgagcccttaccataaatacatcccaaactccttttatcaatcagaccaaaacagaaacgaatgggtagagatcaataaaactctaaccaactatccctcgaaaggttttggaaactattggctaagtaccaccaagactcaacccatgaagtcaaaaacaagaaaggttgttcagacgacgaccccaacaaaactgtatagaggagtgagacaaagacactggggcaaatgggtcgcagagattaggcttccaaggaacagaacccgtgtttggctcggcacttttgaaaccgctgagcaagcagcaatggcttacgatacagcagcttatatccttcgtggcgaattcgcacacctcaactttcctgatcttaaacaccagctcaagtccggttctttgcgatgcatgatcgcctcacttttggagtccaagattcaacagatctcatcttcccaagtaagtaactctccttctcctcctcctccaaaagtgggaacaccggagcaaaagaatcatcacatgaagatggagtcaggagaagacgtgatgatgaagaaacagaaaagccataaggaagtgatggaaggagatggtgtacaattgagtaggatgccttctttggatatggatctcatttgggatgctctctcatttcctcattcttcttga

SEQ ID NO: 1581 - DNA, 999 bp, Arabidopsis thaliana
  Clone ID: AT_T24D18.C1.o16.tg
atggaagacatcacacggcagagcaaaaaaacttcggttgagaatgaaaccggcgatgatcagtcagcaacatcagtagtccttaaagctaaacgcaaacgccgatcgcaaccacgagacgctccaccccaacgtagctccgtccatagaggcgtcacaaggcatcgatggactggaaggtacgaagcacatttgtgggataagaatagttggaacgaaactcagaccaagaaaggaagacaaggggcatatgacgaggaagatgcagcagcacgtgcctacgacttagcagcattgaaatattggggacgagacaccatcttgaacttccctttgtgtaattatgaagaagacatcaaagaaatggaaagccagtcaaaggaagagtatattggatctttgagaagaaaaagtagtgggttttcacgaggtgtatcaaaatacagaggcgttgcaaagcatcaccacaatgggagatgggaagctcgaatcggaagagtgtttggcaataaatatttataccttggaacttacgcgacgcaagaagaagcagctatagcgtacgatatcgcagctatcgagtaccgtggactcaacgccgttactaacttcgacatcagccgttatctgaaactcccggtgccggagaaccctatcgataccgcgaataatctcctcgagagtccgcattctgatcttagcccatttataaaacctaaccacgagtctgacttatcacagagtcaatcttcgtcagaggacaacgatgatcggaaaacaaagctcttgaagtcgtcacctttagtggcagaggaggtaatcggaccatcgacgccacctgagattgctccgcctcgtcggagcttcccggaagatatccagacgtatttcgggtgtcaaaactccggcaagttaacggcggaggaagatgatgttatcttcggtgatttagattctttccttacgcctgatttctacagcgagttaaatgattgctaa

SEQ ID NO: 1582 - DNA, 1059 bp, Arabidopsis thaliana
  Clone ID: AT_F23H24.C1.o7.tg
atggacgagatgagcaatgtagccaagacaacgacagagacttcaggcttaactgactctgtcttgagcctcacgaaacgcatgaaacctactgaggttacgaccaccacaaaacctgccttgtccaacacgacgaaattcaaaggagttgttcagcaacagaacggtcattggggtgctcagatttacgcagaccatcgaaggatttggcttggaactttcaaatccgctcatgaagccgctgctgcttacgatagcgcatcgattaagcttcgaagctttgatgctaactcgcaccggaacttcccttggtctgattttaccctccatgaaccggactttcaagagtgctacacgacagaagctgtgttgaacatgatcagagacggttcttatcaacacaagttcagagattttctcagaatccggtctcagattgttgcgaatatcaacatcgtgggatcaaaacaagtcttaggaggaggagaaggtggtcaagaatcgaacaagtgtttctcgtgcacgcagctttttcagaaagaactgacaccgagcgatgtagggaaactgaataggcttgtgatacctaagaagtatgcagtgaagtatatgcctttcataagcgatgatcaaagcgagaaagagacgagtgaaggagtagaagatgtggaggttgtcttttacgacagagcaatgagacaatggaagtttaggtattgttactggagaagtagccagagctttgtcttcaccagaggatggaatggtttcgtgaaggagaagaatctcaaggagaaagatattattgtcttttacacttgcgatgtccccaacaatgtgaagacattagaaggccaaagcaagaccttcttgatgattgatgttcatcacttttcaggcaacggtttcgtggttcccgaggaagtaaacaagacggttcatgagatttctgatgaagagatgaaaacagaaaccctctttacctcgaaggtagaagaagaaaccaaatcagaggagaagaaaggagggtttatgctgtttggtgttaggatccaatag

SEQ ID NO: 1583 - DNA, 1077 bp, Arabidopsis thaliana
  Clone ID: AT_T18A20.C1.o14.tg
atgtgtggaggagctataatatccgatttcattccaccgccgaggtctcgccgtgttactagcgagtttatttggccggatctgaagaagaatttgaaaggatcgaagaaaagctcgaagaatcgttcgaatttcttcgattttgacgctgagttcgaagctgatttccaaggtttcaaagatgattcgtctatcgattgcgatgatgatttcgacgtcggtgatgttttcgccgatgtgaaaccattcgttttcacttcgactccaaaacccgccgtctccgccgctgcggaaggttcagtttttggtaagaaagttactggcttggatggggacgctgagaaatctgcaaataggaagaggaagaatcagtaccgagggattaggcaacgtccttggggaaaatgggctgctgagatacgtgatccaagggaaggtgctagaatctggcttggaacgttcaagacagctgaggaagctgctagagcttacgatgctgcagcgcggagaatccgtggatctaaagctaaggtgaatttccctgaagaaaacatgaaggctaattctcagaaacgctctgtgaaggctaatcttcagaaaccagtggctaaacctaaccctaacccaagtccagctttggttcagaactcgaacatctcctttgaaaatatgtgtttcatggaggagaaacaccaagtgagcaacaacaacaacaaccagtttgggatgacaaactccgttgatgctggatgtaatgggtatcagtatttcagctctgaccagggtagtaattctttcgattgttcggagtttggttggagcgatcaagctccgataactcccgacatctcttctgcggttatcaacaacaacaactcagctctgttctttgaggaagccaatccagctaagaagctcaagtctatggatttcgagacaccttacaacaacactgaatgggacgcttcactggatttcctcaacgaagatgctgtaacgactcaggacaatggtgcaaaccctatggacctatggagtattgatgaaattcattccatgattggaggagtcttctga

SEQ ID NO: 1584 - DNA, 1077 bp, Arabidopsis thaliana
  Clone ID: AT_T25K16.C1.o3.tg
atggatctatccctggctccgacaacaacaacaagttccgaccaagaacaagacagagaccaagaattaacctccaacatcggagcaagcagcagctccggtcccagcggaaacaacaacaaccttccgatgatgatgattccacctccggagaaagaacacatgttcgacaaagtggtaacaccaagcgacgtcggaaaactcaacagactcgtgatccctaaacaacacgctgagaggtatttccctctagactcctcaaacaaccaaaacggcacgcttttgaacttccaagacagaaacggcaagatgtggagattccgttactcgtattggaactctagccagagctacgttatgaccaaaggatggagccgtttcgtcaaagagaaaaagctcgatgcaggagacattgtctctttccaacgaggcatcggagatgagtcagaaagatccaaactttacatagattggaggcatagacccgacatgagcctcgttcaagcacatcagtttggtaattttggtttcaatttcaatttcccgaccacttctcaatattccaacagatttcatccattgccagaatataactccgtcccgattcaccggggcttaaacatcggaaatcaccaacgttcctattataacacccagcgtcaagagttcgtagggtatggttatgggaatttagctggaaggtgttactacacgggatcaccgttggatcataggaacattgttggatcagagccgttggttatagactcagtccctgtggttcccgggagattaactccggtgatgttaccgccgcttcctccgcctccttctacggcgggaaagagactaaggctctttggggtgaatatggaatgtggcaatgactataatcaacaagaagagtcatggttggtgccacgtggcgaaattggtgcatcttcttcttcttcttcagctctacgactaaatttatcgactgatcatgatgatgataatgatgatggtgatgatggcgatgatgatcaatttgctaagaaagggaagtcttcactttctctcaatttcaatccatga

SEQ ID NO: 1585 - DNA, 2028 bp, Arabidopsis thaliana
  Clone ID: AT_F10N7.C1.o180.tg
atggaagtgactcgtggtttctcttttttggacaagtttcttcgaaagcgtcttcactgtggatgcattgcttctagatttatgatggagcttctagagaatggtggtgttacctgtataagttgcgccaagaaatccggactaatttctatgaatgtgagccatgaatctaacggtaaggacttcccctcatttgcttcagcagagcatgtaggcagtgttcttgagaggacaaatctcaagcacttgcttcactttcaaagaatcgaccccactcattcttctcttcaaatgaaacaagaagaatcgctgcttccttccagcctagatgctcttagacacaaaactgaaaggaaagaattgtctgcacagccaaacttgagcatttcacttggacctacgcttatgacaagcccatttcatgatgctgctgttgatgacagaagtaagactaattcgattttccaactggcccctcggtccaggcagctgcttccaaaacctgcaaattcagctcccattgctgctggcatggagcctagtgggagcctggtgtcacagattcatgtcgctcggcctcctccagaaggtcgcgggaagacccaattgcttccccgttactggcctaggattactgaccaagagctgctgcaattatctggacagtatcctcatctgtatgagtccttgactgtttattttcctagctcaaattccaaaattataccactctttgaaaaagttctgagtgcgagcgatgcgggtcgtattggtcgactggttcttccgaaagcatgtgcagaggcatatttcccccctatatctctacccgagggtctcccgttaaagatacaagacataaaagggaaagaatgggtgttccagttcaggttttggcctaataataacagcaggatgtacgttttggagggtgtgactccttgcatacagtccatgcagttgcaagctggtgacactgtaacattcagccgtacagaacctgaaggaaaactcgtaatgggataccgtaaagcgacgaactctacagcgacacagatgttcaagggaagcagtgaacccaatctgaacatgttttccaacagcttgaatccgggatgtggtgacatcaattggtctaaactagagaagtctgaggacatggcaaaggataacttatttcttcagtcgtccttaacttctgctaggaaacgggttcggaacattgggactaagagcaagcgtctgctcattgatagcgtagatgttctggaactgaaaataacttgggaggaggcacaggagctgttgcggcctccccaatccaccaaacccagcatctttacgctggaaaatcaagattttgaagaatatgacaaacttccttctttacataacgaaactttcgtctcaacagagttcaaaaggaggagactggcatcatcaaacgaaaagctaaaccagtcgcaggatgcatctgctctgaatagtttaggaaatgcaggcatcaccacaaccggtgaacagggggaaatcacggttgcagccacgaccaagcatccaagacaccgggcagggtgttcgtgcatcgtctgcagccaaccaccgagcggaaaaggcaaacacaagccgtcatgcacttgcactgtgtgcgaggcagtgaagagacgattcaggacgctcatgctgcggaagcggaacaaaggagaggcaggacaggcaagccagcaggcgcagtcacagtcagagtgcagggacgagacagaagtggagagcattccagcggttgaactagccgcaggggaaaacatcgacttgaactcagacccgggggcttcccgagtaagcatgatgaggcttctccaagctgcagcgtttcctctggaagcatatctgaaacaaaaggctatttccaatacagcaggagaacagcaaagcagtgatatggtcagcacagaacacggttcgtcctcagccgcacaagaaactgagaaagacacaacaaatggagctcatgatcctgtgaactaa

SEQ ID NO: 1586 - DNA, 849 bp, Arabidopsis thaliana
  Clone ID: AT_MHF15.C1.o23.tg
atgtcagtcaaccattactccacagaccaccaccacactctcttgtggcagcaacagcaacaccgccacaccaccgacacatcggagacaaccaccaccgccacatggctccacgacgacctaaaagagtcactcttcgagaagtctctcacaccaagcgacgtcgggaaactcaaccgcctcgtcataccaaaacaacacgcagagaaatacttccctctcaatgccgtcctagtctcctctgctgctgctgacacgtcatcttcggagaaagggatgcttctaagctttgaagacgagtcaggcaagtcatggaggttcagatactcttactggaacagcagtcaaagctatgtcttgactaaaggatggagcagatttgtcaaagacaaacagctcgatccaggcgacgttgttttcttccaacgacaccgttctgattctaggagactcttcattggctggcgcagacgtggacaaggctcctcatcctccgtcgcggccactaactccgccgtgaatacgagttctatgggagctctttcttatcatcaaatccacgccactagtaattactctaatcctccctctcactcagagtattcccactatggagccgccgtagcaacagcggctgagactcacagcacaccgtcgtcttccgtcgtcgggagctcaaggacggtgaggcttttcggtgtgaatctggagtgtcaaatggatgaaaacgacggagatgattctgttgcagttgccaccaccgttgaatctcccgacggttactacggccaaaacatgtactattattactctcatcctcataacatggtaattttaactcttttataa

SEQ ID NO: 1587 - DNA, 987 bp, Arabidopsis thaliana
  Clone ID: AT_F11O4.C1.o9.tg
atgaatcttgaccaagaactcgccgagatcagagctagcagttccgaccacaccaattacttctacagctcggagaggagagagcacatgttcgacaaagtgttgacaccaagtgacgtcggtaaactaaaccggctcgtgattccaaagcaacatgcagagaacttcttccctttagaggacaatcaaaacggcacagtgttggatttccaagacaaaaacggcaagatgtggaggtttcgttactcgtattggaacagtagccaaagctacgtgatgaccaaaggatggagccgtttcgtcaaggagaagaaactcttcgccggagacaccgtctctttctaccgtggctacatccctgacgataacgcacaaccggagagacgacggaaaataatgttcatcgattggaggcctagagccgagataaacttcgtacacaacattaacaatcataacttcgttttcgggtctccgacatatccaacggctaggttttatccggtgacgccggaatattccatgccataccggagttttccaccgttttatcagaaccaatttcaagaacgggaatatttagggtatggttatggtagagttgttaatggtaatggagtgcgttactacgcaggatcaccgttggatcaacatcatcagtggaatcttggtcgatctgagccgttggtttatgactcggttccagtttttccagcggggagggtacctccgtcggcgcctcctcagccgtcgacgacgaagaagctgaggctgtttggggttgacgtggaagagtcttcatcttcaggggatacacgtggcgaaatgggagtagcagggtactcttcctcgtctccggttgtgatcagagacgatgatcaatcattttggaggtcgccacgtggcgaaatggcatcgtcttcttcggctatgcagctaagtgatgatgaagaatataagaggaaagggaaatctttagagctttga

SEQ ID NO: 1588 - DNA, 1776 bp, Arabidopsis thaliana
  Clone ID: AT_F23M19.C1.o4.tg
atggaaagtggcaacgttgtgaatgcacaacctgaattatcaggcataattgatggatccaagagctatgtttacgagcagttatggaaactctgtgcgggacctttgtgtgatattccaaaacttggagaaaaggtttattactttcctcaaggtcacatagagcttgttgagacatctacaagagaagagttgaatgagttacaaccaatttgtgatcttccttctaagcttcaatgtcgtgttattgctattcatcttaaggtggaaaacaatagtgatgagacttatgctgagatcactttgatgccagatacaactgtaagtgaaaatttacaagttgtaatccctactcagaatgaaaatcaatttagaccattagttaattcctttacgaaggttttaacggcctcagatacaagcgctcatggtggattctttgtaccgaaaaaacatgccattgaatgtctcccttcgctggatatgtctcaacctttacctgcacaagaacttcttgctatagatctccatggtaatcaatggagattcaaccacaactatagaggtacaccgcaaagacatttgttaacaactggttggaatgcattcacaacatcaaaaaaattggttgcaggggatgtcatcgtattcgttaggggagagactggagagttacgagttggtatcagacgagcaagacatcaacaagggaatataccttcatcaatagtatcaatagattgtatgagacatggggtagttgcttccgcaaagcatgcttttgataaccaatgtatgttcactgtggtttacaagccaagttacgacaaattcttggacgctgtgaacaataagttcaatgtcggttcaagatttacaatgcggttagagggtgatgatttctctgaaagaagatgttttgggacaattattggagttagtgatttctctcctcattggaaatgttcagagtggcgcagcttagaagtgcagtgggatgaatttacatcatttccgggacctaaaaaagtgtcaccctgggacatcgaacatttaatgcctgcaataaatgttccgcgatcatttttgctcaagaacaagcgtttacgagaagttaatgaaatcggttcttcatcatcacatctcttacctcctatattgacacaaggacaagaaaatgaacaactaagtgttgcctctccgatgaatatttctcttcgttatcgtgatgcaactgaagatgctatgaatccttctaaattgctaatgagctaccctgtccaaccaatgcccaaactaaattacaataaccaaatggttacagaaatggaagaaaatataacaaccaagacaggcactaattttaggctgtttggagtcactctggacactcctccggtgatcaaagatcccattgaagaaattggctcggagatttcgaaacttactgaaggaaaaaagtttggtctaagccaaactttaagatcaccaacagagatccaaaacaagcagttcagttctagtagaacttgtaccaaagttcaaatgcaaggtgtaacaataggaagagctgtggatttaagtgttcttaatggatatgatcagctaatactagaattggagaagctctttgatatcaaaggtcaattgcaaactcgcaaccaatgggaaatagctttcacagatagtgacgaagataagatgcttgttggagacgatccatggcctgaattctgcaacatggtgaagaagatattcattcaaaagaggaggtaa

SEQ ID NO: 1589 - DNA, 1848 bp, Arabidopsis thaliana
  Clone ID: AT_T9I1.C1.o3.tg
atggaaactggcaacgttgtgaatgcacaacctgaattatcaggcataattgatggatccaagagctatatgtacgagcagttatggaaactctgtgcgggacctttgtgtgatattccaaaacttggagaaaatgtttattactttcctcaaggcaatatagagcttgttgatgcatctacaagagaagagttgaatgagttacaaccaatttgtgatcttccttctaagcttcaatgccgtgttattgcaattcatcttaaggtggaaaacaatagtgatgagacttatgctgagatcactttgatgccagatacaactcaagttgtaatccctactcagagtgaaaatcaatttaggccattagttaattcctttacgaaggttttaacggcctctgatacaagcgcttatggtggattctttgttccgaaaaaacatgccattgaatgtctccctccactggatatgtctcagcctctaccggcacaagaacttcttgctaaagatctccatggtaatcaatggagattcagacacagctatagaggtacaccgcaaagacattcgttaacaactggttggaatgaattcacaacatcgaaaaagttggttaaaggagatgttattgtattcgttaggggagagactggagagttacgagttggtatcagacgagcaagacatcaacaagggaatataccttcatcaatagtatcaatagattgtatgagacatggggtaattgcttccgcaaagcatgctcttgataaccaatgtatattcattgtggtttacaagccaaggtcaagtcaatttattgtcagttacgacaaattcttagacgctatgaacaataagttcattgtcggttcaagatttacaatgcggtttgagggtgatgatttctctgaaagaagatattttgggacaattattggagttaatgatttctctcctcattggaagtgttcagagtggcgcagcttagaagttcagtgggatgaatttgcatcattttcgagacctaataaagtgtcaccctgggagatcgaacatttaatgtctgcgttaaatgttccgcgatcatctttgctcaagaacaagcgtttacgagaaactcttgaataccttctcaatattcttgttttatatacatgttcttcatcatcacatatcttgcctcctatattgacacaaggacaagaaattggacaactaagcgtcgcctccccgatgaatacttctcttcgttatcgtgatacaactgaagatgctatgaatccttctagattgctaatgagctaccctgtccaaccaatgcccaaactaaattacaataaccaaatggttacacaaatagaagaaaatataacaaccaaggcagtcactaattttaggctgtttggagtctctctagccattcctctagtgatcaaagatcccattgaagaaattggctcggatatttcgaaacttactgaaggaaaaaagtttggtcaaagccaaactttgagatcaccaatagagatccaaagcaagcagtttggttctactagaacttgtaccaaagttcaaatgcaaggtgtaacaataggaagagctgtggatttaagtgttcttaatggatatgatcagctaatactagaattggagaagctctttgatctcaaaggccaactacaaactcgcaaccaatggaaaatagctttcacagatagtgacgggtatgagatgcttgttggagacgatccatggcctgaattctgcaaaatggtgaagaagatattgatatattcaaaagaggaggtcaaaaacctaaagtccagtaagagtctctcaagttga

SEQ ID NO: 1590 - DNA, 2082 bp, Arabidopsis thaliana
  Clone ID: AT_T1B3.C1.o13.tg
atggagcaagagaaaagcttggatccacaactatggcatgcttgtgcaggatcaatggttcaaatcccttcactgaattcaacggttttttacttcgctcaaggccacacagagcacgctcacgcgcctcctgattttcacgcgccgcgcgttccacctcttatcctctgtcgtgtcgtctccgtgaagttcctcgccgacgctgaaacagacgaagtttttgctaaaattacgcttttgccacttccgggaaacgacttggatctagaaaacgacgccgttttgggtctaactcctccttcttctgacggtaacggtaacggtaaagagaaaccggcgtctttcgctaaaacgttaacgcagtctgacgctaataacggcggtggtttctccgttccacgttattgcgccgagacgattttcccgcggcttgattactcggcggagccaccggttcaaaccgtgattgctaaagacatccacggcgagacttggaaattccggcatatttacagaggaacacctcgccgtcatctcctaaccaccggttggagcactttcgttaaccagaagaaactaatcgccggagactcaatcgtcttcctccgttctgaatccggtgacctctgcgtcggaatccgccgcgctaaacgcggcggtctcggatctaacgcaggatccgacaatccttaccctggattctccggtttcctccgtgacgacgagtcaacaacaacaacatcgaagctaatgatgatgaaacgcaacggaaacaacgacggaaacgccgcggctacagggagggttagagtagaagcagtagcggaagcggtggcgcgtgcagcgtgtggacaagcgtttgaggttgtttattatccacgcgctagtacaccggagttttgcgtaaaagcagctgatgttagatcagcaatgaggataagatggtgtagtggtatgcgttttaaaatggcgtttgaaacagaggattcttctagaatcagttggtttatgggtactgtctccgccgttcaagtcgctgatccaattcgttggcctaattcaccatggcgtctccttcaggtagcttgggacgaaccggatttgttacaaaacgttaagcgggttagtccgtggttagtcgaattggtatcgaacatgcctacaatacatttatctccattctctccgaggaagaagattaggattccgcagccatttgagtttccattccacggtactaaattcccgattttctccccgggattcgccaacaatggcggtggcgagtccatgtgttatctgtcaaacgacaacaataatgctcctgcaggaatacagggagccaggcaagctcaacaactcttcggatcaccatctccgtctttgttgtctgatctcaatcttagtagttacaccggtaacaacaagttacattctccggcgatgtttctatcgagtttcaacccgaggcatcatcattatcaggctagggatagtgagaatagtaataacatttcgtgttctttaactatggggaatcctgctatggttcaggataagaagaagtctgttggttcggttaagactcatcagttcgtgttgttcggtcaaccgattttaaccgaacagcaagttatgaaccgaaaacggtttttggaagaagaggcggaagcggaggaggagaaaggtttagtggctcgtgggttaacatggaattatagtttgcaaggacttgagacgggtcattgtaaagttttcatggaatctgaggatgttggacgcacactcgatctctcggttattggctcgtaccaagaattgtaccggaaattggctgagatgtttcatatagaagagaggtcggatttgttgactcatgttgtgtaccgggatgcaaatggtgttatcaaacgtattggagacgaacctttcagtgatttcatgaaagcaactaaacggctaacaatcaagatggatattggtggcgacaacgtgagaaagacgtggataaccggaatcaggactggtgaaaatggtatagacgcttctacgaagactggtccgctcagcatcttcgcttga

SEQ ID NO: 1591 - DNA, 3261 bp, Arabidopsis thaliana
  Clone ID: AT_T29M8.C1.o7.tg
atgaaagctccatcaaatggatttcttccaagttccaacgaaggagagaagaagccaatcaattctcaactatggcacgcttgtgcagggcctttagtttcattacctcctgtgggaagtcttgtggtttacttccctcaaggacacagcgagcaagttgcagcatcgatgcagaagcaaacagattttataccaaattacccaaatcttccttctaagctgatttgcttgcttcacagtgttacattacatgctgataccgaaacagatgaagtctatgcacaaatgactcttcaacctgtgaataagtatgatagagaagcattgctagcttctgatatgggcttgaagctaaacagacaacctactgagtttttttgcaagactcttactgcaagtgacacaagcactcatggtggattctctgtaccgcgtcgtgcagctgagaaaatattccctcctcttgatttctcgatgcaaccgcctgcgcaagagattgtagctaaagatttacatgatactacatggactttcagacatatctatcgaggccaaccaaaaagacacttgcttaccacaggttggagcgtttttgttagcacaaagagactatttgcgggtgattcagttttgtttgtaagagatgagaaatcacagctgatgttgggtataagacgtgcaaatagacaaactccgactctttcctcatcggtcatatccagcgacagtatgcacattgggatacttgcagctgcagctcatgctaatgccaatagtagcccttttaccatcttcttcaatccaagggcaagtccttcagagtttgtagttcctttagccaaatacaacaaagccttatacgctcaagtatctctaggaatgagattccggatgatgtttgagactgaggattgtggggttcgtagatatatgggtacagtcacaggtattagtgatcttgaccctgtaagatggaaaggctcacaatggcgtaatcttcaggtaggatgggatgaatcaacagctggagataggccaagccgagtatccatatgggaaatcgaacccgtcataactcctttttacatatgtcctcctccatttttcagacctaagtacccgaggcaacccgggatgccagatgatgagttagacatggaaaatgctttcaaaagagcaatgccttggatgggagaagactttgggatgaaggacgcacagagttcgatgttccctggtttaagtctagttcaatggatgagtatgcagcaaaacaatccattgtcaggttctgctactcctcagctcccgtccgcgctctcatcttttaacctaccaaacaattttgcttccaacgacccttccaagctgttgaacttccaatccccaaacctctcttccgcaaattcccaattcaacaaaccgaacacggttaaccatatcagccaacagatgcaagcacaaccagccatggtgaaatctcaacaacaacaacaacaacaacaacaacaacaccaacaccaacaacaacaactgcaacaacaacaacaactacagatgtcacagcaacaggtgcagcaacaagggatttataacaatggtacgattgctgttgctaaccaagtctcttgtcaaagtccaaaccaacctactggattctctcagtctcagcttcagcagcagtcaatgctccctactggtgctaaaatgacacaccagaacataaattctatggggaataaaggcttgtctcaaatgacatcgtttgcgcaagaaatgcagtttcagcagcaactggaaatgcataacagtagccagttattaagaaaccagcaagaacagtcctctctccattcattacaacaaaatctgtcccaaaatcctcagcaactccaaatgcaacaacaatcatcaaaaccaagtccttcacaacagcttcagttgcagctactgcagaagctacagcagcagcaacagcagcagtcgattcctccagtaagctcatccttacagccacaattatcagcgttgcagcagacacaaagccatcaattgcaacaacttctgtcgtctcaaaatcaacagcccttggcacatggtaataacagcttcccagcttcaactttcatgcagcctccacagattcaggtgagtcctcagcagcaaggacagatgagtaacaaaaatcttgtagccgctggaagatcacattctggccacacagatggagaagctccttcttgttcaacctcaccttccgccaataacacgggacatgataatgtttcaccgacaaatttcctgagcagaaatcaacagcaaggacaagctgcatctgtatctgcatctgattcagtctttgagcgcgcaagcaatccggtccaagagctttatacaaaaactgagagccggatcagtcaaggcatgatgaatatgaagagtgctggtgaacatttcagatttaaaagcgcggtaacagatcaaatcgatgtatccacagcgggaacgacgtactgtcctgatgttgttggccctgtacagcagcaacaaactttcccactaccatcatttggttttgatggagactgccaatctcatcatccaagaaacaacttagctttccctggtaatctcgaagccgtaacttctgatccactctattctcaaaaggactttcaaaacttggttcccaactatggcaacacaccaagagacattgagacggagctgtccagtgctgcaatcagttctcagtcatttggtattcccagcattccctttaagcccggatgttcaaatgaggttggcggcatcaatgattcaggaatcatgaatggtggaggactgtggcccaatcagactcaacgaatgcgaacatatacaaaggttcaaaaacgagggtcagtaggtagatcaatagatgttacccgttatagcggctatgatgaacttaggcatgacttagcgagaatgtttggcatcgaaggacagctcgaagatccgctaacctctgattggaaactcgtctacaccgatcacgaaaacgatattttactagttggtgatgatccttgggaagagtttgtgaactgcgtgcagaacataaagatactatcatcagtagaagttcagcaaatgagcttagacggagatcttgcagctatcccaaccacaaaccaagcctgcagcgaaacagacagcggaaatgcttggaaagtacactatgaagacacttctgctgcagcttctttcaacagatag

SEQ ID NO: 1592 - DNA, 2709 bp, Arabidopsis thaliana
  Clone ID: AT_F6F9.C1.o8.tg
atgatggcttcattgtcttgtgttgaagacaagatgaaaacaagttgtttggttaatggtggaggaactataacaacaacaacatctcaatctaccttgcttgaagagatgaagctgttgaaagaccagtcaggtacaagaaagccggtaataaactcggagctatggcacgcttgtgcaggccctttggtgtgtctccctcaagttgggagcttagtgtattacttctcacaaggtcatagcgagcaggttgctgtttcaaccagaagatcagcaacaacacaagttcctaattatccgaaccttccatctcagttgatgtgtcaagtccataatgttactcttcatgctgacaaagacagtgacgaaatctatgctcagatgagtcttcaacctgttcactctgagagagatgtgttccctgtaccagactttggaatgctgagaggaagtaagcacccgactgagtttttctgcaaaacacttactgcaagtgacacaagcacacatggaggtttctcagtgccacgtagagctgcagagaagctatttccaccattggactactcagcacagccgccaacgcaagagcttgtagttcgagatcttcatgagaatacttggacatttcgccatatctaccgagggcaaccaaagagacatctcctaactacaggatggagtttgttcgttggatcgaagagattgagagctggggattctgttttgttcatcagggatgagaagtcacaacttatggtcggtgttaggcgtgccaatcgccaacaaacagcacttccttcatcagttctctcagcggatagtatgcacatcggtgttcttgctgctgctgctcacgcaaccgccaaccgtactccttttttgatattctataatccaagagcttgtccagcagagttcgtgatccctctagctaagtaccgtaaggcgatatgcgggtctcagctctcagttggtatgagatttggaatgatgtttgaaactgaagattccgggaaacgaaggtacatgggaactattgttggaatcagcgatttggatccgttgagatggcctggttctaagtggcgtaaccttcaggtagaatgggatgagcctggatgtaatgataaacctactcgggtcagtccatgggatatcgaaacacctgaaagtctcttcatttttccttctctgacctcaggactcaaacgtcagctccatccatcttactttgctggtgaaactgaatggggtagcttgataaaacggccacttatacgtgttcctgattccgcgaatgggattatgccatatgcatctttccctagtatggcttcggagcagcttatgaaaatgatgatgaggcctcacaacaaccaaaatgtaccatctttcatgtctgagatgcagcagaatattgtaatggggaatggaggtttgctaggagatatgaagatgcagcaacccctgatgatgaaccagaaatctgagatggtgcagccacaaaacaagctaacagtgaacccatctgcttctaatacgagtggccaagaacagaatctttcacagagtatgagtgctcctgctaaacctgagaactctacactctctggttgcagctctggtagagtccaacatggacttgagcagtcaatggaacaggcaagccaggttactacatccacagtgtgtaatgaggaaaaggttaatcagctacttcagaaaccgggtgcttcgtcgcctgtacaagctgatcaatgtcttgacattactcatcagatttaccaaccacagtctgatccaataaatggattctctttcctggaaactgatgagctgacatcacaagtctcttccttccagtctcttgccggatcatacaagcaaccattcattctatcctcccaggattcttcagctgttgtgttaccggattccacaaactcaccgctgtttcatgatgtgtgggacactcagttgaacggtctcaagtttgaccagttcagtcccttgatgcagcaggacctttatgctagtcagaatatctgtatgagtaatagcacaaccagtaacattctagatcctccactctcaaacacagtccttgatgacttctgtgccatcaaagacactgatttccagaaccacccttctggttgtttggttggaaacaacaacactagctttgctcaagatgtccagtcgcagatcacatcagctagctttgcagactcacaggccttctctcgccaagattttccagataattctggaggcactggtacatcttcaagcaatgttgattttgatgattgtagtctgcggcaaaatagtaaaggctcatcatggcagaaaattgcgacaccccgcgtccgaacctacactaaggttcaaaaaaccgggtcagtcgggagatcaattgatgtcacaagctttaaagactacgaggagctaaaatctgctatcgaatgcatgtttggattggaaggactactaactcacccacaaagctcgggttggaagcttgtatatgttgattatgagagtgatgttctgcttgtaggagatgatccatgggaagagtttgtgggatgcgtaaggtgcataaggatattgtcgccaactgaggtccagcagatgagtgaagaagggatgaagcttttgaacagcgcaggcattaacgatcttaagacttctgtttcataa

SEQ ID NO: 1593 - DNA, 3150 bp, Arabidopsis thaliana
  Clone ID: AT_T1M15.C1.o130.tg
atgaaagctccttcatcaaatggagtttctcctaatcctgttgaagaaaggagaaatataaactcagagctatggcacgcttgtgctgggccattgatttcgttgcctccagcaggaagtcttgttgtttacttccctcaaggtcacagtgagcaagtcgcggcttcaatgcagaagcagactgatttcataccaagttacccgaatcttccttccaagctcatatgcatgctccacaatgttacactgaatgctgatcctgagacggatgaggtctatgcgcagatgactcttcagccagtaaacaaatatgacagagatgcattgcttgcttctgacatgggtcttaagctaaacagacaacctaatgaatttttctgcaaaaccctcacggcgagtgacacaagtactcacggtggattttctgtaccccgacgagctgctgagaaaatctttcctgctctggatttctcgatgcaaccaccttgtcaggagcttgttgctaaggatattcatgacaacacatggactttcagacatatttatcgaggtcaaccaaaaaggcacttgctaactacaggctggagtgtgtttgtcagcacgaaaaggctctttgctggagactctgttctttttataagagatggaaaggcgcaacttctgttggggataagacgtgcaaatagacaacagcctgcactttcttcatctgtaatatcaagtgatagcatgcacatcggagttcttgcagctgcagctcatgctaatgctaataacagtcctttcaccattttctacaacccgagggctgctcctgctgagtttgtggttcctttagccaagtataccaaagcgatgtacgctcaagtttccctcggtatgcggtttagaatgatatttgagactgaagaatgtggagttcgtcggtatatgggtacagttaccggtatcagtgatcttgatccagtgagatggaaaaactctcagtggcggaatcttcagattggatgggatgagtcagctgctggtgataggcccagtcgagtttcagtttgggacattgaaccggttttaactcctttctacatatgtcctcctccatttttccgacctcgcttttctggacaacctggaatgccagatgatgagactgacatggagtctgcactgaagagagcaatgccatggcttgataatagcttagagatgaaagacccttcgagtactatctttcctggtctgagtttagttcagtggatgaatatgcagcagcagaacggccagctaccctctgctgctgcacagccaggtttcttcccatcaatgctttcgccaaccgcggcgctgcacaacaatcttggcggcactgatgatccctccaagttactgagctttcagacgccgcacggggggatttcctcctcaaatctccaatttaacaaacagaatcagcaagccccaatgtctcagttgcctcagccaccaactacgttgtcccaacaacagcagctgcagcaattgttgcactcctctttgaaccatcaacaacagcaatcgcagtctcaacaacagcaacaacaacaacagttgctgcagcagcaacaacaattgcagtctcaacaacacagcaacaacaatcaatcgcagtctcagcaacaacaacaattgctccagcagcaacaacaacaacaactgcagcaacaacatcaacaaccgttacagcaacagactcagcagcagcagctaagaacacagccattgcaatctcactcgcatccacagccacaacagttacaacaacataagttgcagcaacttcaggttccacagaatcagctttacaatggtcaacaagcagcgcagcagcatcagtcgcaacaagcatctacacatcatttgcaaccacaattagtttcgggatcaatggcaagcagtgtcatcacgcctccgtccagctcccttaatcaaagctttcaacagcaacaacaacagtctaagcaacttcaacaagcacatcaccatttaggtgctagcactagccagagtagtgtaattgaaaccagcaagtcttcatccaatctgatgtccgcaccgccgcaagagacacagttttcacgacaagtagaacagcagcagcctcctggtctcaacgggcagaatcagcaaacacttttgcagcagaaagctcaccaggcacaggcccaacagatattccagcagagtctcttggaacagccgcatatacagtttcagctgttacagagattacaacagcaacagcagcagcaatttctttcgccgcagtctcagttaccacaccatcaattgcaaagccagcagttgcaacagctgcctactctctctcaaggtcatcagtttccgtcatcttgcactaacaatggcttatcgacgttgcaaccacctcaaatgctggtgagccgacctcaggaaaaacaaaacccaccggttgggggaggggtcaaagcttattcaggcatcacagatggaggagatgcaccttcctcttcaacgtcgccttccaccaacaactgtcagatctcttcttcaggctttctcaacagaagccaaagcgggccagcgatcttgatacctgatgcagcgattgatatgtctggtaatcttgttcaggatctttacagcaaatccgatatgcggctaaaacaagaactcgtgggtcagcaaaagtccaaagctagtttaacagatcatcaactagaagcatctgcctctggaacttcttacggtttagatggaggcgaaaacaacagacaacaaaatttcttggctccaacttttggccttgacggtgattccaggaacagcttgctcggtggagctaatgttgataatggctttgtgcctgacacgctactctcgaggggatatgactcccagaaagatcttcagaacatgctttcaaactatggaggagtgacaaatgacattggtacagagatgtctacttcagctgtaagaactcaatcttttggtgtccccaatgtgcccgccatttcgaacgatctagctgtcaacgatgctggagttcttggtggtggattgtggccagctcagactcagcgaatgcgaacttatacaaagagaattcgtaaactgtgttcagagcattaa

SEQ ID NO: 1594 - DNA, 1962 bp, Arabidopsis thaliana
  Clone ID: AT_F6G3.C1.o110.tg
atgataaatgtgatgaatccaatgaaaggtggaacagagaaaggtttagatcctcagctatggcatgcatgtgctggtggtatggttcgtatgcctcctatgaactctaaagtcttttactttcctcaaggtcacgccgaaaacgcttacgattgtgtcgatttcggtaatctccctattcctcccatggttttgtgtcgtgttttagccattaagtatatggctgatgctgaatctgacgaggttttcgctaaactgagattgattcctttgaaagatgatgagtatgttgatcacgagtatggtgatggtgaagatagtaacggtttcgagagtaatagtgagaaaacgccttcgtttgctaagactttgactcagtctgatgctaataacggtgggggtttctctgttcctcgttattgcgctgagacgattttcccgaggttggattataacgccgagccgccggttcagaccattcttgctaaggatgttcatggtgatgtttggaagttcagacatatttatagagggacgcctcggcgtcaccttcttacaaccggatggagtaattttgtaaaccagaagaagcttgtggcgggagattcgattgtcttcatgagagcggagaatggagatctttgtgtaggtattaggagggctaagagaggagggataggtaatggacccgaatattcagcgggttggaatccgatcggtggaagttgcggctactcttctctgttaagggaagatgaaagcaatagtttgaggagaagtaattgttcccttgcggataggaaggggaaagtgacggctgaatctgttatagaagcagccactcttgctattagcggaagaccgtttgaggttgtgtactatccgagagctagcacttcagagttttgtgtcaaggcattagatgctcgagctgccatgcggattccgtggtgctcaggtatgaggtttaagatggcttttgagacagaggattcgtctcggataagttggtttatggggactgtttcagctgttaatgtctctgatcctatccgttggcctaactctccttggcggcttctacaggtggcgtgggatgagccagatttactccaaaacgtgaagcgagttaacccgtggttggtggaattggtatcaaacgtacatccgatcccgcttacttcgttttcgccaccgaggaaaaagatgcggctacctcagcatccagattacaacaatctgatcaattcgattccagtaccttcattcccaagcaatccccttattagatcaagcccgttaagctctgttctggacaatgttcccgtgggtttacagggagccaggcataatgctcatcagtactacgggttatcatcttcggatcttcaccattactacttgaatagaccacctcctcctcctcctccatcctctctccaactttctccttctctcggtctccgaaacatcgataccaaaaacgaaaaaggattttgctttttgacaatgggaacaacaccatgcaatgataccaaatctaaaaagtcccatattgtattgttcggcaagcttatactacccgaggaacagctatcagaaaaaggctcaacggataccgcaaacatagagaaaacgcagatttcatcaggcgggtcgaaccaaaacggcgttgcgggaagggagttttcttcgtcagatgaaggatcaccttgctctaagaaagttcatgatgcatcaggtttggaaacagggcattgtaaagtgtttatggagtcagacgatgtaggtcgaaccttagacctatcggttcttggttcatacgaagaattgagtcggaaactctctgacatgtttggaatcaaaaagtctgagatgttaagctctgttctctatagggatgcatcaggagccatcaaatacgcaggaaacgaacctttcaggtacatttttttattatag

SEQ ID NO: 1595 - DNA, 1518 bp, Arabidopsis thaliana
  Clone ID: AT_F12G12.C1.o40.tg
atggaaaataatggagaaatgaatgcacagcctgaattatcaggcataattgatataaccaagacttatatgtatgagaaattatggaacatatgtgctggacctttgtgtgttcttccgaaacctggagaaaaagtttattactttcctcaagggcacatcgagctcattgagaattctacaagagatgaattggatcatatcaggccaatttttgatcttccatctaagcttcgatgtcgtgttgtggctattgatcgtaaggtagacaaaaatacagatgaagtctatgctcagatttcgttaatgcctgatacaacagatatgtcccaaccaatatccacacaaaatcttgttgcaaaggatctctatggtcaagaatggagtttcaaacatgtctttagaggtacaccgcagagacatatgtttactagcggcggcggctggagcgtatttgcaacaacaaaaagattgattgttggggatatatttgtactccttagaggagagaatggggagttacgatttggtattaggcgagcaaagcatcaacaaggccacataccttcatcagtaatatcagcaaattgtatgcaacatggagtaatagcttcagtagtgaatgcttttaaaaccaaatgcatgttcaatgtggtttataagccaagctatgacaaatttgttgatgcaatgaacaataattacattgttggttcgagatttaggatgcagtttgagggtaaggatttttctgaaaaaagatacgatgggacgattattggtgtaaatgacatgtctcctcattggaaggattcagaatggcgaagcctaaaagtgcaatgggacgagctttcaccatttctaagacctaatcaggtttcaccttgggacatcgagcatctaattccttcgtcagatatctctcaatcaagtgcaacattatcgaatctttggacatgccaagaaattggacaacggagcatgaattctcctataagtgttcctgagtttagttatcccaatgcaattgaagattcaaagtttctttctggtttgctactgaatcactcactcctagccatacctaatgaaaactataacagcgaccaaatgattcaaccaaggaaagaagatataacaactgaagcaaccactagttgcctcttgtttggagttgatctgaccaaagttcatatgcaaggtgtagccataagtagagctgtggatttaactgctatgcatggatacaatcagctgatacaaaaactggaagaactctttgatctcaaagacgagttacgaactcgcaatcaatgggaaatagtttttacaaacaatgaaggagctgagatgcttgtcggggatgatccatggcctgagttctgcaatatggcgaaaagaatattcatatgctcaaaagaggagataaagaaaatgaagttgaagaacaaattctttcaacctgaatcaaaagctttaacatcttcagacgtaccaccaaacgtcacagataactaa

SEQ ID NO: 1596 - DNA, 657 bp, Arabidopsis thaliana
  Clone ID: AT_F9C16.C1.o11.tg
atggaaagtggcaatgttgtgaatgtacagtctgaattatctggcataattgatgggtccaagagctatatgtacgagcagttatggaaactctgtgcgggacctttgtgtgatattccaaaacttggagaaaaagtgtattactttcctcaaggccatatagagcttgttgaggcatctactagagaagagttgaatgagttacaaccaaattgtgatcttccttctaagcttcaatgtcgtgttattgctattcatcttaaggtggaaaacaatagtgatgagacttatgttgagattactttgatgccagatacaactcaagttgtaatccctactgagaatgaaaatcaatttaggccaatagttaattcctttacaaaggttttaacggcttcagatacaagcgctcaaggtgaattctctgttccatgtaaacatgccattgaatgtctccctccgctggatatgtctcaacctataccggcacaagaacttattgctatagatctccatggtaatcaatggagattcaaacacagctatagagacacaactggttggaatgcattcacaacatcaaaaaaattggttgtaggggatgttattgtattcgctaggggagagactggagagttacgagttggtatcagatga

SEQ ID NO: 1597 - DNA, 1731 bp, Arabidopsis thaliana
  Clone ID: AT_T3F17.C1.o31.tg
atgggatctgttaattgttgtagggttcgtagttcgttgttaatggcgggttggtcgatggtagccgacgaggatgccgtcgattatagcaagactccaaagagtctcgatgcgaataggtctcctgaaagcgttaacccagaatctacagggtttgaaaagaagattaaagaactcatctccttgttccgacctttgcttgattcttttctcgctgagttttgttcggcggatggttttctacctcttcctgcgatgaccggtgaaggaaggaccgttgatttgttcaatctctttttgaacgtgactcacaaaggcggattcgatgcagtttctgagaatgggtcatgggatgaagttgttcaagagtctggattagagtcttatgactctgcatctgcgaaattgatctatgttaagtatcttgatgcatttggtcgatggttgaacagagttgttgcaggagatactgatgttagtagcgtggagttgtctggaatctctgatgctttggtggctagacttaacggttttttatctgaagtgaaaaagaaatatgagctgaggaaaggtagacctgcaaaggagttaggagcagagcttaaatggtttatttcgaaaacgaagagaagatatgataagcaccatgttggcaaagagtctgcttcgaatgatgctgtgaaagagtttcagggatcaaaattggcggagaggagactggagcagataatgatccttgaatcagttactcaggaatgctcttctcctgggaagagaaaacgagaatgtcctttggagacattgaaatggttaagcgatgttgctaaggatccatgtgacccatctcttggtattgtgccagatagatcagagtgggtatcttatggaagtgaagagccatggaaacaacttcttctgtttagggcctcaagaacaaacaatgattcagcttgtgaaaagacttggcagaaagtccagaagatgcacccatgcctgtatgatgatagtgctggagctagttacaatctaagagagagactgagttacgaggattacaagaggggaaagactgggaatggctcggatataggcagttcagatgaggaggatagaccatgtgctctagttgggtcaaagtttcaagctaaagtaccggagtggactggcataacccctgaaagtgattcaaagtggttgggcactcggatctggccactgaccaaagaacaaaccaaggctaatcttcttatcgaaagagatcgtattggaaaaggaagacaagatccttgtggctgccataatccaggatctattgaatgtgtcaagtttcatatcactgcaaaacgggataaactgaaacttgaacttggtccagctttctacatgtggtgttttgatgtcatgggtgaatgtactctccagtattggacagacttagaactgaagaagataaagtctttgatgagttctccaccgtcacttagcccagccttcatccatcaggccaagatgattcttccttcgaagagcagaggaaaaattgtgagctacttctacaacgtgacccttttgcagtacagagcaagtcagagtagaataacacctcacgatatagacagtgatactgatcaaatattcctccgcgcaacagagaatgaaaatccagcccccgaagcaaacacatttcagaaacccgccctgctttcgcctaataaaaaaagatgtcgatag

SEQ ID NO: 1598 - DNA, 2154 bp, Arabidopsis thaliana
  Clone ID: AT_F7K15.C1.o90.tg
atgtttcatggacaagggttttcgagaaaccgttgtaatgttgtggcagttgtttctggagcagagctttgcgatactaataaccagatagatggaacttctcatcaacccaaatacccttttccagatctctcttcttcagggcgtctcaaggtactgaataatcctacgccggaggagttccaggttgctgttaactcttcagcaacggattttgtgtacttgcaaggggaacatagtggagatagtgatgaagttggtcccttagtgttgggatatactgatttttctactcctgatgccttggttactctgtttggttccacattaccgacaacggtttaccttgagctcccaaatggtgaagaattagctcaagcactctactctaagggtgttcaatatgttatttattggaaaaatgttttctcgaaatatgcagcctgccattttcgccattctctgttttcagtcatacagagttcgtgcagcgatacatgggatgtgttccatgttgcagaagcatctttccgactctattgtacaagtgacaatgctgtccttccttctaacagcaaccgtaaaatgaattatgagatgggaccttgcttgcttggagaacctccaaagattgatgtggtttcaccggaagctgatgaactagaagaggaaaattcattagagagcctcccatcaataaagatatatgatgaagatgttactgtgagttacaaagctttttctctatttcaggatacatttttactgggatctttgatggatggacttaatgctctcttgcgaatagaaatgcgaggaagtaagctccataaccgttctagtgctccagcacctcctcttcaagcaggaacatttactcgtggtgtagtgaccatgcgttgtgatgtctcgacctgttcttcagcacacatatcaatgcttgtgtctggaaatgcgcagacctgtttcaaagaaacaaagcggggtttctctgagcctcgtagatctgcctcaatagcttgtggagcaagtgtgtgtgaagtttcgatgcaagtcccaacatgggctctgcaggttttaagacagttggcgccggatgtgtcataccgcagtttagtcgttcttggagtagctagcattcaggggttgtctgttgcttcctttgagaaagatgatgcagaacgtttacttttcttctgcggacaacagatcaatgatacttcaaatcatgatgctcttttatccaaaattcctaactggttaacacctcctttgccaaccagaaaaagatccgagccatgcagagaaagtaaggaaattgaaaacggaggacctacatcaaggaaaatcaacgtggctgctttgagaccaatacctcacacccgtcgacataagatgatacctttctctggttactctgaaattggaagatttgatggtgaccacaccaaaggaagcttgcctatgcctccaaagcatggtgcatcaggtggcactccagtaactcaccgtaaagctttctctggttcgtaccagagaaagcaaatcatctcactaaaccctctacctttaaaaaaacacgactgtggaagagcgcatattcaagtttgctcagaggaggagtttctgagggatgtaatgcagtttctgctaatacgaggacatacccggctagttcctccagggggactagcggagtttccagatgctgttctcaactcaaaacggcttgatctcttcaacttgtatagagaggttgtatcacggggagggttccatgtaggtaatgggatcaactggaagggacaagttttctcaaagatgcgcaaccacacactcacaaacagaatgactggtgtgggtaataccctgaaaagacactatgagacgtatctattggagtatgagtatgctcatgatgatgtagatggagagtgctgtttaatatgtcgcagtagcacagctggtgactgggtgaactgtggatcatgtggagagtgggctcatttcggatgtgacagaaggcctggcctcggcgccttcaaggactatgcaaaaacagatgggttggaatatgtgtgcccaaattgtagtgtctcaaattacaggaagaagtctcagaagacctccaacggtggcttgcttgtaccttag

SEQ ID NO: 1599 - DNA, 1308 bp, Arabidopsis thaliana
  Clone ID: AT_F9H16.C1.o11.tg
atggtggataccgaaatgcaagagcaagatgtgacttttggtgcccttgttgagacaaagtatttagaggaagaacctttggagccagaaaatgatcacaaccctagtgaaatcccgcagccccttcttcttggagatggtcaggctaataatggtcatggcatgaatggtggtgctgttggagttgttgaccactctgaaaggaagactcgtagggtgcaaatgttgagtcctaagactgaaggtgagaatgccaaaaagaggaagacttggctgctggattctgaggcacagggaactgatgaagcagggacaccggtagaacaagtggcgtttctaagagaagtggaggccttttacaaagagagtttcctggaatttaaacctcctaagttttatggacagcctttaaacattctcaagctttggcgagcagtcgtgaacctaggtggctatgaagtggtcaccacaaataagctgtggcggcaagttggagaatccttcaatcctcccaagacatgcacaacagtctcctacacattccgcaatttctatgagaaggcacttttggagtacgaaaagtgtttaaggaataatggtgagcttaaccttcctggttcaacattgattctgtcttccagtgtcgagaaagagccaagtagccatcaaggttcagggtcaggcagggcacgaagagattctgcagctcgtgctatgcaaggttggcatgcgcagcgccttgttggatctggagaggttactgcgcctgctgttaaggataagggcttaatttccaccccaaagcacaagaaactcaaaagcattgggctgcaaaaacacaaacaacaaactagcatggaccatgttgttacaaatgaagctgacaaacagttggctgctgaggttgttgatgttggacccgttgctgactgggtgaagataaatgtcaaagaatctgtgagtaacttctgccaacggctaaagaaacgccaaaaacttgcaaactggatgtttgtttccaatatggaattcttaccaaatctgttttcctttttcttgaattcacagaaggattccttcgagatatttgccttggtacctggacttcttcgcaaagaggttcgaattcaatcagatcctgcgggaaaggtggttataacaggccagccagagcagcttgacaatccttgggggattacacccttcaaaaagattgttgacttatcagcaagaattgatccgcttcacacatccgcggtcatgagcatgcatggacggttgttcatacgagttccgtttgagcagtaa

SEQ ID NO: 1600 - DNA, 1485 bp, Arabidopsis thaliana
  Clone ID: AT_F14G6.C1.o11.tg
atggcggatactgaaatgcaagagcaagatgtgccgtctggtaccaaaggtgttgtagaggagccttcagaactagagaaagacctaaactctattgaaagacctaagtcccctgttccagaggatacgactcatactttggatagtgatgttcatttatctgatgctcccattgctaatcaaattgaggctaatgaagaggttggtggtcagaacagtgttgatgggaggaatggtgatgttgatcagtctgaaaagaagattactagtgatggcggtcaagaggagacaacacttggggaatcaaatcctttgaagggggatccgtcgagtcctcatgttcctgaagaaagtgttaagaagtggaagacatggttgttgagtgatgctgaggccagggaagttgatgaagcaggggcaccacaggatcaagaggcgtttattaaagaagtggaggccttcaacaaggagaatttcctggaatttaaagccccaaagttttacggacagcccttaaattgtctcaagctttggagagccgttatcaagttaggtggctacgatgtggtcaccacatctaagctatggcggcaagttggagaatcgttccatcctccaaagtatggcttgtattgtcctcaatcttcaaccttttccgctttcttaacatgcactacagtctcctggacattccgcattttctatgaaaaggcacttttggagtatgagaagcatttaaggcaaaatggtgagcttaaccttcctggttcagcttctcttccgtcttcaggcattgaaaaggaggcaagtagccatcaagcttcagggtcaggcagaacaagaagagatgctgcagctcgtgctatgcaaggttggcattctcagcgccttcttggatctggggaggttactgagcctattgttaaggagaaaggcttgaattcaaccccaaagcaaaagaacctcaaaaacattggtaatattcctaagcgatggctattgtgtgcagaaacaaaaaacaacaaccggcatggaccttgttttttcacacgaatcagaaaaacagttacgaaagataatcatctcctgtatttttgtgttgcttatgcaagattgctttaccatgtgcaattccatacaatcttatccatcgaaaaaccctgcattgtcaatgtttggtcaactgccgaggttatagatgttggaccccctgcagactgggtgaagatcaatgtcagagaaactaaagactgctttgagatatttgccctggtacctggacttcttcgcgaagaggtccgtgttcagtcagaccctgcagggcggctagttatagcaggccaacctgagcaacttgacaatccttggggaatcacacccttcaaaaaggttgtgaactttcccgcaagaatcgatccgctgcacacgtcagcggttgtgagcctgcatggtcgactgtttgtgcgagtcccatttgagcagtga

SEQ ID NO: 1601 - DNA, 1017 bp, Arabidopsis thaliana
  Clone ID: AT_T23E18.C1.o4.tg
atgtcatcggacaacgaatcgacaccgtctcaagcgacggtagaaatgatggcgacttcgccggcgaagattaaagagtatccagaaccattggctttacatgaagttgtcgtcaaggattcttctgtcttctgggatactctcaggcggtttcactcaattatgtccactaagttcatgattcctgtgattggaggaaaagaactagatttgcatgttttgtatgtggaagtcacgaggaggggaggttacgaaaaggtagtcgtagagaaaaaatggagggaagttggaggagtgtttagattctctgcgacaacaacaagtgcttcgtttgtcttaaggaaacattatctcaatcttctcttccattacgaacaagttcatctcttcactgctcgtggtcctcttcttcatcccatagctacatttcatgcaaatccctcaacgagcaaagaaatggcgctcgtcgaatatactcctccgagtataagatatcataatactcatcctccttctcaaggttcgtcgagtttcacagccataggtacaatagaaggcaaattcgattgtggttatctggtaaaagttaagttgggctcagagattcttaacggcgttctttatcattcggcccagcccggcccatcatcatctccaaccgctgttctaaacaatgccgttgtaccttatgttgaaactgggaggagacggcgtcgtttaggtaaaagacgaagaagcagacgcagagaagatccgaattacccgaaaccgaaccggagcggttacaatttcttctttgctgagaaacattgcaagctcaaatcactttatcccaacaaggagagagagtttacgaaacttatcggagaatcgtggagcaatctctctaccgaagaacgaatggtttatcaagacattggattgaaggataaggaaaggtatcagagggagttgaatgagtacagagaaacgttgagacttagggatggtgacatgacaaacggcaaggctttttag

SEQ ID NO: 1602 - DNA, 1722 bp, Arabidopsis thaliana
  Clone ID: AT_F25E4.C1.o20.tg
atgggaagttttaatgatacttcatgttcatatgttgatgttgagattaagtatgttgatgaatgtgaggagaggttaaggagattgtttgatcaagctttgttggtttttcttgaggaagagggtagtataaagcctctccctgcagttataggtgatggcaaaaatgttgatttgtttaagctgtttgtattggtgagggagagggaagggtttgatactgtgtctaggaaaaggttgtgggaagtagtggctgagaagttaggctttgattgttcactggttccttctttgatattgatttacttgaagtatttgaaccggatggagaaatgggcggtggaggaatctaggattgtgaattgggataataaggatagtgaaaagaaagggtgttatagtggtatgttgcatgagttagggaatggttttaagagtttgttggacaatgggaagtgtcagaaacgtaacagagctgttgcgtttggttgtaaccatatggaagagtcgtgttcagagtttgataggtctaggaagaggtttagagagagtgatgatgatgataaaggagtaggactgtctagtgttgttattagggaggagactgttgtatgtgctgtggaagaaggtttgtcggatttttccttggagaagcgagacgatttaccgggaatgttgaagtggctggctttggttgcaacatctcctcatgatcctgccattggagttataccgcatagttcaaaatggaagcagtataacggtaacaagtgttggctccaagtggctagagcaaaaaactctttgctggttcaaagagacaatgctgaactcagatatagatatcatccatttcggggtcaccaaaatatacatcatccgtctatgtatgaagatgatcgaaagtcgatagggaggttaagatacagcataagacctccaaatttatccaaacactgttcgagctcgtgttgcaatggaagcagtttggtctctctatctaaatcaagatctaccaaatgcagaaaactgacgatcattgcttctgagagagcaggccttactgcaggaacatctagagccagaaagcgaaacaaagcagagatcccgagaaggtgtattaaagtaggacatcaacaccaagcccaagtggatgaatggacagagtccggtgtagatagcgatagtaaatggttaggaacccgtatatggccgccagaaaatagtgaagctttagatcagacgcttggaaatgatttagttggaaaaggaaggccagattcttgcagctgtgagctctctggttttgtggaatgcactaggttgcacattgcagagaagagaatggaactgaaacgtgagctcggcgatgactttttccattggagattcaatcaaatgggagaagaagtgtgtctaagatggacagaagaagaagagaagaggtttaaagacatgatcatcgcggatcctcaatctttctggacaaatgcggcaaaaaatttcccaaagaagaagagagaggagcttgtgagttactacttcaacgtcttcttgattaacagaagacggtatcagaaccgtgtgactccaaaaagtatagacagtgatgacgaaggagcgtttggtagtgttggtggcagttttggtcgtgatgctgttacttcgtctggttcagatgttatgatctgtgctcagaatcgtcagtgtgaggactactga

SEQ ID NO: 1603 - DNA, 960 bp, Arabidopsis thaliana
  Clone ID: AT_MDC11.C1.o14.tg
atgtcgaccgatatttcaccaccctactctcaaactcacgtggagcccgttaatggttatccttctgacaacaagagatgcgacgattcctctgttcctgccaaatatgatgatcttgtccgtaactctgctctcttctgggaaaagctccgagctttcctcggattaaccagcaagactttgaaggttcctactgtgggaggaaacactcttgatctgcatcggcttttcatcgaggttacgtctcgaggtggtatcgaaagggtggtgaaggatcggaaatggaaagaagtgattggtgcattcagttttccgacaacgataacaagtgcatcgtttgtcttgaggaagtattatctcaagtttctttttcagctggaacatgtgtattaccttgaaaaaccggtgtcttcactccaatcaacagatgaagcattgaagagccttgccaatgaatctccaaaccctgaggaaggtattgatgaaccacaagttgggtatgaggttcaaggattcattgatgggaagtttgatagcggctatctggtgacgatgaaattgggttctcaagagctgaaaggtgtcctttaccacattcctcaaacgccaagtcagtctcaacaaaccatggaaacaccttcagccattgtacaatcatcacaacgccggcataggaagaaatcaaagttggctgtagtcgatactcaaaaacccaaatgccacaggagtggctacaacttcttttttgctgagcagtacgcgaggcttaaacctgagtaccatggacaagaacgatccatcactaagaaaataggacacatgtggagcaatctcactgaatctgagaaacaggtttatcaagacaaaggagttaaggatgtggagagatacagaattgagatgttggaatataagtcttcacatgaatcaggagctactgcttctacagtggctcagtag

SEQ ID NO: 1604 - DNA, 1347 bp, Arabidopsis thaliana
  Clone ID: AT_F13M7.C1.o11.tg
atggcatcaagctcttgtctcaagcaagggtcagtgccaatgaacaatgtttgtgttacccctgaagcaacgtatgaggctgtggttgcagaccctaggcttttcatgacttccttggaaaggctgcactctctcttgggtactaaattcatggttccgatcataggaggaagagatttggacttgcacaagcttttcgttgaggtaacctcacgtggcggaatcaataagatacttaatgaaaggagatggaaagaagtaactgctacatttgtctttcctccaactgcaacaaacgcatcatatgttctgcgcaaatactacttctcgctgctgaacaattatgagcaaatctatttcttcagatctaatggtcagattcctccagactctatgcagagtccatctgctagaccatgctttattcagggagccattagaccttcacaagaacttcaagctctaacctttaccccacagcccaagatcaatactgcagaattcctcggaggatcacttgctggatcaaatgtggttggagtgatcgatggaaaattcgaaagtggttaccttgtaactgtaacaattggatcagagcagcttaaaggagttctgtatcagcttcttcctcagaacacagtttcttatcaaactccgcaacagagtcatggtgtcctcccgaacactctgaacatttctgccaatcctcagggggttgcaggaggagtaacaaaacgccgtaggagaagaaagaaatcagagatcaaaagacgtgatcctgatcatccaaaacccaacagaagtggttataacttctttttcgcagagcagcacgcgagacttaaaccgcttcatcctggtaaggatagggatatcagcaggatgattggtgagctatggaacaagctgaatgaagacgaaaaattgatttaccaagggaaggcaatggaggacaaagagcgatacagaactgaaatggaagattacagagagaaaaaaaagaatggacagctcataagcaacgctgttccgctgcaacagagacttccggagcaaaacgtagacatggctgaagctgaccttccaattgatgaagtcgaagaagatgacgaagaaggtgattcaagcggatcctcaggcgaaagcgagccacatgatgatcagagcatagaaactgatcctgaattggaagagccatctctgaatccctcaggtccaaacctaaaccctaatccgactgagatagtggtggctcctaaggagaaaaacggcgatgttgtgatggaaacatctccattgaagaaagccgatgagccaactgtggcggtgactgctgagcagaactga

SEQ ID NO: 1605 - DNA, 1014 bp, Arabidopsis thaliana
  Clone ID: AT_F20N2.C1.o4.tg
atgtcgaccgatagttcacaatttgaagttgttcccgctaatgcctctgctttagacaacgacgtttcctctcacatgtctatgttgtatcaggatattgtccgaaaccccgaacttttctgggagatgctccgggatttccatgaatcttcggacaaaaaatttaagattcctattgtgggtggaaaaagtcttgatctgcatcggcttttcaacgaagtcacatctcgaggtggtcttgaaaaggtgatcaaggatcgtagatgcaaagaagtgattgacgcattcaattttaagacaacaataacaaattcagcatttgttctaaggaagtcgtatcttaaaatgctctttgaatttgagcatctctattacttccaagctccactttctacattttgggaaaaagaaaaagcattgaagctccttatcgaaaaatctgcaaaccgtgacaaagactctcaagaactgaaacctggcaccgtgattactgggatcatcgatgggaaattcgaaagtggttatcttataagcacaaaggtaggctcagaaaagctcaaaggaatgctttaccacatttctcctgaaactaaaagaggcaagaagaaagcaaaatcatctcagggggattctcataagccacctaagcgtcaaagaaccggttacaacttcttcgttgctgagcaatccgtgaggattaaagctgagaacgctggacaaaaagtatctagccctaagaattttgggaacatgtggaccaatctctctgaatctgatagaaaggtttattatgagaaaagtcgtgaggatgggaagaggtataaaatggagattttacagtacagatctttaatggaatctcgtgtggcggaaattgtagccgcaactgatgcaggtacaagtgcaagtgcagcggagactgcggatgaggcgagtcaagaaaatttagccaagactgatgcatgcacaagtgcaagtagtgcagctgagactgaggatgaggtgagtcagtag

SEQ ID NO: 1606 - DNA, 1794 bp, Arabidopsis thaliana
  Clone ID: AT_F9B22.C1.o8.tg
atgttgaagcaaggaacaatagcttggttgtatagagatagactgataaagaatccgaaaataaccaaaaaggcgatggtggatgagatccaaagagagtataaactcactgtaacagaggatcaatgttccaaggcgaagacaatagtaatgagagaaagaaaagcaactcatcaggagcacttttcacgtatttgggattaccaagctgagatcttccgcactaatccgggaacaaagtttgagatcgagactatcccggggccaaccattggaagcttgcaaaggttttatcggcttttcatttgctttaagtcacaaaaagattcttggaaacaaacatgtaggcctattataggaattgatggtgcattcctcaaatgggatataaagggacatctattggctgcgactgggagagatggagataatagaattgtaccaatcgcatgggcagttgtagagatacagaatgatgacaattgggactggtttgtgaggcaactctctgaatctttggatcttcaagatggaagaagtgtagcaatcatctcagacaaacaatcgggtttaggtaaagcaatccacactgtcatcccacaagctgagcatagacaatatgctagacacatcatggacaactggaagaaaaatagccatgacatggagttacaacgactcttctggaagactaatccgctgacatggtctagagctttcttcaggattggtagctgctgcaatgacaacctcaacaacctcagtgagtcgttcaatagaacaattagaaatgcaaggaggaaaccactgctagacatgttggaggacattaggaggcagtgtatggtgcgaaatgagaagaggtttgtcattgcttacaggttgaagagtagattcaccaagagagctcacatggagatagagaagatgattgatggggctgcggtttgtgatagatggatggcaaggcacaacagaattgaggtcagggttggacttgatgattcattctctgtcgacatgaatgatagaacttgcggctgtagaaagtggcaaatgacaggtataccttgtattcatgctgcatctgtcataataggaaataggcaaaaagtggaggactttgtcagtgactggtatacaacttatatgtggaagcaaacatactatgacggtattatgcctgttcaaggcaagatgttatggccaatagtcaacagagtgggagtgctgccacctccatggagaagaggcaatcctggaagaccaaagaatcatgataggaggaaaggcatttatgaatctgcaactgcctctacctcaagagaaggacacaacaaggcaggatgtaaaaatgagacggttgcacctccaccaaaaagaccaaggggtcggcctagaaaagatcaggattcgaggactatcttgtttgggcatggacaatcatggcaaggatcacaaggtgaaccatctgtagcatctcagccagctcagccatcgcagccatctcagccatctcagccatctcagccagctctgtcccaaccgtctctgtcccaacagtcccaaagagcaccatctgcaccatctgaaccacctgcaccacctgcaccatctgcaccatctgcaccatctcaacgagtttcaccaagaggagtagcacagagaagagggtcacagagaggagtgtcaagtagaggaggatcgcagagaagaggatcacagagaggagggtcacagagaggaggattagaagggtgggggtcatggtttgaatgttcaaacaatcggtga

SEQ ID NO: 1607 - DNA, 909 bp, Arabidopsis thaliana
  Clone ID: AT_F14G6.C1.o10.tg
atggacggtggttacgatcaatccggaggagcttctagatactttcacaacctcttcaggcctgagcttcatcaccagcttcaacctcagcctcaacttcaccctttgcctcagcctcagcctcaacctcagcctcagcagcagaattcagatgatgaatctgactccaacaaggatccgggttccgacccagttacctctggttcaaccgggaaacgtccacgtggacgtcctccgggatccaagaacaagccgaagccaccggtgatagtgactagagatagccccaacgtgcttagatctcatgttcttgaagtctcatctggagccgacatagtcgagagcgttaccacttacgctcgcaggagaggaagaggagtctccattctcagtggtaacggcacggtggctaacgtcagtctccggcagccggcaacgacagcggctcatggggcaaatggtggaaccggaggtgttgtggctctacatggaaggtttgagatactttccctcacaggtacggtgttgccgccccctgcgccgccaggatccggtggtctttctatctttctttccggcgttcaaggtcaggtgattggaggaaacgtggtggctccgcttgtggcttcgggtccagtgatactaatggctgcatcgttctctaatgcaactttcgaaaggcttccccttgaagatgaaggaggagaaggtggagagggaggagaagttggagagggaggaggaggagaaggtggtccaccgccggccacgtcatcatcaccaccatctggagccggtcaaggacagttaagaggtaacatgagtggttatgatcagtttgccggtgatcctcatttgcttggttggggagccgcagccgcagccgcaccaccaagaccagccttttag

SEQ ID NO: 1608 - DNA, 2082 bp, Arabidopsis thaliana
  Clone ID: AT_F2H15.C1.o1.tg
atggataagtctattccaatcaaggcaataccggttgcatgtgtcagaccagatttggtagatgacgtgaccaaaaacacatcaacgattcctacaatggtttcaccagttctaaccaatatgccatctgcaacatctcctcttctaatggtcccacctcttcgaacaatctggccatccaacaaggaatggtacgatggagatgctggtcctagtagtactggtccaatcaaacgagaagcgtccgataatactaatgatacagcacacaacacatttgcacctcctccagaaatggtcataccactgatcaccattaggccaagtgatgactctagcaactattcttgtgatgcgggtgctggtcctagtactggtccagtaaaacgaggccgtggccgaccaaaaggttcaaaaaactcaacgccgacggagccgaagaagccaaaagtatatgatcccaacagcttaaaggttacatctcgtgggaatttcgattcagagataaccgaagcagagacagaaactggaaaccaggagatagttgattccgttatgatgcggtttgatgcggttagacgacgattatgccaaataaaccatccggaagacatccttacaacggcaagtggcaattgcacgaaaatgggtgtcaagacaaatacaagaaggagaattggtgcagttcctggaatacacgtcggagatatattctattactggggtgaaatgtgcttagtggggcttcacaaatcaaattatggtggtattgatttttttacggctgcagagagtgcagtggaaggccatgctgctatgtgtgtggtaacagcaggacaatacgatggtgaaaccgaggggcttgacacgttgatctacagcggacagggcggaacggacgtgtacggtaacgctcgtgatcaagagatgaagggcgggaatcttgcactagaagcaagtgtaagcaaagggaatgacgttagagtcgtgagaggagtgatacatcctcatgagaacaatcagaagatatatatctacgatgggatgtatctggtttcaaagttctggacagtgacaggaaaatccggcttcaaggagttcagattcaaattggtgaggaaaccaaaccaacctcctgcttatgcaatctggaaaacagttgaaaatctgaggaaccatgacttgattgattcaaggcaaggttttatacttgaagatctttcttttggagctgagcttttacgagttccgctcgttaatgaagttgatgaagatgacaaaacgattcccgaagattttgattacatcccctctcagtgtcactctggtatgatgacgcatgaatttcattttgatcgtcaatcacttggatgccagaattgtcgacatcagccatgcatgcatcaaaactgcacctgcgtgcagagaaacggtgacctgctaccgtaccataacaacattttggtttgtcgtaaaccattgatttacgagtgcggtggatcttgtccttgccccgaccattgcccaacccggttggttcaaaccggtttgaaactccatttggaagtgttcaagacaagaaactgtggttggggtttacgttcttgggatccaatccgagccggaacttttatctgcgagtttgctggtttgagaaagacaaaagaagaagtagaagaggatgatgattacttgttcgacacgtcaaagatttatcagaggttcagatggaactacgaacctgagcttttgcttgaagatagttgggaacaagtctctgaatttatcaatcttccaacacaagtcttgataagtgctaaggaaaaagggaatgttggtcggttcatgaatcacagttgttcaccgaatgttttctggcagcctattgagtatgaaaacagaggtgatgtatatcttcttatcggactttttgctatgaagcatattcctccgatgacagagttaacatatgactatggagtttcatgtgtggagaggagcgaagaagatgaagtacttctttataaaggcaagaagacctgtctctgtggttcagtcaaatgtcgtggctcttttacctga

SEQ ID NO: 1609 - DNA, 933 bp, Arabidopsis thaliana
  Clone ID: AT_T22E16.C1.o220.tg
atggcgaatccttggtgggtagggaatgttgcgatcggtggagttgagagtccagtgacgtcatcagctccttctttgcaccacagaaacagtaacaacaacaacccaccgactatgactcgttcggatccaagattggaccatgacttcaccaccaacaacagtggaagccctaatacccagactcagagccaagaagaacagaacagcagagacgagcaaccagctgttgaacccggatccggatccgggtctacgggtcgtcgtcctagaggtagacctcctggttccaagaacaaaccaaagagtccagttgttgttaccaaagaaagccctaactctctccagagccatgttcttgagattgctacgggagctgacgtggcggaaagcttaaacgcctttgctcgtagacgcggccggggcgtttcggtgctgagcggtagtggtttggttactaatgttactctgcgtcagcctgctgcatccggtggagttgttagtttacgtggtcagtttgagatcttgtctatgtgtggggcttttcttcctacgtctggctctcctgctgcagccgctggtttaaccatttacttagctggagctcaaggtcaagttgtgggaggtggagttgctggcccgcttattgcctctggacccgttattgtgatagctgctacgttttgcaatgccacttatgagaggttaccgattgaggaagaacaacagcaagagcagccgcttcaactagaagatgggaagaagcagaaagaagagaatgatgataacgagagtgggaataacggaaacgaaggatcgatgcagccgccgatgtataatatgcctcctaattttatcccaaatggtcatcaaatggctcaacacgacgtgtattggggtggtcctccgcctcgtgctcctccttcgtattga

SEQ ID NO: 1610 - DNA, 936 bp, Arabidopsis thaliana
  Clone ID: AT_F9H16.C1.o12.tg
atggaaggcggttacgagcaaggcggtggagcttctagatacttccataacctctttagaccggagattcaccaccaacagcttcaaccgcagggcgggatcaatcttatcgaccagcatcatcatcagcaccagcaacatcaacaacaacaacaaccgtcggatgattcaagagaatctgaccattcaaacaaagatcatcatcaacagggtcgacccgattcagacccgaatacatcaagctcagcaccgggaaaacgtccacgtggacgtccaccaggatctaagaacaaagccaagccaccgatcatagtaactcgtgatagccccaacgcgcttagatctcacgttcttgaagtatctcctggagctgacatagttgagagtgtttccacgtacgctaggaggagagggagaggcgtctccgttttaggaggaaacggcaccgtatctaacgtcactctccgtcagccagtcactcctggaaatggcggtggtgtgtccggaggaggaggagttgtgactttacatggaaggtttgagattctttcgctaacggggactgttttgccacctcctgcaccgcctggtgccggtggtttgtctatatttttagccggagggcaaggtcaggtggtcggaggaagcgttgtggctccccttattgcatcagctccggttatactaatggcggcttcgttctcaaatgcggttttcgagagactaccgattgaggaggaggaagaagaaggtggtggtggcggaggaggaggaggaggagggccaccgcagatgcaacaagctccatcagcatctccgccgtctggagtgaccggtcagggacagttaggaggtaatgtgggtggttatgggttttctggtgatcctcatttgcttggatggggagctggaacaccttcaagaccacctttttaa

SEQ ID NO: 1611 - DNA, 948 bp, Arabidopsis thaliana
  Clone ID: AT_F7O18.C1.o4.tg
atggcgaatccatggtggacaggacaagtgaacctatccggcctcgaaacgacgccgcctggttcctctcagttaaagaaaccagatctccacatctccatgaacatggccatggactcaggtcacaataatcatcaccatcaccaagaagtcgataacaacaacaacgacgacgatagagacaacttgagtggagacgaccacgagccacgtgaaggagccgtagaagcccccacgcgccgtccacgtggacgtcctgctggttccaagaacaaaccaaagccaccgatcttcgtcactcgcgattctccaaatgctctcaagagccatgtcatggagatcgctagtgggactgacgtcatcgaaaccctagctacttttgctaggcggcgtcaacgtggcatctgcatcttgagcggaaatggcacagtggctaacgtcaccctccgtcaaccctcgaccgctgccgttgcggcggctcctggtggtgcggctgttttggctttacaagggaggtttgagattctttctttaaccggttctttcttgccaggaccggctccacctggttccaccggtttaacgatttacttagccggtggtcaaggtcaggttgttggaggaagcgtggtgggcccattgatggcagcaggtccggtgatgctgatcgccgccacgttctctaacgcgacttacgagagattgccattggaggaggaagaggcagcagagagaggcggtggtggaggcagcggaggagtggttccggggcagctcggaggcggaggttcgccactaagcagcggtgctggtggaggcgacggtaaccaaggacttccggtgtataatatgccgggaaatcttgtttctaatggtggcagtggtggaggaggacagatgagcggccaagaagcttatggttgggctcaagctaggtcaggattttaa

SEQ ID NO: 1612 - DNA, 621 bp, Arabidopsis thaliana
  Clone ID: AT_F14L17.C1.o23.tg
atggaaaccgtcgggcgtccacgtggcagacctcgaggttccaaaaacaaacctaaagctccaatctttgtcaccattgaccctcctatgagtccttacatcctcgaagtgccatccggaaacgatgtcgttgaagccctaaaccgtttctgccgcggtaaagccatcggcttttgcgtcctcagtggctcaggctccgttgctgatgtcactttgcgtcagccttctccggcagctcctggctcaaccattactttccacggaaagttcgatcttctctctgtctccgccactttcctccctcctctacctcctacctccttgtcccctcccgtctccaatttcttcaccgtctctctcgccggacctcaggggaaagtcatcggtggattcgtcgctggtcctctcgttgccgccggaactgtttacttcgtcgccactagtttcaagaacccttcctatcaccggttacctgctacggaggaagagcaaagaaactcggcggaaggggaagaggagggacaatcgccgccggtctctggaggtggtggagagtcgatgtacgtgggtggctctgatgtcatttgggatcccaacgccaaagctccatcgccgtactga

SEQ ID NO: 1613 - DNA, 3387 bp, Arabidopsis thaliana
  Clone ID: AT_F3F19.C1.o25.tg
atgacgccgagaagcgagacgcataaaatcggcggtgttactaaccctagaaacgctgatagaaaaggaaaggcggttgctttcagtgatgacctagtaataccgactcttcctccgcctccgattggaacactgaccggacaaggcgtttctcgaggtcacactgatgatatggatatgggtgattggagaaggtttagggaagtgggtttgttgaatgaggcttcaatggagaagaaagatcaagaagctcttcttgaaaagatctctacacttgaaaaagagttatatggctatcagcacaatatggggcttcttcttatggagaacaaagagttggtttcaaagcacgaacaactaaatcaggcattccaagaagctcaagaaatccttaaaagggaacagtcatcacatctgtatgcattgacgacggttgaacaacgtgaagaaaacttgaggaaagccttgggtctggaaaagcaatgtgtgcaagagcttgagaaggctcttcgtgaaattcaagaggagaatagcaagataaggctgagttctgaagctaaattagttgaagcaaatgctctggttgctagtgtaaacgggagatcttcagacgtggaaaacaagatttactctgccgaaagcaagctcgcagaggcaactagaaagagctccgagctgaaattgagattgaaggaagtggagactcgtgaaagtgtcctgcaacaagaacggctttcatttactaaagagcgagaatcatatgaagggactttccaaaagcaaagagagtaccttaatgaatgggagaaaaagcttcaaggaaaggaagaatccataactgagcagaagagaaacctgaatcaaagagaggaaaaggttaatgaaatagaaaagaagctgaagctgaaagaaaaagaacttgaagaatggaatagaaaggttgatttgtctatgtcgaagtctaaagaaactgaagaggacataactaaacgtttggaagaattgactacaaaagagaaagaagctcacacactccagatcacgctattggcaaaggagaatgagttacgagcatttgaagagaagctcattgctagagaagggacagaaattcagaagcttattgatgatcagaaagaggtattaggttccaaaatgctggaatttgaactggaatgtgaagaaataagaaaatctctggacaaggaactccaaagaaagatagaagagctcgaacgacagaaagttgaaattgatcatagcgaggagaagttggagaaaaggaatcaagcaatgaataagaagtttgaccgagtgaatgaaaaggagatggaccttgaagcaaagttaaaaactattaaagaaagagaaaagatcatacaagctgaggagaaaaggttgagtttggaaaaacaacagttgctttctgataaggagagtctggaagacctacaacaagagattgaaaaaatccgagctgagatgaccaaaaaggaagaaatgattgaagaagaatgcaaaagtcttgaaatcaagaaagaagagagggaagaatacctgagactgcaatctgaactcaagtcccagatagagaaatctagagtccacgaggagtttctttctaaggaagtggaaaatctgaagcaagagaaagagagatttgaaaaggagtgggaaatattggatgagaagcaagcagtatacaataaagagcggataagaatatctgaagaaaaagaaaagttcgagaggtttcaactactggaaggagaaagattgaagaaagaagagagtgctttgagggtgcagataatgcaggaactggatgacattagactgcagagagaatcatttgaagccaatatggaacatgaacgatcagcgttacaggaaaaagtcaaacttgagcaatctaaggtgattgacgatcttgaaatgatgagaaggaatcttgaaattgaacttcaggaaagaaaagaacaagacgagaaagatctactagacagaatggctcagttcgaggacaaaagaatggcagagcttagtgatatcaatcaccagaagcaggctttgaacagggagatggaagaaatgatgtccaaaaggagtgctctccaaaaggaaagtgaagaaattgcaaagcacaaggacaaactaaaagagcagcaagtagagatgcataatgacatcagtgaacttagtacactcagcatcaacctcaagaaacgtagggaagtgtttggccgtgaaagatctcgttttctagcatttgttcaaaagctcaaggattgtgggagttgtgggcagctggtaaatgactttgtactctctgatctccagctaccatctaatgatgaagtagctattctaccacctattggagttttgaatgaccttccaggaagctctaatgcatctgactcttgtaatatcaagaaatctctagacggagatgcctctggaagtgggggatctagaaggcccagcatgtcgatactgcagaagtgcacttcaataattttctcaccaagtaaaagagttgaacatgggattgacactggcaagcctgagcagcgtctatcctcctcagtggcagttggtatggaaacaaaaggtgaaaagcctctgccagttgatctacgtctgcgaccatctagtagctccattccggaggaggatgaggaatatacagacagtagagtacaagaaacatctgagggttctcagctatctgagtttcaaagttccaggcgtggacgtggcagacctagaaaagccaagcctgctttgaatcctacaagttcggtgaagcatgccagccttgaagaatcatcaaaagatgaattgagtggtcacgtttctgttactagtaagaagacaacaggcggaggtggaaggaaaagacagcatattgatgatactgctactggtggaaagcgtaggagacaacagacagttgctgtcttgccacagaccccaggccaaagacactacaatctgagacggaagaagactgtagaccaagttccagcagatgttgaggataatgcagctgctggtgaagatgatgcagacattgctgcctctgccccatcaaaggacactgtcgaagaaactgtggtggagactcttcgagctagaaggatagaaacaaatgcagatgttgtttctgctgagaacaatggagatgtaccggttgcaaatgtggaaccaacagtaaatgaggatacgaacgaggatggagatgaagaagaagatgaagctcaagatgatgataatgaagaaaatcaagatgatgacgatgatgatgatggggatgatgatggatcaccaagacccggtgaaggatccataagaaagaagctttggacttttctcactacataa

SEQ ID NO: 1614 - DNA, 975 bp, Arabidopsis thaliana
  Clone ID: AT_T12H17.C1.o200.tg
atggatccagtacaatctcatggatcacaaagctctctacctcctcctttccacgcaagagactttcaattacatcttcaacaacagcaacaagagttcttcctccaccatcaccagcaacaaagaaaccaaaccgatggtgaccaacaaggaggatcaggaggaaaccgacaaatcaagatggatcgtgaagagacaagcgacaacatagacaacatagctaacaacagcggtagtgaaggtaaagacatagatatacacggtggttcaggagaaggaggtggtggctccggaggagatcatcagatgacaagaagaccaagaggaagaccagcgggatccaagaacaaaccaaaaccaccgattatcatcacacgggacagcgcaaacgcgcttagaacccacgtgatggagatcggagatggctgcgacttagtcgaaagcgttgccacttttgcacgaagacgccaacgcggcgtttgcgttatgagcggtactggaaatgttactaacgtcactatacgtcagcctggatctcatccttctcctggctcggtagttagtcttcacggaaggttcgagattctatctctctcaggatcttttctccctcctccggctcctcctacagccaccggattgagtgtttacctcgctggaggacaaggacaggtggttggaggaagcgtagttggtccgttgttatgtgctggtcctgtcgttgtcatggctgcgtcttttagcaatgcggcgtacgaaaggttgcctttagaggaagatgagatgcagacgccggttcatggcggaggaggaggaggatcattggagtcgccgccaatgatgggacaacaactgcaacatcagcaacaagctatgtcaggtcatcaagggttaccacctaatcttcttggttcggttcagttgcagcagcaacatgatcagtcttattggtcaacgggacgaccaccgtattga

SEQ ID NO: 1615 - DNA, 1020 bp, Arabidopsis thaliana
  Clone ID: AT_F16J13.C1.o120.tg
atggatccagttcaatctcatggatcacaaagctctcttcctcctcctttccatgctagagatttccaattacatcttcaacaacaacaacaacatcaacaacaacatcaacaacaacaacaacaacagttctttctccaccatcatcagcaaccacaaagaaaccttgatcaagatcacgagcagcaaggagggtcaatattgaatagatctatcaagatggatcgcgaagagacaagcgataacatggacaacatcgctaataccaacagcggtagcgaaggtaaagagatgagtttacacggaggagaaggaggaagcggtggtggaggaagtggagaacagatgacaagaaggccaagaggaagaccagcaggatccaagaacaaacctaaagctccaataatcataacaagagacagcgcaaacgcgcttcgaactcacgtcatggagataggagacggatgtgacatagttgactgtatggctacgttcgctagacgccgccaaagaggcgtttgcgttatgagcggtacaggaagcgttactaacgtcactatacgtcagcctggatcgccacctggctcggtggttagccttcacggccggtttgaaatcctctctctttcgggatctttcttgcctccgcctgcgccgcctgcagccaccggactaagcgtttacctagccggaggacaagggcaggtcgttggaggtagtgtggtgggacctttgttgtgttcgggtcctgtggtggttatggcggcttcttttagcaatgcggcgtacgaaaggctgcctttggaagaagatgagatgcagacgccagttcaaggaggcggtggaggaggaggaggtggtggtggaatgggatctcccccgatgatgggacagcaacaagctatggcagctatggcggcggctcaaggactaccaccgaatcttcttggttcggttcagttgccaccgccacaacagaatgatcagcagtattggtctacgggtcggccaccgtattga

SEQ ID NO: 1616 - DNA, 798 bp, Arabidopsis thaliana
  Clone ID: AT_T4C21.C1.o280.tg
atggatgaggtatctcgttctcatacaccgcaatttctatcaagtgatcatcagcactatcaccatcaaaacgctggacgacaaaaacgcggcagagaagaagaaggagttgaacccaacaatataggggaagacctagccacctttccttccggagaagagaatatcaagaagagaaggccacgtggcagacctgctggttccaagaacaaacccaaagcaccaatcatagtcactcgcgactccgcgaacgccttcagatgtcacgtcatggagataaccaacgcctgcgatgtaatggaaagcctagccgtcttcgctagacgccgtcagcgtggcgtttgcgtcttgaccggaaacggggccgttacaaacgtcaccgttagacaacctggcggaggcgtcgtcagtttacacggacggtttgagattctttctctctcgggttcgtttcttcctccaccggcaccaccagctgcgtctggtttaaaggtttacttagccggtggtcaaggtcaagtgatcggaggcagtgtggtgggaccgcttacggcatcaagtccggtggtcgttatggcagcttcatttggaaacgcatcttacgagaggctgccactagaggaggaggaggaaactgaaagagaaatagatggaaacgcggctagggcgattggaacgcaaacgcagaaacagttaatgcaagatgcgacatcgtttattgggtcgccgtcgaatttaattaactctgtttcgttgccaggtgaagcttattggggaacgcaacgaccgtctttctaa

SEQ ID NO: 1617 - DNA, 2988 bp, Arabidopsis thaliana
  Clone ID: AT_T20F20.C1.o5.tg
atgacgaaaattaggatgggaggcgtgatatctacgattggatcaggggaatcagagagtgttgtggatcgtggagttgaagtggcagtcgaattagagagtgtcgtcggagacggagttgaagttccaccggttgaagctccagtcggaatagagcttgttgccagaggagaagattgtgttccaagccggcatcgaaaacgaagaaagataagagtgggggacgaagacgaggctgaaattgatcccgaccccgactacgaagatgattgcgcagttcatggtgatgaagactgtgatgcttatactgatgcagtaggtggtgacgatgatgcaaccggcggtgaaggtaatgatgatgaagcagtaggtggtggtgatgatgcaaccggttgtggaggtaacgatgatgaagctttaggttatgatgatgatgcaacaagcgatggaggtaacgatgatgatgacggaggtgttgaagaagatgctaacctcaaccttgcagaagaattcccagagtttgcgggagtagaagaagattgtagtgatgatgatccaccggatgatgtatgggaggaagataaaattcccgatccgttttcatctgatgacgaagatgagagcagaaccagagaagtacatggtcatagagatgctgcgaatgaagaggttttgctagaattgaagaaaacttacaacactcccgatgacttcaagcttgcagtcttgaggtactcattgaagacaaggtacgacattaaactgtttagatcagaagctaggattgttgctgcaaagtgtagctatgttgataaggatggtgttcaatgtccgtggaaagtgtattgttcatatgagaagactatgcataagatgcaaataagaacttatgtgaataaccatatatgtgtgaggtctgggcattcgaagatgttgaagcggtcttccattgcttatttgtttgaggaaaggttgcgagtgaatccaaagcttacaaaatatgagatggctgctgagatattgagggaatacaacttggaagtgactccggaccaatgtgctaaagcaaagacgaaagtggtgaaagcaagaaatgctagccatgaagcccattttgcaagagtctgggattaccaagcagaggtaataaagcagaatccatggactgagtttgagatagagacaactgcaggggctgtcattggagccaaacagagacctttcataggacttgatggagcttttctgaaatgggatattaaaggccatcttctagctgcagttggaagagatggagataacaagattgttcctattgcttgggctgtcgttgagatagaaaatgatgacaactgggactggttcttaagacatctatctgcaagtttggggctttgtcaaatggctaatatagctatcctctctgataaacaatctgggctagtcaaagctatccatacaatacttccacatgctgagcatcgacaatgttcaaaacacatcatggataattggaaaagggacagccatgatttagagctccagcgtctgttttggaagatagcacgaagctacacggttgaggagtttaataatcatatgatggagctacagcagtacaatcgtcaagcttatgaatctctgcagcttactagtccagtgacatggtcaagagcatttttcagaataggtacatgttgcaatgacaacctcaataatttgagtgagtcttttaataggactattaggcaggcaaggagaaagccaatattggatatgctggaggatatccggaggcaatgcatggtcagaagtgcaaagagattcctaattgctgaaaaattgcagacaaggttcacaaagagagctcatgaagagattgaaaaaatgattgttgggcttagacagtgcgagagatacatggccagagaaaacttgcatgagatatatgtgaataatgttagctattttgttgatatggagcagaaaacttgtgattgcaggaagtgtcagatggttgggatcccttgtattcatgcgacttgtgtgataatcggaaaaaaagaaaaggtggaagactacgtgagtgactattacacaaaggtaaggtggcgagaaacttacttgaaaggtataaggcctgtccaagggatgcctttatggtgtaggacgaataggttgcctgtattaccaccaccatggagaagaggcaatgctgggaggccaagtaactatgctaggaggaaaggtagaaatgaagctgcagctccttcaaatccaaacaagatgtctcgggaaaagagaatcatgacatgctctaactgccatcaagaagggcacaacaagcaaaggtgcaacattccaactgtcttgaatccaacaaagagaccaagaggtcgtcctaggaaaaatcagcaaccacaatctcatcaaggatcacaggctgatcttgaatcacaaggaccaagtgctgcaggtcgtggtcttggatcacaaggaccaagtgctgcaggtcgtggtcttggatcacaaggaccaagtgctgcaggtcgtggtcttggatcacaaggaccaagtgctgcaggtcgtggtcttggatcacaagaaccaagtgctgcaggtcgtggtcgcggagcacaaggaccaagtgctgcaggtcgtggtcgcgtagcacaaggaccaagggctgcaggtcgtggtcgcggagcacaaggacaaagggctgcaggtcgtggttgtggagcacaaggacaaacagcatcaggtggtggtcgtggagcacaaagacaagcaggtggaccatcacaaggaccgcaaccttatagaagacatggttcagcacaagcagaagcagaaccacaaggacttcgtcgatttgaatcatggtttgagtgttcagacaatcttagtcacaagtttctttttgttattgtctgcagcttagtcataagtttctttttggtggttgaacttgtctttatgacttag

SEQ ID NO: 1618 - DNA, 2841 bp, Arabidopsis thaliana
  Clone ID: AT_F9C16.C1.o9.tg
atggctcgtactcgggggggaaaggttattcttcgtcggtcacagagattgagtcaagcctctgccgatgaagcggaggatgttcctcaactagtggatgttgttcaacccaaatcgaatcggaagtcgcgaaaacggaagaaggacgacgttgttgattgtgaggaagatcgcgaggctctgagtgatgatgattgtgcagttgatggtgatgaagactgtgatgaggtttgctatgcagacgagagagtcgggaacaacaaacaaattggtgaagagggagagtgccacattgtatgtgtcgaggcagaagtgaatgatggaggtggtgtcgaggtagaagtagacgatggaggtggtctggagagagatgtaaacgatggaggtattgtggaggcagaagtaaacaatggaggtaatgcggaggcagaagtaaacgatggtggtggtgtcgaggcagaagtaaacaatggagagagtgttgaagaagaaggcaatggaggtctagatatggaagaagaagattgcgaagattttgaagccgaatttggagcagaggcgagagaagaggaaaacgaaagcgatggtgatagtggtgatgatatctgggatgacgagaggattccagatccattagtacacagtgatgatgaaggagataatgacgacgaagatggtgctccacaaacagacgatcctgaagagtctttgaggttagcgaaaacattcaacaacccagaagatttcaaaattgctgtgttgaggtattctttgaagacgaggtatgatattaagttgtatagatcacagagtttaagggtaggagcgaagtgcactgatactgatgtcaattgtcaatggagatgctactgttcctatgataagaagaaacagaagatgcaagttaaggtatacaaagatgggcattcgtgtgttagatcgggttactcaaagatgctgaagcaaagaacaatagcttggttattcagggaaaggttgagaaagaatccgaaaataaccaaacaagagatggtggatgagatcaagagagagtataaactcactgtgacagaagatcaatgttcgaaggcgaagacaatggttatgagagaaagacaagctactcatcaagaacactttgcacggatttgggattatcaagccaaaatctttcgaagcaatcctgggacaacttttgagattgagactatcctcggaccaaccattggaagcttacaaaggtttcttcgtcttttcatctgttttaagtcacaaaaagagtcttggaagcaaacatgtaggcctattataggaatagatggtgcattccttaaatgggacataaagggacatttattggctgctactggaagagatggagataatagaatagtaccaatagcttgggcagttgtagagattgagaatgatgacaactgggattggtttgtaaggatgctatcaagaactttggatcttcaagatggaagaaacgtagcaataatatcagacaaacaaagtggtttagtgaaagcaattcattcggtcattccacaagctgagcatagacaatgtgcaaggcacatcatggaaaactggaagagaaatagccatgatatggagcttcaacgcctcttctggaaaattgttaggagctacactgaaggcgaatttggtgctcatatgcgagcactcaagagctacaatgcaagtgcttttgagttgttactcaagactctgcctgtgacatggtctagagctttcttcaagattgggagctgctgcaatgacaatctaaacaatctcagtgagtccttcaatagaacaattagagaagcaaggaggaagccattacttgacatgttggaagacattaggaggcagtgtatggtgcgtaatgagaagaggtatgtgattgctgatagattgaggactcgattcacaaaaagggcacatgctgagatagagaagatgattgctgggtcacaggtttgtcaaagatggatggctaggcacaataaacatgagatcaaggtgggtccagtggattcgttcactgtagatatgaataataacacttgtggttgtatgaagtggcagatgacaggtatcccatgtattcatgctgcctctgtcataataggaaagcgtcaaaaagtggaggattatgttagtgactggtacacaactagtatgtggaagcaaacatacaatgacggtattgggcctgttcaaggtaagcttttgtggccaacagtcaataaagtaggagtgttaccacctccatggagaagaggcaatccaggaagaccaaagaatcatgctaggagaaaaggcgtttttgaatcttcaactgcctctagctcaagtaccaccgagttatcacgtttgcaccgagtgatgacttgttcaaattgtcaaggagaaggacacaataagcaaggatgtaagaacgagacagttgcacctccagctaaaagaccaaggggtcgaccaagaaaagacaaggatccgaggatggtcttttttggacaaggtcaaacatggcaagaaccgcaagcacaaggagcaccatcttctcacggagcaccatctcaagtttttcacggagcacctctttcacaaccatctcaggaagcaccatctcaaggagcaccatctcaaggagcacaatctctttcccaaccatctcaagaagcaccatctcaagcagcaccaactgagacaagaggaacacggagtgtaagaagaggagagtcacagagaggagggagaggagggtcacagagaggagggagaggattacaagggttggaagcatggtttaattgttcaaactag

SEQ ID NO: 1619 - DNA, 1038 bp, Arabidopsis thaliana
  Clone ID: AT_F6N15.C1.o24.tg
atggaaacaagcgacagaattagccctggtggtggtataggagcagaagttccatcagcgtatcatatggctccgagaccttcagatagccctgctaaccagtttatggggttgtctctccctcccatggaagccccaatgccttcttcaggggaagcctcagggaagaagaggagaggcagacctcgtaaatatgaagctaatggtgctcctttgccttcttcatcagttcctcttgtgaagaaacgagtaagaggcaagctcaatggttttgatatgaagaagatgcataagaccattgggttccattcttctggtgaaaggtttggtgttggtggtggtgttggtggtggtgttggatcaaatttcacgccgcatgtaatcacagtgaacactggtgaggtatgtatattagaagaaaaaggccctaaactttcacttgggaggagatttgatattactatgagaatcatctccttttcacaacaaggaccacgagctatttgtatcttatcagcaaatggagtgatatcaaacgttactcttcgccaacccgattcttgcggtggtactctcacctacgagggtcggtttgagatactgtctctgtctggttcattcatggaaacagagaatcaaggttcaaaaggtcggtctggtggcatgagtgtatctttggccggtcctgatggtcgtgttgtcggtggcggtgtcgctggcctgctcattgccgccactcctattcaggtgactcatgaatctaacaacaacgtttacgttgttgttggcagttttataacgagtgatcaacaagatcatcagaaaccgaggaagcaaagagtcgagcatgcccctgcagcagtcatgtcagtgcctcctcctccttctcctcctcctccggcggcttctgttttctcaccgacaaacccggacagagagcagccgccatcttcattcggtatctccagctggaccaacggacaggacatgccgagaaactcagccactgacatcaacatatctttaccagtcgactga

SEQ ID NO: 1620 - DNA, 885 bp, Arabidopsis thaliana
  Clone ID: AT_MBG8.C1.o20.tg
atggagaaggaaagccatgaggagaacaaccacactatctcaggtgatttaacggcaaaacggaaacgaggtcgtccgaggaaacaattgaagctggaatcgaatgagcactctcttggtcattctccaagttttagcaggagtcagcagcagtctcgccagaggaatgacgatgaagctatggttggacagccgattagtggtgtgattgaggcgacatttgaagccgggttcttgctttctgttaaggttgggaattcagatagcatgcttagaggtgtggtcttcaagcctggtcactgtgatcctgtatctgttgataacgatgttgctcctgatgttccaatgataagaagaaacagtgatgtgatgcatcatgatggctcagctaaaagaggtcggaaatctagattccgggagaagcgtggtagtggtgttagaagcagagcattggttcctgtcccgattcagccggctcatccaacaataccaaataatcttattgttcccgttgtgcttcagcctgcccatctagagaatggtggtgagcgggtcccgatcgaccacagtcccatgcagaccgagacagggtctcaagcgagtggagcgagtaacggcaagccttttgagacgcttctcacacaggtgatgaataaaggtcaagtccagcacacaacacagtccgttgaacccgagtcagatgagcaagctctgtccattgagccattgcaggcgatacacccaatccatccagtacatatgctgaaacccatgccgagttacggacgaggcaagatgacagaactccttcaggtactaaacccaaccataccaatgattatatcccaagcttacttggttttctctatagagattcatgtttga

SEQ ID NO: 1621 - DNA, 1059 bp, Arabidopsis thaliana
  Clone ID: AT_F2E2.C1.o19.tg
atggcttcaaacgacgatcttgaattttcgttcttcgacttaccagaaacttttggtgttctcacggagtgtggaggaaatgcttcgttgctggtttcagaaaatgaacacaatgaccttgttggatataaccctgtctctgccgccacaagtgatgtgtttccttcaccactaatagagaattcaaacaccgatcaagagacattgacaagaacttcatcaagctttgatcaagagacagccatagtagcacacaatcaaagctttcatcaagatgacgactattctaagtatttgaccactgcagaaaactttaatgacatgccgtcgagtgtatttagcaatggccaaagagaaaatgtggacagtggaagttatgtcctaacttcgagcaatcaaatgatgactactggactacaatcaactgatgtacaacatggacctccagagcaaagttatcaacaacctttattgtctcagacaattccccatttctctaaccagccatatgtttcaacactgcctgactcatttgcttatgccttccaaaaatcaagctcgttaaaccctactcgccggccccgtggaaggccgaggagaattcaaagtgttatgcctccgagtttgacaattacaacaccacaaaacatgtctttagtacctgcaattcaaaccctatcaacacctcccagtacgccctatcgcgcccaagagaagggaaaacaacatgttacagcgatgccgtctttgaacccaactctctacaatcagtatcaaaattcatacacaaactcaatgatccaacagggtggaggtttaagccaacgcgattgttatgatcaatttgaaaatgaaggttcttcgtctaaaagaaagaggatcatgttaccgtttcaagaaaaaagtatagcagaatcgtcgagtgtatctctatggcaagatggaaataggcgttcaagtgcggccaataacaatgaggagaggttagaaaatacagtatacgatccattttatgcaggtgttggattaccccttgatcctcatttgaggttcttttga

SEQ ID NO: 1622 - DNA, 714 bp, Arabidopsis thaliana
  Clone ID: AT_F2D10.C1.o8.tg
atggcgaattcaacaggtaaaccgacaagttcaacacaagaagatgaagaagttacatacatattagcacaattgatgcaagatgttatggatcgtgaagaggatatagatgatgaagacgatatagatgatgaggttgcgtcccttccattattactagtaagccaagctaatcaaaagcagtctaggaagagggaagaaaaaactgaaaaaaatcaacctaagagggttaagaatcagaacatcatgaaaataaatatccatgacttttcagaagaaactctgaggttaattgaggattggtacaacgctgaactcgatccacaggatatattcggcgatgatgaggtgacgaggcgattcagccgaccgataaagaagcagttgatgtcgagcgacgtcgatacagatcaaagcaggctcatgttatcgaaggagcaagtgaaggagaagatgcttccttttctagaagaatcagaggatccggtaaagggggttgatgtttcggtgtatggaccagacggggaagttcaacagatgaagttcaagatgtggaatggggataaaacacctgtcttaacttcagggtggatgcagtttgtggcagattatggtcttttgaagacttctgattttgtcactgatggtaaggtatcacagcttgagcatgtcttcattcgaggcagcaaagtcaggtgctgcaacacttcttag

SEQ ID NO: 1623 - DNA, 1464 bp, Arabidopsis thaliana
  Clone ID: AT_T30F21.C1.o3.tg
atggccgaagaacagcgagagatttctcatgagaacaacgtttccttgggatccgcggaaacagcaatacctctcaccaacgtttctatatctccgacgaagaaggaagaacaaaaaactgtatacctggtcctgttcggaagaacaatttatgtggagtcctcttctttggaatccgaggaaacggtgatgcctattgtcgacgttcctaaatctccggcgaaggaagacttgacgactcattgctcgttagacgcggaatcctcggagaaaggcttccccgtagatccctatatggggattttaggaaacaaccctaatattaattccaatgttacttgtgcaggaaacaaagatttaactgaagatattataaagtttaagaagatgagatctctttcgaaagagaaaatagtagaggagaagggaaccagagtcttgacggaactacctccctacacatggaccatcaagaagacactgaaggaaagtgatatcaatcatcaatgccgacttttgctgaacacaaccgatgccgagaaccacatcatgagacatctccctacagatgaccaaaagaaaatccaagaaggcattggagtcgatgttaaagcgtacgaccacgacacgtacactgagcacgatatggttttcaagagacacgtcaaaacatcaaaaagctatgttttcaacggtggctgggctaaagcgtttgttgggaggagagaattgaaggaaggagacaagattggactcttttgggcaaagaagagtcagacgtttatgagccaagagcagcaggggacgtctccgttgaacacagacgaagccttaaagagtcatcatagcttctcgcagaacccaaattacatcgaaagtaatctgtctagaagataccagactaacttttcgcttggctcacaaagaatctctgggcagtttttgatgatccctaatcctggatttgtcgacacaagttcgatgacaaatactcacgataccagtctagcaaattttcagactgtgcctacaactaccaatccaaagattatcttgaaagaggaaaaagaaaatgaggaggagcaacagtactggaccatcaagaaggaactgaccaagagcgatgcttgccaacggcttactctgtcaaaaagctctgttgaggagcacattctcaagcatctccttccagaagattcccaaaagatagacaaaggcaagcccggaatcacggttaaggtatacgacaacgatactgacactgagcacgagctatgtctagcattccagtgtagctatgttctaaagaatggttgggtgaaaacatttgtcaaaaggagagggttggaggaaggagacatgattggtctcttctgggaatgctctacttctaagcttcattttagtgtgctttttcgtgtaaatgcaaaagctcctgcagcagaagaaaaagaagcttattaa

SEQ ID NO: 1624 - DNA, 837 bp, Arabidopsis thaliana
  Clone ID: AT_F7D8.C1.o24.tg
atgagttttgatgtccgatcagaaaaaattgatctaataaaaggaccagagttaccagactacaacatgttcatgagtcaaaagtttacaagctacgaaggaaagcttgcaatcctgctcactggtaatggtgattgttcattttatatgtggattctagaggatgctgcgaaacatgaatggtcgaagaaagcttatgttgtgcctgacttttttcctctcgacccttttgtgctactcatgcagagagcaaatgagaatgacattgtaagaacatttcactacgacgatagagtcggaaccagcgacgcaatcgtggaatcaacaccggcgtctccacctaggcatattatgttctccgttataatccgaaaagatagtccgctccgaaatctccgcggagctaagtctatcttcaaagtctcctttactatcattctgaaaacgtttatagttaagttaattatgatgaaagatttccaactagatggtgatatgatcatatcgaaaacgctatcacgtactgatgttgaccaccatggacgtctgtttttacccaaaaaccaagtgctctcggtcttgaaaaagatgagaaatgttacaaaagagagcttgcgaaagggtattgaactcgaagttgtagacatcattgaaaacgattcatactctgttatcctaaagtccaggaacaccaccaacgattttgttctggcatcgggttggagcattatgaagcattcattagacctccaagaaggtgatgatatcaaactattttgggattacttgaattacaaattcattattctcaatttcgaatacaacttaattccctaa

SEQ ID NO: 1625 - DNA, 981 bp, Arabidopsis thaliana
  Clone ID: AT_T1B8.C1.o29.tg
atgaagatgcctcctcccttttctgcgtcgaagactcaatacttgttccacgacgagtcatcggaaaactctaaaaagagtttggtctccacaactctttctttgtcgtcttgtgaaaaccctaataagaggaagatgaactctgacgaagttctcaatatttcttgcataccaagagactacaaattaacacaagtagaaagaaagattgcacgaatgaggaatctctcgtatcaagaaaaggcagaggacgaatggtacggtgtctcaacagaactaacactcttcaaggatccgtggatcatcaaaaaggtttttcactttgcttcagtcttggatatggctcccaactcagtctcaaatactcattgcttgttggacacggagtcaccagaaaacgctgaagagagtttggtctccctggatctgtgtttctatgacaaaacatggccacatgatcccaatgttgcttacaataaaccaacgtccgaagaagcaataaacctggcgtggatgaggactatgtcgaagagagcaagaaaagaagaggagaagtactacgtctcgacagaactaactctcctcaccgtcgctgacccatggaccttgaagatggcaatgaccaaaagcagtattggcaacctataccgtcttgttctaaaggcgagctttgtagacatccacattctgagatatctccctttggatgatcaaatgatggtcaaagaagactctggattagcagtcgaggtgtatgatcacgacactgactctgtgcacaatctggctcttaagaaatgggccaaatcttcaagctttgttctcgtcagcggatggcgtaagtgctttgtcgacagaagaggtttgcaggttggcgatgtgattggaatgtattgggatcgttctgaatctaagcttcatttttgtgtgctttctcgttccgaaacaatggattcagctcctcttcctccaagtccatag

SEQ ID NO: 1626 - DNA, 753 bp, Arabidopsis thaliana
  Clone ID: AT_F4C21.C1.o9.tg
atggcgaattcaacaggtaaaccgacaagttcaacacaagaagatgaagaagctacctcggctacagaaatattagcacaattgatgcaagatattatagatcgtgaagaggatatagatgatgaagacgatatagatgacgaggttatagatgatgaagactatgaggttgcgtcccttccattattacaagaaagccaagctaatcaaaagcagtctagggagagggaagaagaaactgaaaaaaatcaacctaagaggtttaagaaacagaacatgatgaaaataaatatccatgacttttcagaagaaactctgaggttaattgaggtatggtacgaagctgaactcgatccacaagatatattcggcgataatgaggtgacgaggctattcagcagaccgataaagaagcagttgatgtcgagcgatgtcgataaagatcaatgcatgctcatgttatcgaaggagcaagtgaaggagaagatgcttccttttctagaagattcagagaatccggtaaaggggattgatgtttcggtgtatggaccagacgggaaagttcaacagatggagttcaagatgtggaatggggataaaacacctgtgttaacttcagggtggaagcagtttgtggaagattatggtctttcgatgacttgtgattttgtcactgtttggatgtttaggcacataaagactcgaaagctttgctttgctattcactacgttaaattttctttaagagattaa

SEQ ID NO: 1627 - DNA, 906 bp, Arabidopsis thaliana
  Clone ID: AT_MRG7.C1.o5.tg
atgaagaacaaagcgtttggtcagattatggatgatgcagagaatcccgggttcttcaagatccttcgaagtgcagatttatcgtctgaaatcatgagagggatccctctaaacttcatcaaaagcatctcggaagaagagttatcggctaagatgttgttaaaagtgtcatggggaagttcttggcctatcaaaatttgtagaaacccaagcttctactttatggagaaaaagggatgggatcagtttttgagcgacaatggattaggtaatgatgagtttcttaccttcacacaccaaggaaatatgtgctttaccgtggacatctaccaaatagacggtaaagagctacttacaccacgcagatctgcaaccattgcttctagttccggtcggaacaagagagaacaaaggaataacatctacaaagatgtgaaggaggaagaagacatagagtcttggtctgaatcgagctatcctggtcacaaaacagctgaatctacaggaagaagacaaaggcttagcttgagtaataagaaagccaaggaaactgagaaatcaaagaagaagaagatgaaggtggaaagtattagttacgattctcaagatgacagtttgtctcttgttccagaatttaccctcaccataaagaaatcatacctcattttcttggggattccaaagatgtttgaggagctgcatatgccaacggaggcaactatgttcaagatccatgatccggaagggaaaaggtcatgggatgttatgtataagttcagtaataaccagacaagattctgtgctggttggattcgtttggctaaagaacttggtttggagatcggagatgtttgcactttcacgctcatcaaacctaccgagatgcttgttagagtctctaaataa

SEQ ID NO: 1628 - DNA, 1029 bp, Arabidopsis thaliana
  Clone ID: AT_T20M3.C1.o18.tg
atgacgacaaacgacgatgatcacgcggctgagagaaacacgatgtccatgaactatgaattggcggctacgttgagtgatgaagaacaacgcgcaagaaaaggaaaagccaagattgtctgtaaagaagaagaccacgtctttatcaaaaagaaagaaaaatacgaggaagagagcgagaagagggaattcttcagtcatgtccccagaaagataaggcctgcgcttagatacccacaacctaactttgaaaaccctaatggggcttcttcttctttaaacttacccttcgaagaagactactacatggctgagtactacaagaagacggagaccataaacccacctaacccttatcaccaatggtctccttcttcgttcttaacggagtacacacaccctaggatgcttgaggtgatgaaagacatgagagcagaagacctaacacttatcttagagaagactctgtccacaactgatgtgatcacaacgacacatggccgtttctcaatgcatttcaacagattaatcagtaacgacttcttgaagcctgaggagcggagtatcctagaagaagatacctacaatgatgagacgatgggagttggagccattctcgtggatcaaaggtctcaaaagtggagtgtgattttgaagagatggggccagaattactttctgagttgtggctggaacgacgttgttaaggctaataaattgaaagctggcgacgacatctgtctttgggcgtttagtatagctcctattttcgtcattgacaagtttcttgtgtctgttgagattcacattggtctaatctttcaggccattcttgagactccatctttgtgtctaacgggagaccacgagccccaagaggcgtgtggtgtcaccgagagggacagagtagctcttccaatgctcgccgtctctgctaagcttcttgtctctgtggagattgatcttcatttgtacagccggctaagttggggcaattctagagggttttggtcttactacaatgctaga

SEQ ID NO: 1629 - DNA, 4323 bp, Arabidopsis thaliana
  Clone ID: AT_F25P17.C1.o5.tg
atggcgaattcaaggatttatccgcaattcttccacacacttgttcctagcttccacactcacttgatgattcctgaagacttcttctcagagtatatcgaaggaagaagcgtcgcagagctgaaattggacttttcagacaaatcttgggaagtgaagttgtctgatcggagaatcactgacggctgggaagagtttgtggtggctaatgattttcgtatcggcgatgttgtcgcttttagatatgttggaaatttggtgttccatgtttctaatttaggacctaattactatgagattgaacacaatgatgagcttcccaaagagaagaaagcgaagacgaacagtgaagaagcagatgcagtttcttcttcttcatcagcagacaagtcatgttttatggccattatcacagctttagatctaacgacagatacactgtatcttccactacattttacaagcgcaaatggtcttacacgaaaaaaccgggagattattttaacagatggaggggaaagatcaagggtattggatctgaggttcgacgaatcatctggtactttttatatcagccggggttggagaaatttctgtgatgaaaatggacaaaaagcaggaggtttctttctgtttaaactagtgggaaaaggtgaaacgctggtgctcagtttctgtcctacagaatctatcaatggggaagagaacataacaagggaggacagtaaagacgagtgcagctcgttggactcattgatgaatatagtagaaaaaaagaagtatattccgaaaccaagaggttcaccatattcatcatattcaccaagtcataaacaattcgtaacatttacgcttccaccggattatgctagaattggaaaattgagtctttcggcgcctttcgttagggaaaatggcatcaacaagcctggggagatatgtcttttggataaacatggtagaaagtggttgacaagtcttctgctggacagtaaaggaacaatgtctttgggaaagggttggaaagagtttgttaaagcaaacagcttagagacgggcttcacactcaagttgatatgggaagaaacaactcctgtgcttagtttgtgtagtccagaatctaacagtgacagagagcaggaagagatttcaaaagctatcgagaaacattctcttttcatagatcctagcaacagggacaaaatcagcaacaatgacaaagaggagaacatgtcatgggagagaaagaaggatcatctgaaaagtagagattcaactctatcaagccaaaaacaatttgtaacaataacaattacaccttccagtgatagattggtaagtttatcaaatgactcttgtttagtggttgttagtttattgtactttgatatgcgtctcccaaaggtattcacgagggagaatggcatcaacaagccggggaggattactctgttgggaaaagacggtataaagcagcagacgaatttgttattcgacaaagcaaatggtgccatgtctttgggacacggctggaaagattttgttaaagataatggcttaaagacaggtgactccttcacgctaaagttgatttgggaagaccaaactcctgttcttagcttgtgtcctgcagactgtagcattgacagagaagcaggaggagggcgatctgaaacaaaccagaaaaagtctcttccaatagaacctagcacatgtaaaaaaatcaggaaagacgtgaacatcaaagatgacaacagcaaagagaaaaatgacaaagaagagagcaaatcagtggatggagagaggaaatatctgagagggacatatttaactccatcaagccaaaaacactttgtgacattaacaattacaccttcctctataaaaaaagatagacttattctttccccacaatttgcaaggaagaacaatattgacaagcctggaatgatatatctgctggatacagatggtacaaagtggctgataagccttcaacgagataagaaaggaacaatgagtttgggaaaaggttggaaagaatttgctgaagcaaatgactttaagttaggcgaatcctttacgatggagttagtatgggaagacacaactcctatgctcagtttgttacgtaccgagtttaggagttcaaaagctaacgagaaagagtcaatttcctcagaacataaaaccagagaatcatccccaacaatcaaaaaccgaatcgtgactccagcactcacacctgaagatgttaaagcctgtaaattggtaacttcatcaaactactcttgtttttcagagattctttcagcgcaatttgcaagggagaacaatattaaccagcctggaacgatatatctattggatacagatggtaggaagtggctgacaacggttaaacgggacaagaaaggaacaatgagtttgggaaagggttggaaagagtttgctgatacaaaagacttaaagtcaggcgactcctttacgatggagttaatatgggaagacacaaatcctgtgctcagtttgttacgtacaaagtttagcagttctaaatctaacaaggaagagtccatttttttagaaccaaaaagtagagattcatcctccccaacaatcgtaaacagattcgtgacattagcacttacaccagaagatgttacagcctgtaaactgattcttccaagtcagttcatgaaggctaatggcatcaacaacaaacttgggaagataactcttttgggtgaaaacggagtcgaatggccgggatatatgttgtcgctagatggaactctcgctttaggaaatggttgggaaggcttttgtgaggctaatggcgtgaagttaggacagacttttactttggagtttgttaatgaacaagatacaacaacaactccgagaatacctgtagccttcttcttgaagaatatagaaggaagatatgagcagaagacggcggagctgagatcagatgcgtcaaagataacttgggaagtgaagatagatggacagagactcactgacggttggaaagagtttgctctctcacatgatcttcgaatcggtgacattgttgttttcagacaagagagagatatgtctttccacgttacaatgttgggacctagttgttgtgagatccaatatggttcgtgttcagacgaggagagaaacctcgagaagaagaagaatccaaatggagaagcaaagtcttcttcactagatccttcttgtttttcggctaatgtggcgccttcgagtctacgttatgacttaatgctttttccaatgggttttgtgagggaaaatggtgtagtcggatctggaaagattgttctgatgaatgaaaagggcagatcatggaattttaacttgagacaaaagccatcatgcggaacagtttatgttagaggagggtgggtgagtttttgtgatgccaatggacttcaagctggagatatctacactttcaaactgatcaaaagaggaggaactcttgttctacgtttgttacccaaaggggcagagtcttgttcactagatccctcttgttttgtggctaatgttgcgccttcgactctacgctatgacacactgtatcttccaaagcgttttatgagggaaaatggtgtagacaaaagacgtggagagatgattctgatgaatgaaaagggcaaatcatggactttagatttgaaactaaagaaatcatgcggaacttccctcatcagacgaggatggagaagtttctgtagtgccaatggactaagagctggaagtatcattactttcaaactgattaagaaaagtggaactcttgttctatgtttgctctccaacgagccagaagaagaagtgtgctcagaagctaatgaagtagagtctctttcgacagatcaagaaagccatgaagagagtagccacaacgagaaaatctcaagaagaaaggaaaagaagggtagaatgatatggaaagcttcgtcttcaccatccgaaaaccgatttgtgacattaaatcttacaccttataacatcctacgttctgcactgcgtcttccgatacccttcacgaggatgaatggtatcaatgaagaaactaaaatgactctgttggataaacatggtatgaagtggttaacgactctgcggttggtggactacaaaagaaaaagactgggaatggtaggaggctggaaaggattcatccaagctaacggtgtgaaggcaaacgaatccatcatgttggaactgatttgggaagaagaaacaagttgcgtccttaagttctgctccaaggtgaagctagcaatcaaatga

SEQ ID NO: 1630 - DNA, 822 bp, Arabidopsis thaliana
  Clone ID: AT_MCK7.C1.o15.tg
atggccatggcctatgaggaagctcgcaagctccgtcttcaagagaatcacaagcgatttcaatccaattttgtagctttaccacaatttcagcttcttcagcagcgtaatcacaaacccatcgataaagccctcttagctactgctgaaccaagacgctcttcccgtgttcgtaccgtaatttcttcctatcgcgatgatgtcgtcgtagacactggtcgtacttcgaatctgaggagatcgcgacatagctctacatgggcgacctacatttctcgacctctccatgagtgcaagtttgcatcttatgaagaaaaggttggagcattcaaggctgcagagaagttccagaggagccttaaatctccacatccttactttgtgaaatctatggttcgctcccatgtttacagttgcttttggctggggcttccttcaagattctgtgcagacaattttcctgaggaaactatggaaatagaactagaggatgaagaaggcgaagtgtatgaagcagtgtacattggtagaagagctggactcagtggtggttggaaaaggtttgctcttgatcataaattggatgatggtgatgctctactctttgaattggttgaaccaaagaagttcaagatctatgtgtttaaaggaaatgagaacgctaatcttacaagcgccagaaagagaggcagagcaacgacgccaagtgaagaagaagaagaagaagaagataaggatgttgaagaatcaggtgatgaggaacacagctcaagagccactaagagatcatccgtaaggttactaaggaagaggaaagcataa

SEQ ID NO: 1631 - DNA, 933 bp, Arabidopsis thaliana
  Clone ID: AT_T5J8.C1.o19.tg
atgactctctccgacgaccctatatctccatcgactcaagaatcatcaaattcttcttacgtgcgatccaaggaagcggagaagaatagtccgagccaagaaacagatgaagaagtcttgaagggatatgaatcgtacagggaaaacccaagtaactacgacaatgataatatccttatatacacagacacgttcaatctttatgatgacatgttcgaaggttctcttgattctacaaggaactttggtgcacaaaaagatcctaatgtgctcgtgatgcaaaggctgttacacaactccggaagtctaattggtgttgacatggaacaagatggcatagatttagctacattgttcgctgattctactgaagattcgaagcttccttatgttatctatgagggtttagaaatgcagggtgaaggatatggcacaaacactcgtggccctttcgaaaacaagattgatattggttcttttggaaagagtgggtcggtgatgaacgtagaaagagagaaagaaaagattgtgatgatccctaccccaagatttggcaacgcaacaccacaatggaccataaagaagaaactgagctcgtacgatattaggcctcgttgtggcagacttattctgcaaagtagctcctttaatgagcacattggaagacatttacctaaagaccaaatgataaaaattaatgtcggagtcaatgttaacgtatatgactacgacacgggcacattgcatgagctgcgtctggaatatcagaggcaatatggtctagcgcatggctggcaagaagattttgtccgcaggagacacttgaagcaaaaagacgagattggactcttatgggatttttcttcttctaggcttcaatttggcgtcatttctaggaacacgggacccggactctgggagaccaaagactaa

SEQ ID NO: 1632 - DNA, 1386 bp, Arabidopsis thaliana
  Clone ID: AT_F28M20.C1.o120.tg
atggcgaatgcatcacccttgtctccgactaaccaacacttcttccagcctcttcttcccggattccagagcaacctcaaaattcctgtgaactacttctctgagcacatcgagggaaaacacgaaggcaagactgtaacgttgagaacagatgcgtcggagagaacatgggaagtaaagatggagggtcatagactcacggaaggttggaaagagttcgttgaggcacatgatcttcgaatcggtgactttgttgtctttagacatgaaggagacatggtgttccatgtcactgctttgggacctagttgctgtgagatccaatacccacagtctagcagacatgaagaaggcgaagagagtggtgaaaatgaaatatccgagaaagaaggtgaagagaatgtgcaaaaagaatctgataagtcttcatcagatctgaattgttttagccaatccgtgacgcattcaaacatatcaagagatgcagtgagtgtgccgagagatttcgtgaagcgaagtggttttagtaaaggaaggcatgagatagttttgatgaacgaagaaggaaagtcatgggaatcagaagtaaagagttatatgtctggtgcggtttatttagttggaggttggacaactttctgcaccgaaaataaattagatgttggagattcttgcacattcaaactgttgcaaaaggcgaaaacgcccgtgtttcagctctgcagccgcacaaagcatctaccgttaagtttcacgaaagtgaatggactcatcaatccagggaagataattctggtggacaaagacagagctgagtggtcgatgatgcttaaggttgatagtagaggagctgtgtatattattggtggtaatgactggaaaagtttctgtgccgcaaatgaagtaggcgcaggggagtcactagctttggagttgatccaaggaggtgttttgctaaatcaaataacgacttgttttcagatggagcaaccctcattcaaagcagaggatgggagacacaagagagctcgagtccaaaataggagccaggaaacagataagggagcagaaacttctagagcatctacaatgggaccgaagcttgagataactgaaaaaggagaaccctctcgagcatctacaatgagaccgaaagttgagataagggagaaaatagctgaaacgggagaaccctctcgagcatctaacaaatctagtggtattgaaggaaacttgcagcacacgaaaccttgctcagtcaaaacagatcagttggccaaggtgaaagagagcgttgtagatacgttaactagtatcgggcggttccaagcagagctcgagacaatgaaacgtaaactagaagattcattgcaggaactcaactag

SEQ ID NO: 1633 - DNA, 1059 bp, Arabidopsis thaliana
  Clone ID: AT_F28M20.C1.o170.tg
atgaagaatccgacactctttgctccaaaaagtccacactttttccagcctattcttcccggtttcaagagccacatcaaaatccctgtgaagttcttctccaagcatatagagggaaaacacgagggaaatactgtctatttgagatcatatccttcgaggagaacgtggaaagtgaagatggagggccataaactcactgaaggttggaaagagttcgtggaggcacatgatcttcgagtcggtgacttcgtcgtcttcaaacacaaaggagacatgttgttccatgtgactgctataggacccagttgctgtgaagtccaatacgcaccatctcgtagccacgacagaaacgaagagagtgatgaaattggggaatcttcaagaaatgagaaaattattgaggagaatgtgaaaacagaacctgatcagttttcaccagatctaacatgttttagccaatctgtgaccgcttcaaacctaacgagagatttagtgggtattcccagagatttcgcaaagcgatatggtttgaacataggtaggcatgagatagttttgatggacgaagaaggaaatacatgggaatcagaagttaaaagttacaagtctggtcgggtttttatagctggaggttggacaagtctctgcactgcaaataaattagaagttggagattcttgtacatttaaactgctccgcaacccgaaaattcccgtgtttcggctctgcagccgcccaaaggctggagcagaggctcggccacacaagagatctcgagtccaaagtagcagcggggggagtagacagaagcatgacgtgaggcagaagttagatgaagaaggagggccatctcgttgcactcggtcatctaacaaggctactggtgatcaagaaaagttgcagcaaacgcaatcttgctttatctttgatcatgtggctaaggtgaaacagagcgttgaagatactttaaatagtattagacggttccgggctaaactcgagacaaaggaacataatttggaagctttgttacaggaaacgaaaactaagttatga

SEQ ID NO: 1634 - DNA, 732 bp, Arabidopsis thaliana
  Clone ID: AT_F24K9.C1.o25.tg
atgtcagtcaaccattaccacaacactctctcgttgcatcatcaccaccaaaacgacgtagctatagcacaacgagagtctttgttcgagaaatcactcacaccaagcgacgtcggaaagctaaaccgcttagtcataccaaaacaacacgccgagaaatacttccctctcaataataataataataatggcggcagcggagatgacgtggcgacgacggagaaagggatgcttcttagcttcgaggatgagtcaggcaagtgttggaaattcagatactcttattggaacagtagccaaagctacgtgttgaccaaaggatggagcagactcttcattggctggcggagacgcggtgaagcttcttcctctcccgctgtctccgttgtgtctcaagaagctctagttaatacgacggcgtattggagcggcttgactacaccttatcgtcaagtacacgcgtcaactacttaccctaatattcaccaagagtattcacactatggcgccgtcgttgatcatgctcagtcgataccaccggtggtcgcaggtagctcgaggacggtgaggctttttggcgtgaacctcgaatgtcatggtgatgccgtcgagccaccaccgcgtcctgatgtctataatgaccaacacatttactattactcaactcctcatcccatgaatatatcatttgctggggaagcattggagcaggtaggagatggacgaggttga

SEQ ID NO: 1635 - DNA, 2076 bp, Arabidopsis thaliana
  Clone ID: AT_F15N18.C1.o60.tg
atggaagaatctgtagcatctgaaggcttagaatttaagtggggtaaaaagaaaggtgttggtgggaaaaagaaagatgtccagttctatgaatctttcacctatgatggcgatgaataccgtctttatgactgtgtcttagttggcaatgccagtgaaccagactctactgaacccttcattggcatgatcataaaaatttgggaacacgctaataagcatatcccaaagaaagtcaagcttctctggttctttaaaccttctgagattgcgccatatcttgaaggagtcccgaatgtacttgccaatgaagtgtttttagcatcgggtgaaggtcttggccttgctaataccaaccaattggaagcaatcggtggaaaatgctctgttctatgcatttcaaaagacaaaagaaatccacaaccctcggatgaaaaattcaactcagcggacttcgtgttttgccgagcatttgatgttggaagttgcaaagttgtggatacgattgatgataagattgctggagttgacgttaaatttatctttaacagagcgtgctctgagaaagaagcaactgcggtgcagaatattgaagcagacgtaaatgggaagtcagatagtttgaaaccaaatggtcctttagctaggggagctagtggttcagttaggaaaatcgaagacagcgcttttgaatcttctgactgtaaagaaaacagtaatggttgcaaagaagagaaagaaaaaggtcactaccaactcgctataaaaaaatctacacttgcagaagaaaggtctaacaaggattctggctctaggggaaatcattataatggcaaagatcaagaaagtgaagttaaaaaacagttaactaaacaaaaatctatgcctggcgaagaaagatatagtaactcttttgaagcttctggctccaggacaattcattccatttcaaagaaagctcaagaaaatgatgttaaaaagcagttgactaaacaaaaatctatgcccgctggagaaagatatagtcaagagtcgagtggattggatgacaggcctctgaagaaacagaaacttgatggttctgttacagtacgagatggatgggatacaaccattttgcagaacattacttctgatggtaaaaaggatacaggatcttttaagagacctagagacaaagtgactatagaggaagtccctcccgaaaagcgcagctttgttaagaaccgagatcttgtagtgtcagtatctgaaggaaaaactacaaaaactgtaactgaaaaaggtatatccaagaagcccagctttggacgtgctgaggacaagatgtcggcagatgataatgaaagaaactatcaagtaactgaagtgtgccgaaggccggatgctcgtgttgtaaaatctttagatgcaaggatgtggttttgcaagaacacaattctaaaaggagcagttttgttttacagtccttcacactgtatgttgtatagttgtagtgatgttctgtcattcttctcatcttattatgttaccacaatgcttggtaacattgagccttgggaagaaagtatgagggaagcagaaaaaaaagggactgtggtacttcttcaaaacttggatcctacttatacatctgatgaagtggaggatatagtctattctgctttgaaccagcaatgcgaagcgaggatgatagagcgtacatcagtcactattcctcatattggtgaagctttggtcattttcaaaacaagagaagttgcagaaagggtgattagaagactagatgagggatgcttgttgctatcaagtgggaggccccttgttgcttctttcgctaagattactccaccagggaagccgtcattattctcaggccatatcaaactacacaaaactcaaacgcgacgggagatgagagatgccgtggctacatcacattcttctcagcctaacaaccttgaatttgacatggccatggaatggtgtttgcaccaagccagacacgagcaggcgtctgaaagtgtatctaaggtaattagattgtctagacgattattgccactattttactga

SEQ ID NO: 1636 - DNA, 2115 bp, Arabidopsis thaliana
  Clone ID: AT_F24J5.C1.o6.tg
atggcgtggtcgtcggaaacgccgtcgtattgcggctggaatgagcgacatgtgaagaacacgaaagaaaagatggaggttcattattatctcgagaggaaagatggaattgcagatctagctgttattgggaggttgaagaattctaaacgcatgtcttttagatacgctttgaagaagaatcgctctgtcttgaaaaagcttaattctaaagatgatgttgcgctttggctcgattctattgtttctggtgagatacctcatgtagcagatgtaccagctactgttatgactgaaaaagatgctggagggttcaatatgagcacttttatgaataggaaatttcaggagcctattcagcagatcaaaacgttctcttggatgggtttttcttggacttgcaggaaacggcgtaagcattatcagtcttatctccggaatggtgtcagaatatctgtgaatgattttgtgtatgttttagcggagcaacataagagacttgttgcatatatagaagacctttatgaggattctaaaggcaagaagatggttgtggtacgatggtttcacaaaactgaggaggttggttctgttttatctgatgatgataatgacagagagatatttttttctcttaatcggcaagatatcagtattgagtgcatagattacttggctactgtccttagtcctcagcattatgagaaatttcttaaggtgccgatgcatgttcagacagtagctttcttctgccagaaattatatggagatgatggtttaaagccgtatgacattacacaactagaaggttactggagacaagaaatgcttagatacttgaatgtatctattttaaaatcatttgaaggtgctcaagcccctggtactgacccaggattaaaagctccattggttggttgtgttgggattagatcaaggaaaagacgccgtcctagtcctgttggtactttgaatgtatcatacgcaggtgacatgaaaggtgactgcaaatctagtccagattctgttttggctgttacagatgcttctatattcaagggtgacgaagatggttcttcccatcacattaaaaagggttcacttattgaagttctttctgaagatagtggcatcagaggttgttggtttaaggctctggtattaaagaaacacaaagataaggttaaggtccagtaccaagatattcaggatgcagacgatgaatctaaaaagctagaggaatggattttgacatctcgggttgctgctggtgatcatctgggggatcttagaatcaaaggacggaaagtagtaagaccaatgctgaagcccagcaaagaaaatgatgtatgtgtcatcggggttggtatgcctgtggatgtgtggtggtgtgatggatggtgggaagggatcgtggtgcaggaagtttctgaagagaaatttgaagtttacttgccaggcgaaaagaaaatgtctgctttccatcgtaatgacctcagacaatctcgggaatggttggatgatgagtggctaaacataagatcaagatctgatattgtgagttctgtcctatctttgacgaagaaaaaagagatggaggtgaaacatgatgagaagtcgtctgatgttggtgtttgtaatggtaggatgtcaccaaagactgaggctaaacgcaccatctctcttccagtagctacaaccaaaaagtcactacctaagcgaccaattccagatcttctaaaagatgtcctagtcacttctgacttaaagtggaaaaaatcatcgaggaagcggaatcgagttgtcagttgctgtccacacgatcctagcttgaatgatggtttctctagtgaaagatctttggattgtgagaactgtaagttcatggaagatacttttggctcttcagatggacagcatttgacaggtacatattaccctgatgggcatctgctcaatgcgattttgggttttaagattactggtaactcgcaagctttcttgggatggattataggattagctcgtaatggcatccaaattcgtttgtgtacttatgttgtgacagtagggcatagtgctttaattcaatcagcaaaattttggatgcagtag

SEQ ID NO: 1637 - DNA, 2442 bp, Arabidopsis thaliana
  Clone ID: AT_T1P17.C1.o210.tg
atggcttcaactccaagagcaaaaaccttcaaatccccaaccaaaactccgtctaacatctatcgcaaatcgtatctatctccatcttcaacctcacacactcctcaaaccccagaaactcacactcctctccgtagatctgctcgtcatgtttctcgtaaaatcgatctgggaaatgacccaattgatgctccaggaaatgacccaatcgaaggaatgaatctaattcgaaaacgagaacgtgcccccagaaaaccaaccactgatgtcgttccatcgaagtcgaagaaaacagaaactccgaagaagaagaagaagatagattccttcactcctgtttcaccaattagatctgagacgattaagaagacgaagaagaagaagagagtttattacaataaagtcgaattcgacgaaaccgaattcgaaatcggtgatgatgtttacgttaagagaagagaagattcgaattcagatgaagaagaagatccagaaattgaagattgtcagatttgtttcaaatcagatactaacataatgattgagtgtgatgattgtttaggtggatttcatttgaaatgcttgaaaccgccattgaaggaagttcctgaaggtgattggatctgtcaattctgtgaggttaaaaagtctggtcaaagtcaaacacttgaccttcctaagccaccggaagggaagaagttagcgagaactatgagggagaagctactttccggtgatctatgggctgctcgaatcgacaagttatggaaagaagttgatgatggtgtgtattggattcgtgctcgttggtatatgatacctgaagagaccgtttcggggcgtcaaccgcataatctgaaacgagagctttatttgacgaatgattttgctgatatagagatggaatgtattcttaggcattgttctgtcaagtgtcctaaggagttttcgaaagctagtaatgatggtgatgatgtgttcttgtgtgagtatgagtatgatgttcattggcgtagctttaagcgtttggctgaattggctgatggagattctgatagtgatcaagagtggaatggtaggaaggaggaggaggttgatgatagtgatgaagagatggagcttgatgatgaagttttgaagagtaagcgaggaggtttgactagtgcaagaggaggtgcgaactctcgtaaagggagattctttggggttgagaaggtggggatgaagctgattcctgaacatgtgagatgtcataagcagagtgagttagaaaaggcgaaagctactttgttgttggctacacgtcctaagtctcttccttgtagaagcaaagaaatggaagagatcacttcgtttataaaaggttcaatctcggatgatcagtgtttaggaagatgtatgtatattcatggtgttcccgggactgggaagactattagtgtgttatcggttatgaagaatctgaaggctgaggttgaagagggaagcgtaagcccttattgctttgtggagatcaatggtctcaaattggcttcacctgagaacatttacagtgtaatctatgaagcattgagtggtcatcgagtcggttggaagaaagctctacagtgtctaaatgagaggtttgcagaaggaaaaaggattggtaaagaggatgagaagccttgcatacttctcatcgacgaacttgatcttctagtaactagaaaccagtctgttttatacaacattcttgattggcctaccaagcctaactccaaattagttgtgttgggaatagcaaacactatggatcttccagagaagctgcttcctcggatttctagccgaatgggtatacagagactatgtttcggtccttataaccacactcagctacaagaaatcatttctacaaggttgaatggaatagatgctttcgagaagacagctattgaatttgcttcgagaaaagtagctgcgatttcaggagatgcaagacgtgcgcttgagatatgcaggcgtgctgcagaagtagcggatcaccgtctaaatactaacaaatccgcaaagaatcagctggtgattatggcagatgttgaagcagctatccaagagatgtttcaggcacctcatattcaagtgatgaagagcgtgtcaaaactgagtaaaatcttcttgacggctatggttcatgagctttacaaaacaggaatggcagagacaacatttgaccgagtggcaacgacagtatcgtctatctgcttaaccaatggagaagcttttccaggttgggacattcttcttaaaatcggttgcgatcttggtgaatgtaggatcattctctgtgaacctggagagaagcatagattgcagaagctgcagctgaattttccaagtgatgatgttgcttttgcattgaaagacaataaggatcttccatggctggccaattacttgtga

SEQ ID NO: 1638 - DNA, 4215 bp, Arabidopsis thaliana
  Clone ID: AT_T6G15.C1.o160.tg
atgaagacaaaagctgggaaacaaaagaagagaagtgttgactcggatgatgatgtctctagggaaaggagaccaaagcgagcaacatcaggcacaaacttcaaggagaaatctctccgtttctctgaaaaatatgaaactgttgaagccaagaaagagcagatcgtgggtgatgacgaaaaggaagaaaaaggtgtgaggtttcaatcttttggtcgggtagagaactggactatatctggttatgaagatggttccccggtgatatggatctcaactgtgattgcggattatgattgccgtaaaccttctaagaaatacaagaaattatatgattatttctttgaaaaagcttgtgcttgtgtggaggtatgtaagaacttgtccacgaatcctgatacaagtcttaaagagcttcttgctgcggttgttaggtcgatgaatggaagaaagatcttttctagcggtggagtcatccaagagtttgttatatcccaaggagaattcatatataaccaactcgctggtttggatgaaacatccaagaatcatgaaaccaaatttgttgacaatcgtgttcttgtttctctaagagatgagagtcgtaaaattcacaaggctttctccaatgttgctctgaggattgatgagagcaaggtcttgacatctgatcaactaatggatggtggtgaggacgaggacctaaaatatgctaaactactgcaagaggaagaacatatgaaatctatggatcggtcgagaaataagagaagttcaacaacttctgctccaaataagttctacattaagataaatgaagatgagattgcccatgattatcctctcccatcttactataaaaacaccaaagatgaaacagatgaacttgtactctttaatgcgggctatgcggttgatgcgaggaacctaccttgcagaacacttcacaactgggcactttacaattctgatttaatgttgatatctcttgagtttctcccgatgaagccatgtgctgatatcgatgtcacctatttgggtcagataaaggaatggaagattgattttggggaagacatgatatttgttctattacgaacagatatggcctggtatcggctagggaaaccgtcagagcaatatgctccttggttcgaacctatattgaaaacagtaagaattgggacaagcattttggctttgctcaagaatgaaacaaggatggctaagctttcatatacagatgtcataaaaagactatgtgggctagaggagaacgatcaagcttacatttcttctacgttctttgacgttgagagatatgtgatcgtccatggacaaataatattgcagtttcttacagaatgtcctgacgaatatatcaaaaggtgtccatttgttactggtcttgcaagtaaaatgcaggataggcaccatacaaaatggatcatcaagaagaagagaaaaatgttgcaaaagggagagaatttgaatctaaggagaggcaaggcacctaaggtatccaagatgaaagccatgcaagcaacaacaactcggcttatcaatagaatttggggtgagttttactccatttattctccagaagatccgttggaggagattggtgcagaagaagagtttgaagaggtagaagatgttgaagaggaggatgagaatgaagaagaggacactatacaaaaagctattgaggttcaaaaggctgatacacttaagaaaatccgaggtagttgtaaggaaatggaaataagatgggaaggtgaaattcttggagaaacttgtgctggtgagcctctctatggacaagcccttgttggaggtagaaagatggatgttggtggggctgtcattttggaagttgatgatcaaggtgaaactccattaatctattttgtggagtatatgtttgagagttcagataacagtaaaaagctacatgggaaactcttacaaagaggatctgagactgttctaggaacggctgctaacgagagggaacttttcttgactaatgaatgtcttactgttcagctcaaggacataaaaggaacagtaagttttgagattcgatcaaggccgtggggtcatcagtataagaaagagcacatggctgcagataaacttgaccgggcaagagctgaggaaagaaaagctaaagatttgccaatagaatactactgcaaaagcttgtactcacctgagaaaggtggattctttagtcttccaagaagtgatatgggtctaggttctggattctgcagttcatgtaagataagagagaatgaagaggaaaggtcaaaaactaaactcaatgattcaaagacaagatttctctccaatgggatcaagtattctgttggggattttgtttatcaaatccccaactacttaagtaaagataggggtaaaagaaggccagtgtttaagtatggtaggaatgttgggttaagagcctttgtggtttgccaaatactggatatagttgacctaaaagaacccaaaaaaggtaatacgacttcttttgaggtcaaagtgagacggttttataggcccgatgatgtttctgcagaagaggcttatgcttcagacatacaagaggtttattatagcgaggacacatatattcttcctccagaagctataaagggaaaatgcgaagttatgaaaaaaactgatatgcccttatgtcgtgagtatccaattttagaccatgtctacttctgtgaccgtttttatgactcatccaatggttgtctcaagaagttgccttacaatatgatgctgaagttctctactattaaagacgacacacttctaagggaaaagaagactgaaactggttctgcaatgcttctgaagcccgatgaggtacctaaagggaagcgtctagctacactagatatttttgccggatgtggtggcttgtcttatggactagaaaaggctggtgtatccgatacaaagtgggcgatcgagtatgaagagccagctgcacaagctttcaaacaaaaccatcccaaaacaacggtttttgttgacaactgcaatgtaattcttaggatcagttggttgagattattaattaatgacagggctataatggagaaatgtggagatgttgatgattgtatctctactacggaggcagctgaacttgcaacgaaacttgatgagaaccagaagagtaccctaccacttcccggtcaagtggatttcatcagtggagggcctccgtgccaggggttttctcgtttaaataggttcagtgacggctcttggagtaaaaaccagtgtcaaatgatattagcattcttgtcttttgctgactatttccggccaaagtattttcttctagagaacgtgaaaacctttgtgtcattcaatgaaggacatacatttcatcttactgtagcttctcttcttgaaatgggttaccaggtgagatttggactcttggaggcaggagcatatggaatatctcaacctcgtaaaagagctttcatttgggctgctgcaccaaacgaagttcttccggaatggccagagcccatgcatgtttttaataatccgggttttaaaatcccactatctcaaggtttgcattatgcggctgttcaaagtactaaatttggtgcacctttccgttcaatcactgtgagagacgcgattggtgatcttccaccaatagaaagcggagaatccaagataaacaaagaggagatgagaggaagcatgactgttctcactgatcatatatgtaaaaagatgaacgaactaaacctcattcgctgtaagaaaatccctaagacacccggtgctgattggcgtgacctaccagacgaacatgtgaatttatcaaatgggattgtgaaaaacattgttcccaatttgttaaacaaagctaaggaccacaacggttataagggactctatggtagactggactggcatggcaatttacccacttgcatcaccaatcttcagcccatggggttggtgggaatgtgcttccatcctgaccaggacagaattatcagtgttcgtgaatgcgcccgatctcaggggtttccggatagctataagttttcaggaaatataaaagacaaacataggcaggttggaaatgcagtccctccaccattagcgtttgctcttggtcggaagcttaaagaagccctacaccttaggaacatctaa

SEQ ID NO: 1639 - DNA, 1143 bp, Arabidopsis thaliana
  Clone ID: AT_F13D4.C1.o80.tg
atgttgaccgagaaaatgaatgaagcgagccaagatgaagacaatgttgcattgtcgaacaccaaagaaacggagaagaagcagaggaagcggaagaaggattgcgaggaaaagaataagaagaagcgaaagaaggattgcgaggaaaagcatgagacgaaggaaatggagttagcgtggaaacctgaggattgtgctaagccattaggcgaagtgagtaaggttactgggaagggaaaaaagaaaaaaagtcatttcaaaacattcacgtttcgaggcaaccaatatgcgctggaggattcagtgcaattggttccagacgacccaaacagcaagccctattgtgccattataaaggatatttatataccaaacaaagaaaaatacgtgaaacttgcagtccattggttttatcgtccagaggatgtggataaaaaacatgttggaaaatgggaatccaaagattcaagaaacctgttctacagtttccatcgtgatgaggtgtttgctgaatctgtgaagcacaagtgtgttgtgaatttcgtgccggaaaataagcaaatcccaaaccgtagagagcatccttgcttcatcgtgcaaaatgtttatgattttgttaagaagaaggtgaggaagttcactgataagaactttgacgtgcaccaaaagaatgagattgatcgtcttgtggcaaagacgagtttacgccttggtgatcttcctgacattgagaaagaccaagtgactaagacttcaaagggtaaaagaactgttcagagaaagagtcctaaaaccagtacggtttataagtcgatcttggaggattttgatttgttaaccggtgattcggatcgtgacaagcgattgggggagctcctggaagcagttaagcacgagtgtcgtacaagtaagaagaaaggggctcgtgatgatgattcttactggccagatgatgttgttccggtggttcgagctcttgagcatgtcttttatgattctatggcagaagatatgtcaaagtatcatcacaagttggagattctggttgatgaactcaaggttagtttaattcctttcactcatccatcctatatttttatttttgttttgcatgttcttgatttctatttatttttttgttaa

SEQ ID NO: 1640 - DNA, 471 bp, Arabidopsis thaliana
  Clone ID: AT_T27D20.C1.o8.tg
atggcgaaaactcgacctggtgtcgctttttcttcaaagattaagctgggcaagaaagatatcaaaattttaggaagagaaattttacttggaaatgtgatagttgaggtgggtttttttacagtgggagattgtgtgttaatgcgtccatcagatgctggtaaagctccttacgtggcgcgtgttgagaagattgaagcagatgcaaggaacaatgtgaaggtgcattgtcgatggtactattgtcctgaagaatcacatgggggaaggagacagctccatggagctaaagagcttttcttgtctgatcacttcgatgttcaaagtgcacacaccattgaaggaaaatgtatagttcacacctttaaaaactacacgaggcttgaaaatgttggagtggaagattattactgtatatttgactataaagctgctactggcgcgtttactcctgatcgagttgctgtgtga

SEQ ID NO: 1641 - DNA, 1746 bp, Arabidopsis thaliana
  Clone ID: AT_MDF20.C1.o4.tg
atgttgtctctgaggagtttgtgcgcattcatggtcctgagaattcaattcattctggcttcaaatggaggtcgagaagggaagttgtggattggctcacttcaatgctgtctaagcagagtacacaaggaaactggtcgagtccgtcttcccataaacttgattattcacagttgggagattatgtggtcaggagctccttggatgtgtggtaaacagctcaaacattacccatcattttgcagaaatgggacaacaataggggttcaatcttttgtctttgtcttgagcaaaggggaggatcggtacgttgcatatctggaagatatgtatgaggataagcgtggcctaaaaaaggtcaaagtgaggtggtttcactacacaaaagaagtgaagggtgcagttgctctcaagaacccaaacccaaaagaggtttttatcacccctcattcacaggtcatcagtgcagaatgtgttgatggtcctgccactgtcttgacccgtgagcattatgaggagtgtgtggcttcctttccgaattctttattggcaagggtacacatgtgctatcggcaactcaggaacagcaaagttaaaccttttgatttgagtaaattgcgtggatatttggaccaaccgattatgtcttgcttaagttctatggaggctggtcctgtagactgtgcgatgaatatagaggaagatgaagaatggagtgagggtgagaatgtaatggttggtgctgagagaagcatgaaaaaacgagcaagaattatgtctgatcatctgttaacaacttacgaatcttcatgtaagagactaaaacttaatgcctcgggcaaaagatttccttcaccaaccaatgttcagaaacatccttgttacaacggagtggttaagactgatgcaaaaatagagtttctgtgtcaagatagcggtattagaggctgttggtttagatgcactgtcctggacgtatcaaggaaacaggtaaaactccagtatgatgatatagaggacgaggatggatatggaaaccttgaggaatgggtgccggcttttaaatctgctatgcctgacaagcttggtataaggttgtccaaccgcccaacaatccgacctgctcctcgagatgttaaaacagcatactttgatcttacaattggtgaagctgttgatgcatggtggaatgatggttggtgggaaggtgttgtaattgccactggcaaaccggatactgaggacttgaaaatatatatccctggggagaacttatgcttaacagtgctcagaaaggatattcggatttccagagactgggtgggagatagctgggttgatatcgatcctaaacccgaaatactcgctattgtatcttctgatagtagctcggaatccaagctttccatgttgtccactctttcaaaagacacaaaggcaaaacccagtgctatgccaaatattgttgaggaggcagaacctgaaggtgagaaagcgtacaattcccttttaggagaacagaacaaagagcataaagatgtggtagttaaggaagatgacgaaaacaaactttcaaaagaagaggataaagaggttggaagtaacgaaactaaaacctatgtcaaccatgaaaataccgtggaggaccacaaagaagatgatgttacccttaatgatgagaaggcccgcaaatcagaatcagtcttcaccctatcaaaaactactaccacgctggtgacaacgtaa

SEQ ID NO: 1642 - DNA, 1143 bp, Arabidopsis thaliana
  Clone ID: AT_T15B3.C1.o130.tg
atgtccatccagcaatcgaatgaagtggttgtgattgacaatgttccattgtcgacgttaagcaccaaagaaacgacgacaaagaagagaagggtggaggagagtaaggaaatgcaagtgaagaagaaagcaaagttcgagcagagaccgagcgattgtgcgaagtcaattggtaaaccgattaagtttactggtaagggacaaaacaagaaatgtcattacgagacattcgagtttcatggcaaacaatatagactgaaagactttgtgctattgtatccagaagacaataaacaaaaggaatacattgcgatcatcaaggatatttattcacaagaaaaagatggacttgtgaagatggaggtgcagtggttttaccgtagagaagatatcgaagaaaaacattttgggaagtggaaaaccgaaaacccaagggaaattttcttcagttttcattgtgatgaagtgtttgctgaatctgtcaagtacaagtgtcttgtatatttcgtgccagatgataagcaaatcccaaaccgtattcatcattccggcttcatcgtgcaaatggtttatgataatgttcgcaaaaaggtgaggaagttctctcatgaaggctttgaagaggagcaaaagtttgagattgatatgcttgtggcaaagacggtttcgagaattggaaatctcgttgacgttgagaaagttcaaacgactacgattccgaggcgtaaaagaattgttaggaagtgtgagagaatgagttctaacccgatctcggagaagttagagtcgttaccatccagtgctttggatcgtgacaagacattgttggagcttttagaagtagtacttaagaacatgtgttgtgaaagtacggggaccagtcgaaaggatgttgttcagatggtacttgctcttgaggaggctttatatgattctttcgcggatgatgtaccaaagtataattacaagttggagcttctggttgagagactcaagaattcaagagtgctagctacaagacttctcaatggcgaattaaaacctgaacaagctataaagatggccgacttcgaagaaccaaaattggtggaagatgttgcatccacctccgaaaatgttgggcacaaagattgtctcgattaa

SEQ ID NO: 1643 - DNA, 4539 bp, Arabidopsis thaliana
  Clone ID: AT_F23J3.C1.o20.tg
atggagacaaaagttgggaagcaaaagaagagaagtgttgactcaaatgatgatgtctctaaggaaaggagaccaaagcgagcagcagcttgcagaaacttcaaggagaaacctcttcgtatctctgacaaatctgaaaccgttgaagctaagaaagagcagaacgtggtggaagagatcgtggcgatacagttaacttcttctttggagagcaatgatgatcctcgtccaaaccggaggctgactgattttgttttacataattcagatggagttccacagcctgtggagatgttggaacttggtgacatttttcttgaaggtgttgtcttacctttaggtgatgacaaaaacgaagaaaagggtgtgaggtttcaatcttttggtcgtgtcgagaactggaatatatctggttatgaagatggttccccggggatatggatatcaacagcgttagcggattacgattgccgtaaaccagcttctaaatacaagaaaatatatgattatttctttgagaaagcttgtgcttgtgtggaggtgtttaagagcttgtccaagaatccggatacaagtcttgatgagcttcttgcggcggttgcgaggtcgatgagcggaagcaagatattttctagcggtggagccatccaagagtttgttatatcccaaggagaattcatatataaccaactcgctggtctggatgagacagccaagaatcatgaaacatgctttgttgaaaattctgttcttgtttctctaagagatcatgaaagtagtaaaatccacaaggctttgtctaatgtggctctgaggattgatgagagccagctcgtgaaatctgatcatttagtggatggtgctgaggccgaggatgtaagatatgctaagttaatccaagaagaagagtatcggatatctatggagcggtcgagaaataagagaagttcaacaacttctgcttcgaataagttttacattaagatcaatgaacacgagattgccaatgattatccactcccgtcttactacaagaacaccaaagaagaaacagatgagcttttactctttgaacctggctatgaggtagatacaagggacctaccttgtagaacacttcacaattgggctctttacaactctgattcacggatgatatcattagaggttcttcccatgaggccgtgtgctgaaatcgatgtcaccgtatttgggtcaggtgtggtggctgaagatgatggaagtgggttttgtctcgatgattcagagagctctacctctacgcagtcaaatgttcatgatgggatgaacatattccttagtcaaataaaggaatggatgattgagtttggagcagaaatgatctttgtcacattacgaactgacatggcctggtatcgacttgggaaaccgtcaaagcaatatgctccatggtttgaaactgttatgaaaacagtaagggttgcgataagcattttcaatatgctcatgagagaaagtagggttgctaagctttcatatgcaaatgtcataaaaagactttgtgggttagaggagaacgataaagcttacatttcttctaagctcttggatgttgagagatatgttgtcgtccatggacaaattatcttgcagcttttcgaagagtatcctgacaaggatatcaaaaggtgtccatttgttactggtcttgcaagtaaaatgcaggatatacaccacacaaaatggatcatcaagaggaagaagaaaattctgcaaaagggaaagaatctgaatccgagggcgggcttggcacatgtggtaaccagaatgaaacctatgcaagcaacaacaactcgcctcgttaatagaatttggggagagttttactccatttactctcctgaggttccatcggaggcgattcatgaagtggaagaagaggagattgaagaggatgaagaggaggacgagaatgaggaagatgatatagaggaggaagctgttgaggttcaaaagtctcatactcctaagaaaagtagaggtaattctgaagatatggagataaaatggaatggtgagattcttggagaaacttctgatggtgagcctctctatggaagagcccttgttggaggggaaacagtggcggtaggtagtgctgtcatattagaagttgatgatccagatgaaactccggcgatctattttgtggagttcatgttcgagagttcagatcagtgcaagatgctacatgggaaactcttacaaagaggatctgagactgttataggaacggctgctaacgagagggaactgttcttgactaatgaatgtcttactgtccatcttaaggacataaaaggaacagtaagtctcgatattcgatcaaggccgtgggggcatcagtataggaaagagaacctcgttgtggataagcttgaccgggcaagagcagaagaaagaaaagctaatggtttgccaacagaatactactgcaaaagcttgtactcacctgagagaggtggattctttagtcttccaaggaatgatattggtcttggttctggattctgtagttcgtgtaagataaaagaggaagaagaggaaaggtccaaaactaaactcaacatctcaaagacaggggttttctccaatgggatagagtattataatggagattttgtctatgtactccccaactacataactaaagatggattgaagaagggtactagtagaagaacaactcttaagtgtggtcggaacgttgggttaaaagcttttgttgtttgccaattgctggatgttattgttctagaagaatctagaaaagctagtaatgcttcatttcaggttaaactgacaaggttttataggcccgaggacatttctgaagaaaaggcttatgcttcagacatccaagagttgtattatagccatgacacatatattcttcctcctgaggctctacaaggaaaatgtgaagtaaggaagaaaaatgatatgcccctatgtcgtgagtatccaatattagatcatatcttcttctgtgaagttttctatgattcctctactggttatctcaagcagtttccagcgaatatgaagctgaagttctctactattaaagatgaaacacttctaagagaaaagaaggggaagggagtagagactggaactagttctggaattcttatgaagcctgatgaggtacctaaagagatgcgtctagctacactagatatttttgctggatgtggtggtctatctcatggactagaaaaggctggtgtatctaatacaaagtgggcgatcgagtatgaagagccagctggtcatgcgtttaaacaaaaccatcccgaagcaacggtttttgttgacaactgcaatgtcattcttagggctataatggagaaatgtggagatgtcgatgattgtgtctctactgtggaggcagctgaacttgtagctaaacttgatgagaaccaaaagagtaccctgccacttcctggtcaagcggatttcatcagcggagggcctccatgccaagggttttctggtatgaacaggttcagtgacggttcgtggagtaaagtacagtgtgaaatgatattagcattcttgtcctttgctgattatttccgaccaaagtattttcttctcgagaacgtaaagaaatttgtgacatacaataaagggagaacatttcaacttactatggcttctcttcttgaaataggttaccaagtaagatttggaatcttggaggcaggtacatatggagtttctcagcctcgtaaaagagttataatttgggcagcttcaccagaagaagttcttccagaatggcctgagccgatgcatgtctttgataatccgggtagtaaaatctccttacctcgaggtttacattatgatactgttcgtaatactaaatttggcgcaccgttccgctcaatcacggtgagagacacaatcggcgatcttccactagtagaaaacggagagtccaagataaacaaagagtatagaactactccagtctcgtggttccaaaagaagataagaggaaacatgagtgttctcactgatcatatctgcaaagggctgaatgaactaaacctcattcgatgtaagaaaatcccaaagaggcctggtgctgattggcgtgacctgccggacgaaaacgtgacattatcaaatggactcgtggaaaaactgcgtcctttagctctatcaaagacagctaaaaaccacaacgaatggaagggactctatggtagattggactggcaaggaaacttacccatttccatcaccgatccgcagcccatgggtaaggtgggaatgtgcttccatccagaacaggacagaattatcactgtccgtgaatgcgcccgatctcaggggtttccggatagctatgagttttcagggacgacaaaacacaaacataggcagattggaaatgcagtccctccaccattggcattcgctctcggtcggaagctcaaagaagccctatatctcaagagttctcttcaacaccaatcataa

SEQ ID NO: 1644 - DNA, 1959 bp, Arabidopsis thaliana
  Clone ID: AT_F25E4.C1.o180.tg
atggtgttgtctcggcgatttgctcaagtgtcgagtgacgaagaagacgatgtaccgattactaggtctaagggaagaaactcggcgagtcctgaggaatctttggggaaacggaggaagcgtaagacggtgaagctatacgaagattttgaagagaaggaagcggataggaagaagaagagaaaggggaataaggaggatgaggatatggcggagggagatgatgatcaggcggaggaagaaacaaatccggaggctgaagaagaggaagacgaagaagaagaagagaagcctgatgatgcgtgtcctgttggtgattcggttaatgttacgggtaaaggaaaagggaaaagaactcatttcaaccaatttgcttatgatggtaacacttatgatctgggttttcttgttgtggatttggaattgaggtttggtttgagatttttttttacaattgagtctgcattgcttgctgctattacattgttgtggatattgaaatctaggaaacttttgtcaataactggtcttatacgctcatggttgttgtcatttgttgaacatccattgctgtgtcagaggaatgtttctctctcgcttatgttgtttagatttctagttctgactgcaccgtgtcttgagacttcggaagaggttccggtgttgctggttcctgaggacaaaagtcaaaaaccatatgttgcaattattaaggtgctggatattacccaaactaaagatggaagcatgatgattctgggacagtggttttatcgccccgaagaagcagagaaaaggggtggtggaaactggcaatcaagtgatacacgagaacttttctacagtttccatcgtgatgaagtgccagcagaatctgtgatgcacagatgtgttgtttattttgtcccggcccataaacaacttccaaaacgcaaaaataaccctggatttattgtacgaaaggtctatgataccgttgaaaagaagctgtggaagctgactgacaaagactatgaagactcaaaacaacgtgaaatcgatgttcttgtcaaaaagaccatgaacgtattgggtgatctcccggaccttgaatctgaggatatgcttgttgaccaggaaaatgtgttgaaggccaaaagatcttttcggaaagtaaacataagtcctgtggatgttagaagggaggaagacgcctctttaaaggctgaaactcctggaagtggtgcgggtatttcatcagagcattatgctatcttagagaagtttgattcactaacaggtgatgctcatcgtgacaagtgtttggggaagcttctggaggcagtccagcacatatgttatatccctgagaacaaacaggctggcgacgaagcaaaggatgagaaatttctctggccagatgctgctgttcctcaagtgtgtgctcttgagaatgcttcacatgcttctcttgcatcggattttcagaaatataaccaaaagatgaggacactggttttcaatctcaagaacactgcactgctggctagacgactgctcaatggcgagttagagcctgcaacgattttgaacatgtcacccactgagttaaaggagggtctaactgctgacgagacaacaaagaaggagcctgatgatgctgatcgaatgcagatgacttctgtaagatgctcgagatgcagtcaattgacggttggcctgagggatatcatccaagctgggcatggagatcgatatcagttggagtgtgttgactgtggctattcctggtatgcctcaagggatgaggtatcaactctgacaatagtcacagataaacctgcccaaggcacagagaaggaggatattgagaagaatttgaccagtcctcgtgaaactaataaaccaaaagacgaagccttgaagaccaatgactcgaacgctgacaacaatcctgaagcctccaagaaaccagagtaa

SEQ ID NO: 1645 - DNA, 777 bp, Arabidopsis thaliana
  Clone ID: AT_F19H22.C1.o200.tg
atgcccaagcaaaaagctccaaggaagcagctcaagtcctataaactcaaacacatcaacaagagtattcaagagggagatgctgtgttgatgcggtcgtcggagcctggaaaaccgtcgtacgtagcgagggtagaggcgatcgagacggacgcgcgtggatcgcacgcgaaagttcgtgtgaggtggtattatcgccctgaggaatctatcggagggaggagacaattccatggagccaaggaggtttttctctctgaccacttcgattttcaaagcgccgatacgattgaaggaaagtgtaaggttcacagtttcagtagctacaccaaacttgactctgttggaaacgacgacttcttctgtcgtttcgagtacaattccactaccggcgcgtttgatcctgacagagtcaccgtgttctgcaagtgtgagatgccgtataacccagatgacttgatggtgcaatgcgaggagtgttctgagtggtttcatccttcttgtataggaacaacaatagaggaagctaaaaagccagataacttctactgcgaagagtgttccccacaacagcagaatttgcacaactctaattcaacttccaataacagagatgctaaggtatttctctatttctcatttcagaaaatatctttagtttttgagggatggtcaaacccgttgcaaataggcttgaataaatttaaggtatttaagttgaccgttcgttccacatataaagctagccttgccaacaattgtaagctcttggactga

SEQ ID NO: 1646 - DNA, 606 bp, Arabidopsis thaliana
  Clone ID: AT_F1N20.C1.o240.tg
ggagattgtgtgttgatgcgcccatcagatgctggtaaaccaccatatgtggcccgtgttgagaagattgaagctgatgcgaggaacaatgtgaaggtgcactgtcgatggtattaccgccctgaggagtcacttggtggtaggagacaatttcatggagccaaagagcttttcttgtctgaccattttgatgttcaaagtgcacacaccattgagggaaaatgcattgttcacaccttcaaaaactacacgaggcttgaaaacgttggggcagaggattattattgtagattcgagtacaaggctgctactggcgcatttacccctgatcgagttgctgtgtactgcaaatgtgaaatgccttacaatccagacgatctcatggtgcagtgtgaaggctgcaaagactggtatcatcctgcgtgtgttggcatgacgattgaagaagcaaagaagcttgatcactttgtatgtgctgaatgcagttctgatgacgatgtcaaaaaatcgcagaatgggtttacttcatctccagctgatgatgttaaggtccgtttgtctctctttagtcatctcctatatagatgttctatcacttatttataa

SEQ ID NO: 1647 - DNA, 2382 bp, Arabidopsis thaliana
  Clone ID: AT_F23A5.C1.o8.tg
atggcagcgagaaacaaacaaaagaaacgcgctgagccagagtcagatctgtgcttcgctggcaaaccaatgtctgttgtggagtcgacgattcgatggcctcatcgctaccaatccaagaaaacaaagctccaagctccgaccaaaaaacctgcaaataagggtggcaaaaaagaagatgaagagataataaagcaagctaaatgccactttgacaaagctttggttgatggagttctcatcaacctaaacgacgatgtctatgtcacgggtctaccagggaagctgaaattcattgcaaaagttatcgagctctttgaagctgatgatggggtgccgtattgtcgctttcgatggtactatcggcctgaagatactttaatcgaaagattttcccaccttgtgcaaccaaagagagtgtttctctcaaatgatgagaatgacaatcctctcacctgcatctggtcaaaagtcaacatcgctaaagtcccattacctaagattacctccagaatcgagcaaagggttattcctccttgtgattactactacgatatgaagtacgaagttccttatctcaactttacaagtgcagatgatggtagtgatgcctcatcaagtctttcaagtgactctgccttgaattgctttgaaaatctccacaaggatgaaaaattcttattggatctatacagtgggtgcggagcgatgtccacaggtttctgcatgggagcttccatatcaggagtaaaattgattacgaaatggtctgtggatataaataagtttgcttgtgatagtcttaaacttaatcatcctgaaacagaggtgagaaacgaagccgcagaagattttctagctcttctcaaagaatggaaaaggctctgtgagaagttttctctcgtttcaagcaccgaaccagtggaatcaatttctgagttagaagatgaagaagttgaagaaaatgatgacatagatgaggcaagtactggtgctgaactcgaacctggagagtttgaagtagaaaagttccttggcatcatgtttggagatcctcaaggcacaggggaaaagacacttcaacttatggtaaggtggaagggatacaattctagttatgacacatgggaaccttactctggcttaggcaactgcaaggagaagctgaaggagtacgtgatagatgggtttaagtctcatctcttaccacttccgggtactgtctacacagtgtgcggtgggcccccttgccaagggatcagtgggtataaccggtatagaaacaatgaagcaccgcttgaagatcagaagaaccagcaacttttggtgtttttagacatcattgacttcctcaagccaaactatgtgctgatggaaaatgttgtagaccttcttaggttttcaaagggtttcctggcacgtcatgctgtagctagctttgttgcgatgaattaccagacgcggttgggcatgatggctgctggatcttatgggctccctcagcttagaaacagggtttttttatgggctgcacaaccatcagagaaacttcccccttatcccctcccaacacatgaagttgctaaaaagttcaacacacctaaagaattcaaagcaagtgatttacaagttggacgtattcaaatggagttccttaaattggacaacgctcttacgctggctgatgctattagtgatctgccaccggtgacaaattatgtggcaaatgatgtaatggattataatgatgctgctcctaagacagagtttgagaactttattagcctcaaaagatctgagacacttttacccgcatttggtggagatccgacacgcaggttgtttgatcaccaacccctcgtattaggagatgatgacttggaaagagtttcctacataccaaaacagaagggggcaaactatcgcgacatgcctggtgttttagttcacaacaacaaagcggaaattaatcctaggtttcgagcaaagttgaaatctggaaaaaatgtggtccctgcttatgcaatttcattcataaaaggaaaatcaaaaaagccgtttggtagactttggggtgatgaaatcgttaacactgttgtgacaagggctgaacctcacaaccagtgtgtaatccatccaatgcaaaaccgtgtgttgtctgttcgtgagaatgcgagattacaggggttccctgattgttacaagctctgtggaacaattaaggaaaagtacatccaggttgggaatgctgtggcagttcctgtaggggttgcattaggatatgcctttggtatggcgagtcaaggactgacggatgatgaaccagtaatcaagctgccattcaagtatcccgaatgcatgcaggcaaaggatcaaatctga

SEQ ID NO: 1648 - DNA, 3516 bp, Arabidopsis thaliana
  Clone ID: AT_F13C5.C1.o190.tg
atgttatcgccggccaaatgtgagtcagaagaggctcaagctccattggatctccattcttcttctagatctgaaccggaatgtctctctcttgtcctctggtgtcccaatcctgaagaagctgctccgtcctctactagagaactcataaagctccccgacaacggagagatgagtttgaggagatccacgacgcttaattgtaattcgcctgaagagaacggaggagaagggagagtttcgcagaggaagtcatctcgtggtaagtcacagccgctgcttatgttgacgaacggttgtcagcttcggaggtcgccgagatttagggccctgcatgcaaatttcgacaatgtatgctcggttccggttaccaaagggggagtttcgcagaggaagttctctcgtggtaagtcacagccgctgcttactttgacgaacggttgtcagcttcggaggtcgccgagatttagggcggtggatggaaattttgacagtgtatgctcggttccggtgactggaaagtttgggtcgaggaagagaaagagtaatagtgctctcgataagaaggaaagctcagattctgagggactgacattcaaagatatagctgtaattgccaagagcctggagatggaaataatttccgagtgccaatataagaacaacgttgctgaaggtagatcaagattgcaagatccagccaagaggaaagttgatagtgatacattattatattcaagcatcaatagttctaaacagagtctcggaagcaataaacgaatgaggagatctcaaagattcatgaagggaacggagaatgagggagaagaaaatctaggcaagtctaaaggaaaagggatgtctctggcatcttgctcatttcgaagatctacaaggctatctggaactgtggaaactggcaacacagaaactttgaacagaagaaaagattgtggcccggcattatgtggtgcagaacaggtgaggggaactgagaggctggtgcaaattagtaagaaggatcactgttgtgaggctatgaagaaatgtgaaggtgatggcctagtttcatccaagcaagagctattagtttttccttcgggttgcatcaagaaaactgtaaatggttgtagggacagaacgttaggaaaacccagatcttctggcctaaatacggatgatattcacactagctctttgaaaattagcaaaaatgatactagtaatggattaactatgacgactgcgttagtggagcaagatgcaatggagtctttacttcagggtaaaactagtgcttgtggtgctgctgataagggaaaaactcgggaaatgcatgtaaattctactgtgatctatctctctgacagcgatgaaccgtcttctattgaatatttaaatggagataatttgacacaagtcgaaagtggatctgccctctcctctgggggtaatgagggaatcgtttcactggatctgaataatccaacgaaatcaaccaagagaaagggtaaacgggtaacccggactgctgtccaagagcagaacaaacgtagtatctgttttttcattggagagccactttcttgcgaggaggctcaagaaagatggcgctggagatatgaacttaagatggagaaagctacttccgagttcagtggttttacagagcaacggatacagtgtgtatacaagttcttctcttttataatggaacggcaggctactaatcatgacaaaaggcgtctcttctattctaccgtaatgaatgacaatccagtagattgtcttatttctaaagttactgttttacaagtttcacctagggtcggattgaagcccaattctataaaatctgactactattttgatatggagtattgtgtggagtattcaacatttcaaaccttgagaaatcgtaagtgctcatctaaaacgtccgaaaacaagcttgagtgttgtgccgatgtggtacctacagaatccactgaatctattttgaaaaagaaaagttttagcggagagcttcctgtgcttgatctttacagtggttgtggtggaatgtcaactgggttaagtcttggagccaaaatatctggtgttgatgtcgtgacgaaatgggctgtggaccagaatacggctgcctgtaagagcttgaaattgaaccatccaaacacgcaggttaggaatgatgctgctggagacttcctccaacttttgaaggaatgggataaattatgcaagcgatatgtgtttaataatgatcagagaactgatacattaagatccgtaaattcaactaaagaaactagtggaagcagctcttctagtgatgatgattcagattctgaggagtacgaagtggaaaagctagttgatatatgctttggtgatcatgacaagacaggaaaaaatggcctgaagtttaaggtgcactggaaaggatacagaagcgacgaagatacatgggaactagcagaggaattgaggtatatgcttcaaaacaatgttaaaaagagattctgttgttatctggaactaattaattttgtttggaattttagtaactgtcaagatgccattcgggagtttgtaactagtggatttaagtccaagatcttgccacttcctggtcgtgttggtgtgatatgtgggggacctccatgccaaggaattagtggctataaccggcacaggaatgttgattctccattgaatgatgaaaggaatcagcaaattatagtttttatggacatagtggagtatctgaaaccctcatatgtgttgatggaaaatgttgttgatattctgcgtatggacaaaggttctcttgggcgatacgctttgagccgtcttgtgaacatgagataccaagcaaggttaggtatcatgacagctggttgctatggtctttcccaatttcgatccagagttttcatgtggggagctgttccaaacaagaacctacctccgtttccgcttccaacgcatgatgttattgtcagatatgggcttccacttgagttcgagaggaatgtagttgcttatgctgaaggccaacccagaaaacttgaaaaagctcttgttctaaaagatgcgatatcagatcttcctcatgtatgtttcatttccactagatccatctgcaattcaggaccgtttgctcgtctttggtgggatgaaactgttccaaccgttctaacagtcccaacatgccacagtcaggtaccctcaaagccattccaggcgttattgcatcctgagcaagatcgagtgctaaccataagagaatctgcacggcttcaaggtttccctgattacttccagttctgtggaaccattaaagaaaggtattgtcagattggaaatgcagtggcagtctcggtttctcgtgctttaggttattcgcttggtatggcttttcgtggtctagcccgcgacgagcatcttataaaacttccccaaaacttttcgcattcaacttaccctcagcttcaagaaaccattcctcattga

SEQ ID NO: 1649 - DNA, 2520 bp, Arabidopsis thaliana
  Clone ID: AT_T6C23.C1.o3.tg
atggcgccgaagcgaaagagacctgcgacaaaggatgacactaccaaatccattcccaaaccgaagaagagagctcctaagcgagctaagacggtgaaagaagagccggtgacagtggtcgaggaaggggaaaagcatgttgcgaggtttctagacgagccaattccagaatctgaagcgaagagtacctggcctgacagatacaaaccgattgaggtacagccacctaaggcttcgtcaagaaagaagacgaaggatgacgaaaaagttgagatcattcgtgctcgatgccattatagacgtgcgattgttgatgagcgtcagatatatgagctgaatgatgatgcttatgtacagtctggtgagggaaaggatcccttcatttgtaaaatcattgaaatgtttgaaggggctaatgggaaactgtatttcacggctcggtggttttatagaccttctgatactgtaatgaaagagttcgagattctgatcaagaaaaagcgtgtgtttttctctgagatacaagatacaaatgaattgggattacttgaaaagaagctgaacattttgatgattcccttgaatgaaaatactaaagagactatccctgcaacagaaaactgtgactttttctgtgacatgaactatttcttgccttacgatacatttgaagctatacaacaagaaaccatgatggctataagtgaaagttcaacaatatccagtgatactgatataagagaaggagctgctgccatatcagagattggagaatgttctcaagaaacagaaggtcacaaaaaggcaactttgcttgacctttactccggctgtggagctatgtcgacagggttgtgcatgggtgcacaactgtctggtttgaacctcgtcactaaatgggctgttgacatgaatgcacatgcatgtaaaagcttgcagcataaccacccagagacaaacgtgagaaacatgaccgcagaagatttcttgtttctgcttaaggagtgggagaagctatgcattcatttctctttgagaaatagtccaaattcagaagaatatgccaaccttcacggtttgaataatgttgaggacaatgaagatgtcagcgaggagagtgaaaatgaagatgatggagaagtttttactgttgacaagattgttggtatttccttcggagtccctaaaaagttattgaaacgtggactttatttgaaggtaaggtggctgaattatgatgattctcatgatacatgggagcctattgaaggactcagtaattgccggggtaaaattgaagagttcgttaaacttggatataaatctggcatccttccgttaccaggaggtgttgatgttgtctgcggtgggccaccatgccaaggaatcagtggtcacaaccgcttcaggaacttattggaccctctagaagatcagaaaaacaagcagcttttggtgtatatgaacattgtagaatatttgaagcctaagttcgttttgatggaaaacgtcgttgacatgctgaagatggctaagggctatcttgcacggtttgctgttggacgccttctacagatgaattaccaagtgaggaatggaatgatggcagctggagcttatgggcttgctcagtttcgtttgaggttctttctatggggtgcactccctagtgagataattccgcagttcccacttccaacacatgatctagttcatagaggaaatattgtcaaggagtttcagggaaacatagtagcctatgatgaaggacatactgtgaagttagcagacaagcttttgttgaaggatgtgatttctgatcttcctgcagttgccaacagtgaaaaaagagacgagattacatatgacaaagatcccacaacgccatttcaaaagttcatcagattgagaaaggatgaagcgtcaggttcacaatcaaagtccaagtccaaaaagcatgtcttatatgatcatcaccctcttaatcttaatataaatgactatgaacgggtttgtcaggtccccaagagaaagggagcgaattttagggactttcctggtgttattgttggacctggtaatgtagtcaagttggaagagggaaaggaaagggtcaaacttgaatctggaaaaacattggttcccgattatgccttaacatatgtcgatgggaaatcatgcaaaccttttggtcgtctttggtgggacgaaattgtccccactgttgtcacacgggcagaaccccacaaccaggtgatcattcatccagagcaaaatcgggttttatccattcgagaaaatgcgagactccaaggctttcctgatgactacaaactctttggcccacccaaacagaagtacattcaagtaggtaacgctgtagctgtgccagtagcgaaggcccttggatatgctttgggaacagctttccagggactcgcagttgggaaagatccacttcttactctgcctgaaggttttgcattcatgaagccaactcttccttccgagcttgcatga

SEQ ID NO: 1650 - DNA, 4836 bp, Arabidopsis thaliana
  Clone ID: AT_T17F15.C1.o70.tg
atgcatgggagggtttgtgagcggaggcacaaaagtcgtcgtcggcacatgttgatatcttcctctcgtgtaattgcgactgtggaaggtggtggttcttcttgtttgtccttatcttcatctacctcgttttctaaggacgggcgcaaaattagtgttggtgactgtgctctgtttaagccaccacaggattgtccaccgttcattgggataattcgcttgatcattgctgaggaagaagataagttgaagttgggtgttaattggctttatcgacccactgaattaaaacttggcaaaggtatccttctagaggctgagccgaacgaactcttttattcctttcacgaggataatatacctgcagcatctttactgcatccgtgtaaagttgccttccttccaagaggtgttgaactgccatctggtatcagctcgtttgtgtgtcggcgagtttacgacgttacaaacgagcgcttatggtggctgactgatcaagactatattgatgatcgacaactagaagtagacaagttattgtgtaagactcgttcagaaatgcatacaacattacagcagggtggtcgttctccaaagtccatgaatagtccaacaacatcacaaccgaaagatggcatccagaacaacaactctcttttctctcagagtaagggaaggaaaagagagcgtatggatcatggttctgagtctgttaaacgggaacgttctagtcgagtagatgacagtggttccggtcccctcagaaccgaaagcggtttaacgtctgagattttaaaatttacagagaaaggtggtctggtggattctgaaggagttgaaaaattggttcagctcatgctgcctgagaggaatgaaaagaaaatagacttagttggccgtgcgattcttgcagggtttgtagcagcgacaaacaggtttgattgccttagtcgttttgtccagctcaggggattacccgtgtttgatgagtggctgcaggaagttcataaagggaaagttggggatgggggcagtcccaaagacagtgataggctagtagacgatttcctcttagtcttacttcgggctcttgataagctaccggtgaatctcaacgcgcttcagacttgtaacattggaaagtctgttaatcatctacgctcacataaaaattcagagattgggaaaaaagcaaggagcttggttgacacttggaagaaacgagttgaggcagaaatggatgcgaagtctggatccaaccagggtgtttcctggcctggaagactgagtcatgggggaaggcattcaggtggttccgcggaggcaaacaagacatcatcatcacacctacatgcttctaagtctgtctcggtcaaacaacaggtggaaaacaacctgaagtgtgtagccacgtcgccaggctccacaagatcagctccttctccgggatcaggtggtaatgtttctaaagatggacagcagcgaaatgctggggctggtggtgtatctgaagtcctagctgcagtaaaggatgagaaaagtagcagctccagtcagtcgcacaataatagtcagtcttgctcgagcgagcatgctaaaacaggcaatttatgtggaaaagaagatgcaagaagctctactgctggttcaactttgaagaagtgttccggtggctcttcaaggcatcggaagtcaaacaatgtgtttcaaggttcgtcttcgtcagcatcccctaggggagctggtttgagtagaagcttctcatcacacaggaatgtcccttctgagaaaatttctcaatcaagtttgacatctgaaaagactcttgaggttcctctgactgagggttccggtaataaattgattgtgaagctgccgcggggtcgaagtcctgctcaaagtgtgagtggaggctctttggaggaccctgcaccagtgaatagcagagtttcttcacctgtgcatacggtgaagcaggaactgtgtgacaataactggagagaaaaaaatcattcttatcgagctgatgtgagctctgtcttgaatgccgagtcttggcaaagcaatgaattaaaagatatattgacaggctcgcaagaggcaactggttcaccacttgttgttgctggtgatgagcgcgaaggggctcttaaggattctgataaagcatctgggaatgttaaagccacatcttcattaggaaatgagttcaaatctggagaaagacatggcggaacactcagttcgatgaatgctttgattgaaagttgtgtcagatactctgagacaaatgcctctttggctggttcggatgatgttggaatgaatcttcttgctagtgttgctgctgatgagatgtctaaatcgcctgttgcatcaccctcagtatctcagcctccaaattccttgatgaatgaaaattctactgtagggaacaatacaaagctaatggcttcggatggcttgcctcataagcaacatcaagctgttcgccccactctcagtaatgagcaaggtgagcaacatgttagcagtagtggcacacagttggagtcagagataaaaaatgaatctaagaccggagatcgtgttaagagctcgaattcagacactgaagatctgcaaaggtttgtggatcagcgcctagagagcaatgaaaattcagatggtgtcgttgcttcgcctcctttacccacaaaagtcattaaggaaaatattttggatgatagtgactctggagaagtgaaggatataaagactgatgttaaatcagaggctgattgcacatctgacttaacaaaaagagtagcaagctcaatgctaaccgaatgtagagatgtaagtaaaatggtagattctgtggctgttgaacatactcccttggaaggtgttgatgatgataagaaagaagagaaacccccaacggcgttgagttctgagctagttaaaaaagtggaagaagatgtacccgtttcttctgggatttcaaggggtatggatgctgtaagcattgatagacctataactgaaatggtcaataatattgcgtttaatcatatggaccaaaaagatataaagaagattaagcaggattttgatacttctgtgggagctgtaaaggatgcctcagccggtttggactcatctgtaactaaaggtaaagttgagcctgtggaggggaatctagaaaatattgaaatcatggaacggtactcaggattaagagctactccaggattatcacctaaagaagcagaggatcttaagagaccgaatgcgcctaaaaccagtgatgctgatggagatgaagcgggggaatgtacgtctgctgccagagatgcttcttccgtttcagctgcagcttcagcttcagctggctctgagatggatgccagagttgaatttgatctaaatgaaggttttgatggagacgatgcacaacatggggactcaaataacttctctggatctgtagttttgacgcctactcctctacaaccagttaataccttaccttttccggtggctcctgtatctagtggaattcctgcatccattactgttgctgctgccgtcaaaggtccgtttgttccacctgaagatctgttgagatataaaggggctgttggttggagaggatctgctgccactagtgccttccgcccagctgagccaagaaaagctcaggatgtgttactgagcattaacaatacctctacatctgatgcatctacttctgctggcaaacagacaaggacgtttctggattttgacttgaatgtacctgacgagagagtccttgaagatttggcttcccaaagatctggaaatcccacaaattgtacatctggtatcacaaataattttgaccaagtacgttctggggtcatgggttccgcccttgatcattcttctggaggccttgatctaaacaaagttgatgatttaactgatatgaacagctacacaatgaacagtagtcatcggctagattcatcttttcagcaggttaaattaccatcgactggtggtcgtagagattttgatttaaatgatggacctgtgggtgatgatgcagctgttgagccatcgatggttctaaatcaacattcacgaagtggcttgccatcacaaccatctctctctggaattcgagtgaatggcgaaaacatggctagtttctcaacttggtttcctgctgctaacgcttattcagctgtgagcatgcctccaattatgcctgagagaggtgatcagccttttccaatgattgccactcgtggcccacagagaatgttgggtccaacaactggtgtttcctcattttcccctgaagggtacaggggtcctgttttgtcgtcgtctccagccatgccatttcagtccacaacgttccagtatcctgtctttccttttggaaatagcttccccgttaccccagcgaatttccctggtgcttctacagcacacatggattcttcttcaagcgggagagcttacttccccggtgtcaactctcaaatattgggtcctggagttccagttccgtctaattacccaagaccttatatagttggcctcccaaacggtggtagcaatggcggtgttttggacaatagcgcgaaatggtttaggtcaggacttgacttaaattctggtcctggaggtcatgaaacagagggaagagacgaatcaacacttgtatcaaggcaattatcttcatctgcttccgtaccgtcgaaggaggatcaagcaagaatgtatcaaatgtcaggtggtgttctgaagaggaaagaaccggaaggaggatgggatggatataggcagtccttataa

SEQ ID NO: 1651 - DNA, 4842 bp, Arabidopsis thaliana
  Clone ID: AT_T17F15.C1.o80.tg
atgcatgggagggtttgtgagcggagacacaaaagtcgtcgtcggcacatgttgatatcttcctctcgtgtaattgcgactgtggaaggtggtggttcttcttgtttgtccttatcttcatctacctcgttttctaaggacgggcgcaaaattagtgttggtgactgtgctctgtttaagccaccacaggattgtccaccgttcattgggataattcgcttgatcattgctgaggaagaagataagttgaagttgggtgttaattggctttatcgacccactgaattaaaacttggcaaaggcatccttctagaggctgagccgaacgaactcttttactcctttcacgaggataatatacctgcagcatctttactgcatccgtgtaaagttgccttccttccaagaggtgttgaactgccatctggtatcagctcgtttgtgtgtcggcgagtttacgacgttacaaacgagcgcttatggtggctgactgatcaagactatattgatgatcgacaactagaagtagacaagttattgtgtaagactcgttcagaaatgcatacaacattacagcagggtggtcggtctcccaagtccatgaatagtccaacaacatcacaaccgaaagatggcatccagaacagtaactcttttctctctcagggtaagggaaggaaaagagagcgtatggatcatggttctgagtctgttaaaagggaacgttctagtcgagtagatgacagtggttctggtcccctcagaacagaaagcggtttaaagtctgaaattttaaaatttacagagaaaggtggtctggtggattctgaaggagttgaaaaattggttcagctcatgctgcctgagaggaatgaaaagaaaatagacttagttggccgtgcgattcttgcagggtttgtagcggcaacagacaagtttgattgccttagtcgttttgtccagctcaggggattacctgtgtttgatgagtggctgcaggaagttcataaagggaaagttggggatgggggcagtcccaaagacagtgataggttagtagacgatttcctcttagtcttacttcgggctcttgataagctacctgtgaatctcaacgcgctacagacttgtaacattggaaagtctgttaatcatctacgctcacataaaaattcagagattgggaaaaaagcaaggagcttggttgacacttggaagaaacgagttgaggcagaaatggatgcgaagtctggatccaaccagggtgtttcctggcctggaagactgagtcatgggggaaggcattcaggtggttccgcggaggcaaacaagacatcatcatcacacctacatgcttctaagtctgtctcggtcaaacaacaggtggaaaacaacctgaagtgtgtagccacgtcgccaggctccacaagatcagctccttctccgggatcaggtggtaatgtttctaaagatggacagcagcgaaatgctggggctggtggtgtatctgaagtcctagctgcagtaaaggatgagaaaagtagcagctccagtcagtcgcacaataatagtcagtcttgctcgagcgagcatgctaaaacaggcaatttatgtggaaaagaagatgcaagaagctctactgctggttcaactttgaagaagtgttccggtggctcttcaaggcatcggaagtcaaacaatgtgtttcaaggttcgtcttcgtcagcatcccctaggggagctggtttgagtagaagcttctcatcacacaggaatgtcccttctgagaaaatttctcaatcaagtttgacatctgaaaagactcttgaggttcctctgactgagggttccggtaataaattgattgtgaagctgccgaatcgtggtcgaagtcctgctcaaagtgtgagtggaggctctttggaagaccctgcaccggtgaatagcagagtttcttcacctgtgcatgcggtgaagcaggaactatgtgacaataacgggagagaaaaaaatcattcttatcgacctaatgtgagctctgtcttgaatgctgagtcttggcaaagcaatgaattaaaagatattttgacaggctcgcaagaggcagctggttcaccacttgttgctggtgatgagcgcggaggggatcttaaggattctgataaagcatctgggaatgttaaaggcacatcttcattaggaaatgagttcaaatctggagagaggcatggcggaacactcagttcgatgaatgctttgattgaaagttgtgtcagatactctgagacgaatgcctctttggctggttcggatgatgttggaatgaatcttcttgctagtgttgctgctgatgagatgtctaaatcgcctgttgcatctccctcagtatctcagcctccaaattccgtgatgaatgaaaattctactgtagggaacaatacaaagctaatggcttcggatggcttgcctcacgagcaacatcaagctgtttgtacctctgtcagtactgagcaaggtgagcaacatgttagcagtagtggcacacagttggagtcagaaataaaaaatgaatctaagaccggagatcgtgataagagctcgaattcagacactgaagatctgcaaaggttggtggatcagtgcttagagagcaatgacaattcagatggtgttgttgcttcgcctgctttacccactaaagccgttaaggaaaagattttgaatgatagtgactctggggaactgaaggatataaagactgatgttaaatcagaggctgattgcacatctgactcaacgaaaagagtagcaagctcaatgctaaccgaatgtagagatgtaagtaaaaaggtagattctgtggctgttgaacagactcccttggaaggtgttgatgatgataagaaagaagagaaacccccaacggcgttgagttctgagctagttaaaaaagtggaagaagatgtacccgtttcttctgggatttcaagggatatggatgctgtaagcattggtagacctataactgaaatggtcaataatgttgcgtttaatcatatggaccaaaaagatgtaaagaagattaagcaggattgtgatacttctgtgggagctataaaggatacctcagccggtttggactcatctgtaactaaaggtaaagttgagcctgtggaggggaatctggaaaatagtgaagtcaaggaacggtactcaggattaagagctactccaggattatcacctaaagaagctgaggatcttgagagaccgaatgggcctaaaaccagtgatgctgatggagatgaagcgggggaatgtacgtctgctgccagagatgcttcttctgtttcagctgcagcttcagctggctctgagatggatgccagagttgaatttgatctaaatgaaggttttgatggagacgatgcaaaacatggggactcaaataacttctctggatctgtatttttgacgcctactcctctacaaccagttaagaccttaccttttccggtggctcctgtatctagtggaactcgtgcatctattactgttgctgctgctgccaaaggtccgtttgttccacctgaagatctgttgagaaataaaggggctgttggttggagaggatctgctgccactagtgccttccgcccagctgagccaagaaaacctcaggatgtgttactgagcattaacaacacctctacatctgatgcatctacttctgctggcaaacagacaaggacgtttctggattttgacttgaatgtacctgacgagagagtccttgaagatttggcttcccaaagatctggaaatcccacaaattgtacatctgatatcaccaatagttttgaccaagtacgttctggggtcatgggttccgcccttgatcattcttctggaggccttgatcttgatctaaacaaagttgatgattcaactgatatgatcagctacacaatgaacagtagtcatcggctagattcatcttttcagcaggttaaattaccatcgactggtggtcgtagagattttgatttaaatgatggacctgtgggtgatgatgcagctgttgagccatctatggttctaaatcaacattcacgaagtggcttgccatcacaaccatctctctctggaattcgagtgaatggcgaaaacatggctagtttctcaacttggtttcctgctgctaacgcttattcagctgtgagcatgcctccaattatgcctgagagaggtgatcagccttttccaatgattgccactcgtggcccacagagaatgttgggtccaacaactggtgtttcctcatttacccctgaagggtacaggggtcctgttttgtcgtcgtctccagccatgccatttcagtccacaacgttccagtatcctgtctttccttttggaaacagcttccccgttacctcagcgaatttccctggtgcttctacagcacacatggattcttcttcaagcgggagagcttgcttccccggtgtcaactctcaaatattgggtcctggagttccagttccgtctaattacccaagaccttatatagttggcctcccaaacggtggtagcaatggcggtgttttggacaatggcgcgaaatggtttaggtcaggacttgacttaaattctggtcctggaggtcatgaaacagagggaagagacgaatcaacacttgtggcaaggcaattatcctcatctgcttccttacctttgaaggaggatcaagcaagaatgtatcaaatgtcaggtggtgttctgaagaggaaagaaccggaaggaggatgggatggatataggcagtcctcatggcaataa

SEQ ID NO: 1652 - DNA, 1083 bp, Arabidopsis thaliana
  Clone ID: AT_F21P8.C1.o10.tg
atggagcagagaaagcggaagaaggagagtgaggaaatgcttttgaataagaaagcaaagttagagtggagaccggaggattatgcgcaggcaattggattatctcataagtgtactggtaagggtgaaaagaagaaatgtcattacaagacatttcagtttcatgccaataaatatggactggaggactcagtgctattggttccagaggatggagaaaagccctatgttgcgatcataaaggatatttatacacaaagaaaagaaggtcacgtgaagcttgaagtgcagtggctttatcgtccagaagaggtggagaaaaaatatgttggaaactggaaatccaaaggctcaagagacctcttttacagtttccatcgcgacgaagtatttgctgaatctgtaaaagatgattgtatcgtgcattttgttcaagagaataagcaaatcccaaaccgtagaaagcatcctggcttcatcgtgcagcatgtttatgataatgttaagaagaagcttaggaagctcacttttaatggctttgacttgcagcaaaagcgtgaaatagatcattttgtggaaaagacaattttgcgaataggccatcttcgtgacattgtgaaggagcaaaagactttgatctcgaggagtaaaagaactgttcctcaaagctatattataaaagcggtggaaacaagtcgtgaaagcaataatgtggttaactccatcttggaaagttttgatttgttgaccggtgattcggatcgtgacaagagtttggaggagcttctggaagtagttaagcccaagtgtcgtacaagtagaaagaagcaagctggtgattatgattctttctggccaaatgatgttgtttcggtggtgagtgctcttgagcaggctttatatgattctttgaaagacgatatagcaaagtatagtaacaaggtggagattctggttggtaaactcaagcgtggtttcacttttgatgaattaaaggttgatttggaggaaccaatattgaaggatgatgcttcttcatccatctccaaaagtgttgggcggaaagattctttcgaagaataa

SEQ ID NO: 1653 - DNA, 1923 bp, Arabidopsis thaliana
  Clone ID: AT_MAC12.C1.o23.tg
atggtggtcaaaaggaagttaaattgtggtggctctaatggttttgatttccccaatattcccaaggctcctcgttcaagcaggaggaaggtctcaggtaagagatctgatgatgaaagtgagatctgtgcaattgatttgctagcttctcttgctggaaagttgttggaagaaagtgaaagttcctcaacgtctacctatgcatctgaagctgataatcttgatcatttgggtggactgattaagcaagaacttgaagatggctatactactaagccttgtaaatccgagtttttcgatccaggaaaccctgcttcaaagtctactagtgaaaatactagcgtgacttgtttgccattttcgtctttcgaaaatgattgcattttggagcaaacaccggtttctgattgtaagagggcatctggtttgaagtccctggtagggagcatcactgaggagacatgtgttgttaatgaggatgccggatctgaacaaggtgctaatactttcagcttaaaggatccaagtcaattacattcgcagtctccagaatcggtccttctggatggcgatgtgaaattagcaccatgcacggatcaagtccctaatgattcttttaaaggatataggaatcattctaagttagtttgcagagatgatgacgaaaactattgtaagtattataaatttagtgacaaatgtaagtcatataggcctctctcccgggttggcaatagaagaataatgcagtcggtgagagcaatctccaagttgaagtgttttgaagacactagaacagatggtcgtttgaaggctctctaccgcaagagaaaattatgttatggttacaacccatggaagcgtgagaccattcataggaagagaagattgtctgacaaaggtttggtcgtaaattatgatggtgggctcagtagtgaaagtgtttccaattcacctgaaaagggagaatcagaaaatggtgatttctctgctgcaaaaataggtcttctttcgaaagactcccgtgtaaagttcagcatcaagtcccttaggattccggagcttgtaattgaagttccagaaacagcaacagtaggcttactgaagaggacggtgaaggaggcggttactgctttactcggtggtggaatacgtattggggtgttagtccaagggaaaaaagttagagatgacaacaacactctatcacagactggtctttcgtgtagagaaaatcttggcaaccttggcttcaccttagagcctggtttggaaacactgcctgtacctctttgttctgaaactcctgtcctttctctgccaactgactctacaaagttgtcagaaaggtccgcagcttctccagcgttagagactggaattcctctccctccccaagatgaagattacttgattaatttgggaaatagtgtggagaacaatgatgaattagtcccacatctgagtgacataccagctgatgaacaaccttcatcagattcaagagcgctggttccagttttggccttggaatccgacgctcttgcacttgttccagttaacgagaaacctaagcgtacagagctttcacaacgcagaaccaggagaccattctctgttacagaggtagaagctctagtaagcgcagttgaagaagttgggactggaagatggcgtgatgtgaagttgcgttcttttgagaatgcaagtcatcgaacctatgtggacttgaaggacaaatggaaaacgttggttcacacagcaagtatatcaccacagcaacgaagaggagaaccagtgcctcaagaactgctagacagagtcttaggagcacataggtactggacacagcaccaaatgaaacagaacgggaaacatcaggtggctacaacaatggtggttgaagcaggttcgtccatgtaa

SEQ ID NO: 1654 - DNA, 1869 bp, Arabidopsis thaliana
  Clone ID: AT_F28P22.C1.o16.tg
atgggaactgtggttggaactgttgaggaccgcagagatatgtttgagggcaatgctcagacaaggatcacaccattttcttcaacaaatcagattggaaatcctgttgcctacaagcttgtccgggtttcaggagatgggagtctagtgcctgcaaccgatgaagaaattttggaagtcaatgacaccgatatgcatattccatcagatacttgtcagactataggctaccttgcaaccgatgaagaaaatgtggaggtcgatgagacggatatgcatattgcatcagatgcttgtcagactataggttaccttccagctgaagggataccttctcggttgtcccagattgaaagttcagaagctatcaattcaggtttattgcattctgataatgtgcaaccatatacagaccaggtaaagtctcgatctgagtataacgaggagatgttgcaaaaggttgaacaggaagagaggcttgagaatgtacatggatctcagatgccttccactcctgcagatgccaatatccagtgttctaatgaaaacaacttttttgaggaggatcaagtccaccatgaagctttactgcaggatgaatgcaagatgaatgaatctgatatgatggaacgatgctcaaacgcagttgctagtccaaaagaaactgcattgtctgctgctgctcaaaaacctgatttttctagagttagaggtgagatctgcttggataatttaccgattaaagcactgcaagaaacattcagggcaacttttggccgtgatacgactgttaaggacaagacgtggcttaaaaggaggattgcaatgggacttattaattcttgtgatgtaccaacaactaacttgagggtgaaagataacaagttaattggaaatcaagagaagtccaacgatgtgacgaatgccattagaaaggagatgggagatgacgtaagagctactaaaatgaaagatgctccatcgagtactgatcatgtgaatggacattcaaacggtggcaaccactattacgctagtgaggattattccagtgaacagagggctgcaaaacgagttaggaagcctacacgaagatacattgaagaactttcggaaacagatgataaacagcaaaatgacaagtcagtgattccttctaaagatcagaggttgtccgaaaaatctgaggtcaggtctatcagtgtctcctcagggaagagagttactgtcaccaggatggtatcccttgctggatctgaaattgaggttccttatgtttctcatgtccggagaagccgtccaagagagaacattatggctcttttgggatgtcattccagttacttggaagataaagctagtgcagcagagagtaacctcaatctgagtccatcccagttaagcagtgaggttgtgaaccgagattcggtggaaaagtatgacacagtttctcattgctttattggtttgcgaatgcagtttgctacaagtgacgagaacaatgtggagcatattctctctgaggttgatcaagagatggagccagagcacatagactcatctggaaatagctcggatgagaataacattggtgtgccaatcatgcaaggtggtgcgcttagaaggaagcatcatcgagcttggactctgtctgagatagcaaaactagttgagggtgtatcaaaatatggagccgggaagtggtctgaaatcaaaaagcatttgttttcatcacactcctatcgtacctctgtagatctcaaggacaaatggcgaaaccttttgaagacaagctttgctcagagtccctcaaacagcgtggtacctccctctctctctctctctctctctctctctctatccctttag

SEQ ID NO: 1655 - DNA, 2094 bp, Arabidopsis thaliana
  Clone ID: AT_F1L3.C1.o21.tg
atggaaggagatgtgttgtcaggatttggagacagacacaatatggatgggaaattgttgcagagtttccagaagagctttgtggatgttcaagacattttggaccaaaaccgattattgatcaacgagatcaatcagaaccatgaatcgaaacaaccagataacttgggtcgaaacgtggggttgatcaaagagctcaacaacaatatcagaagagtagctagcctttatggtgatctctctcattcttttgcaagatcagtggatgcttcatcagaaggtgaatctagtggaactttgaaatctgatgggaaagctaaccagaagagatttagatccggcgacgggagtctagttcctgcaactgatgaagagatgttggaggtcaagaatttgcttgagaaaaacgagcaagatatgcctgttttaccagatcctatacaaactgaggaatacattcccgatgaaggttcaccttctcagtttctgcagctagaaaattttgaaggaaagacttattgtatacacgcaaagacggatagaatttccttaggactgcacgacaagggtatttattgggttacttgcaatgtcggagccatcaattttactccacctttgaaacttttgcagtctaaagaggaattgatgaatggatctcagatgctttttgttcttccggataccaaatttcagatttctactgagctgtctgggaatgtggagctagtcccatccaaagttttgctgcaggaaccaattcttttttcatcaaatggatgcagtattaatcaatctacggatgtcttaaatgctacagctagtcctaaagaacctgcattgtcaactgctgcctcaaaacctgatttttctagagtaccaggcgagataagcttggctaatctttcaattaaagaattacaagaaactttcagagccacgtttggtcgtgaaactacttctaaggacaaacgatggctcaaaagaagaatcaaaatgggactgattaattcatgtgtagttccaacaactaccctgacaattaatgatagcaaactgattggtggagatcaagatgcaattgatgcttttagcaagggtacagtagatgaagaaacagctactgaaagcatagatacaccagctagtcctgacggcataaaggggcattcaaatgattttgggcatagtcctgttgaaacttttgtggaccattattctggaaacgaagattttgaaggtgaagatgggtctgcaaaaagagtgaggaagcctacaaggagatatattgaagaaaccaatgaaaaacaacaaattgacgggtcaatgatcccttcaaaagatccaagctctattcaagccgtttcttcagaagggagagttgttgtcaccaggatggtatcccttgctggttccagaattcaggttccctatgtttctcatgtaaggagaagtcgtccaagagaaaacataatggctcttggggaatttcgttctaagtcatgggaggtgaaagctgctccagaggagggtaacctgaatctaagcccacctcagttgagcaatgatgtgaaccgagttccaggtgtcaaatctgcatctagatgtgtccagaaagaaagtgacaaagaccatttaaaaccaattttcactgatgtggatcaagagatgatggagccagagctcttagactcatctggagatagctcagatgataatttcgttgatgcaccaatcacgcaaagtgcaagtggaaggaagcttcatcgagcttggactatctctgaagttgaaaaactagtcgaaggtgtgtccaaatatggagtagggaaatggactgagatcaaaaagctttcattttcaccatacacgcatcgtaccactgtggatctcaaggacaaatggcgaaatctacaaaaagcaagttcttcaaacagaatggaaggaggtctgaagaaacacgggtcgatggccattcctactcacattatgttgcaggtaagagagcttgctcaaaaacaatcaccgatttcacgtgtagtgagcaaggctagagtggtgaagagatcgagatcaagaaacggtttcttgtag

SEQ ID NO: 1656 - DNA, 1860 bp, Arabidopsis thaliana
  Clone ID: AT_T2E22.C1.o112.tg
atggtgttcaagagaaagttagattgcctttccgtgggatttgattttcccaacattcccagagctcctcgttcatgcaggaggaaggttctaaacaagaggattgatcatgatgatgataacactcagatctgtgcaattgacttactagctttggctggaaagattctacaggaaagcgagagttcctctgcgtcttctaatgcatttgaagaaattaagcaagagaaagtagaaaattgcaagactattaaatctgagtcttctgaccaaggaaactctgtgtcaaagcctacttatgatatctctactgagaagtgtgtggtgaacagttgtttttcatttccggatagtgacggcgttttggagcggactccgatgtctgattacaagaagattcatggtttgatggatgtagggtgtgaaaacaagaatgtaaataatgggttcgagcaaggagaagcaaccgatcgcgtgggtgatggaggcttagtcactgatacttgcaacttagaggatgcaactgcgttaggtctgcagtttccgaaatcagtctgtgtgggtggtgatttaaaatcaccatccaccttggatatgacccctaatggttcctatgctagacatgggaaccatactaacctaggtagaaaagatgatgatgaaaaattctatagttaccataaacttagcaataaatttaagtcgtataggtctccaacaattcgaagaataagaaagtccatgtcgtccaaatactggaaacaagttccaaaagattttggatacagtagagctgatgtgggtgtgaagactctttatcgcaaaagaaaatcatgttatggttacaacgcatggcagcgtgagatcatttataagagaagaagatcacctgacagaagctcggtcgtaacttctgatggaggactcagtagtggaagtgtttccaagttacccaagaagggagatacagtaaagctaagcattaagtcctttaggattccagagctttttattgaagttccagaaactgcaacagtaggatcactaaagaggactgtgatggaggctgtcagtgttttactcagcggaggaatacgtgttggggtgttaatgcatgggaagaaggttagagatgaaaggaaaactctgtcccagactgggatctcatgtgatgaaaatctagacaaccttgggttcaccttggagcctagtcccagcaaagttcccctacctttgtgttctgaagatcctgctgtgccaaccgaccctacaagtttgtctgaacggtctgcggcgtctcctatgctagattctggaattccacatgcagatgacgtgattgattcaagaaatattgtggacagtaacctcgaattagttccatatcagggtgacatatctgttgatgaaccttcatcagattcaaaagagcttgtcccacttccagagttggaagtcaaggcgcttgccatagttccgttgaaccagaaacctaagcgtactgagctagcccagaggagaactaggagacccttctctgtgacagaggtagaagctcttgtacaagcagttgaggaactcgggactggaagatggcgtgatgtaaaattgcgtgctttcgaggatgcagatcatcggacttacgtggacttgaaggacaaatggaagacgctagttcacacagcaagtatatccccacagcaacgaagaggagagccggtgccacaagaactgctagacagagtcttgagggcatacgggtattggtcgcagcaccaaggaaaacatcaggcgagaggagcgtccaaagatccagacatgaacagaggtggagcttttgaatcaggtgtttcagtgtaa

SEQ ID NO: 1657 - DNA, 1203 bp, Arabidopsis thaliana
  Clone ID: AT_F5K20.C1.o90.tg
atggtggactgtggtgtcgatatttaccaacttcctgttgttcctagggcatgtagatcacccagaggacgcaggctaaaaattatgagaaaacaaagatcggagttcgaggttttagcccaagtggctggaagattctcaggtgagcgtaaaaaccgaattgttatcggctcgttggctcacgaaacaaaggagacgaaggacgataatgtcgtcgtcaataacttcttggagacaatggaagttgaggttaagccgcaacctggtctggagaacctttctcaggtgttattgtctaaggactggttagctcttggcccttccatgcctaactcgccaatcacacaagaagaaaactttgattcacgttccaagatcgatagtaaaagaaaggtgagtcacttaaaagagcgaggttcgtgtattagccaagaatcgcagaatatgtatcctttgaagaaacgaaagctgttttaccaaaatcattcatctgaatcacatgatactccatgtaccgtgaaattcggtattaagtcgttgaatatctcggagctattggtagacgttcccgaatcagccacggttggctcactgaaactagcggtattggaggcggtaacgcagattctcaagggtggattaaacattggagtgctctttcaaggtaaaaccatcgttgatgactccaaaacgcttcttcagattgggatcccatacgatgatgacgatgacgaaaacctcggttctttgggattcatgctagaaccgcaaaaatcagaaacaacaacaataacaacgtttaccactgtttccccgagaacacgacttagacaaaatcaggtcctagggtccgtggatagcactgaggcagtagcagctaaatccgtggttccagtacgtatgaaaccggcctggcagccagagatggttcaacggagaataagacggccattcactgtctcagaagtagaagctttggttcaggccgtagagaggctcggcaccggaaggtggcgcgacgtgaagtctcatgcatttaaccatgtaaatcatcgtacctacgttgacctcaaggataaatggaaaacgttggttcacacggcaaagatatcagcaaggcaaaggagaggcgaacctgtgcctcaagaccttcttgatagggttttagctgctcatgctttctggtctgaccggaccggatga

SEQ ID NO: 1658 - DNA, 1869 bp, Arabidopsis thaliana
  Clone ID: AT_F22G5.C1.o6.tg
atggtgttgcaaaagaggcccgattatggattcaatggctatgaggtgcctcacacacctcgagctgccagatcaccaagaaagagtgctttcaagaagaaaagcgaaaaccatcaaatatcgtctttcgatttgttggctgcagtagctggaaaactgctgcttgaaggtgggaattcttcttcctcaagtaacaatacctctggtaataatgaagatcagtgtgcagttaagaaagagccgcttaacggcggcgatataatggtggaagaagagactacaaattctgatcatgataataataatgctgaacggagtttctttgtctctgagattcttcaaaaatctcatgaaatgcaaagctttaatagatctccaagtccccttaaagagttccattttggatcttcttctggtataacttctgattcctctgagaagtttgaaactcaagaattggcgtatgatgaatccaagatcaataatggtgattgctataggtcagagtctaatgataagaaatcaatgcttggagggttaaattttgaagcaaagttatcaaggaatgttgtaggtaaggatgagaaacatataggtagtggattcaggaaacctattccccaaaatccttcaacatgctccgatgatgtagatttacacggtaaggaaaatgatgatggcgaaaacttctcagcctgttacagaacaaaatcatttaggtcaactctgcgtattggagatagaagaataaggaaagtttgggcttccaagtattgtaaagtccctccaaagctgaaagatacaacagtaactaattcagacttggacttgaagtctgattactatagcaagaaacattgtcttaaaagcttaagatcagagaggaactatccaataaagaaaaggagatactttgatggttatacagcatcacaatccgaggaaacaaataaaaatgaaggccagtctggttcacctcgaaaggcttttctatcatccatagcttgtcagaagcagcctgcagcattccaatcaccaagagattctaataacgtgaaacttggaatcaagtcatttagagtccctgaacttttcattgaaattccagagacagctactgtcggttcgctaaagaggacagtgttggaagctgtgacctcgatacttggaggtggattacgcataggtgttctggttcatgggaaaaaggttagagacgacagtaaaatgcttctacagactggactctctctagacactctttcagacactttagggttttgtcttgagccaaatcctccacaatccacaaaaccactatctcctgaagattctgactttgcacgtccctgtaatgtacctcacactctaacaaggtcagtctctatccagagtaactctgtagaaagtgaccttgactccaaaccctctgcaccaaataggggtaaaaccatctactcgagagccttgattcctgtatctcctctgcatgctcaggcgttgacagtagtcccacctcggaaaaccaagcgatctgaagtggcacagcgtaggatccgtcgacctttttctgttgctgaagtagaggcccttgttcaagctgtggagagacttgggaccggaaggtggcgtgacgtaaaattgcgagcttttgataatgctaagcaccgtacttacgttgatttgaaggacaaatggaagacgctggtgcacacagcaagaatatcaccgcaacaaaggagaggtgagccagttccacaggagctcttagaccgggtactaacggctcatgcctactggtcccagcaacaggggaaacaccagttactagagggaccccagcagctcgagaccagtcttggtctatag

SEQ ID NO: 1659 - DNA, 1737 bp, Arabidopsis thaliana
  Clone ID: AT_f2o15.C1.o90.tg
atggtgtcgcataagtgtgtagaagaatttggatacgcaagctacctggtaccttccaatgcaagagcacccagatccgcccggaagaggcgcagtatcgagaagaggataagtaaagaagatgataatatgtgtgcaattgatctattggccaccgtagctggacacttgtcatttgagagtgggagttctctcatgtctattgacaaactgattgaagatcatcgtgtaaaggaggaattcccggaggaagaaaaacctctaatgccagtagctttatccccttatcggggatctttgagtccctgcggattcagttctgtgataaatggcaaagtagagaatgaggtagatggttttagttactctggtggtagtgatgcttgtcaagtcgggaacttcagtcaagatgtaaaaccggatatcgatggtgatgcagtagttctggatgcgagacctaatgttgtagttagtttaggtagtagtagtagaaccgaagtgccatcaattgggaactgtgtttcccatggcgttcgggatgatgtaaatttgtttagtagagatgatgatgaaaacttttccaagtacattcacccgcgtgttacaaaacattcacctaggactgtacctcgtattggggacagaagaatcaggaagatattggcttctagacattggaaaggaggttcaaggcattcagatacgaaaccgtggagaaattattacttgcaccagcagaggagctatcctatcaagaaaaggaaaaactttgaccacatatctgattccgttactgatgattaccgtatgcgtactaagatgcatagaggtagtagaaaaggtcaaggggcatcctttgtggcaagcgactcccatgtgaaactacggatcaagtcgttcagggtgcctgagcttttcatagagattccagaaactgctactgttggctcattgaagagaatggtgatggaagcagtgagcactttactgagtgatggacaccgagttggtctgatggttcaggggaagaaagtccgtgacgataacaaaacccttcatcagactggtatctctcaggataactcccacctggactctcttgattttagccttgaacccagctcagaaatgcctcaactgttaactagtcacccgttgggacatgcttgtgaggagctgctacctgtgtgccaagctactaaaatagacaatgtgttggaatctgaccatcatgactcagcattattcccatctgactcattaggcaacaataatgtgacagaagattctaaagctatgatttctgtggcgctcaacgaattgtcttctcaatcacaaccaccttcccggaaatctagaagaagtgaacagcagcagcagcaggctgcacaacgcagaattcgtcgacctttctcagttgctgaagtagaagcacttgttcaagcagttgagaaactcggtactggaaggtggagagatgttaagctttgtgctttcgaggatgctgaccaccgcacttacgtagatctcaaggataaatggaaaacgctggtccacacggctaagatatctccacaacagaggagaggagagccagtgccgcaggaacttctaaaccgagtcttgaacgcccatggctactggacgcagcaacagatgcagcagctgcagcagaatgtgaacaagctggagcaggagacacagtctcaaacgacagagggtctgttacttctctaa

SEQ ID NO: 1660 - DNA, 1662 bp, Arabidopsis thaliana
  Clone ID: AT_F12A12.C1.o110.tg
atggtgtcacataaagtcttagaatttggagatgatggttacaaattacctgctcaagctcgagctccgagatcactccggaagaagcgcatttacgaaaagaagataccaggagatgataagatgtgcgcgattgacttattggccaccgtagctggaagcttgcttctcgagagcaaaagtccggtaaacgcgtgtctagttgtacaaaatactgtaaagaatgaatacccggctgatgaaaaccccgtaaaggcggttccttattcggaatccccgagcctatttgacaatggcaagtgtggatttagctctgtgataacaaatcctaatcacttgttggtaggtgacaaagtaggaaaggaggtggagggttttagtagtttgggtgtgagtggtgatgtaaagcctgatgttgtagctagtataggtagtaacagtagtaccgaggtgggagcatgtgggaacggtagtcccaacgagtctcgggatgatgtaaatttgtttagtagaaatgatgatgatgaaaacttttcgggttacattcgaactcgtatgactaggcctgtgcctcgtattggagacagaagaattaggaagatattggcatctagacattggaaaggaggttcgaagaacaacacagatgcaaagccatggtattgctcaaagaggagttattacttgcaccatcatcagaggagttatcccatcaagaaaaggaaatactttgacagtgtttacgactcgaactctgatgattaccgtttgcaaggaaagactcataaaggaagcagaacaatatcttccatgaaaagtcgaaatgcgtcctttgtgtcaagggatcatcatgtgaagctgcggatcaagtcttttagggtgcctgagcttttcgtagagattccagaaactgctactgttggctccttgaagcggatggtgatggaagcagtgaccaccatactgggtgatggacttcgagtcgggctgatggttcaaggaaagaaagtccgagatgatggcaaaactcttcttcagactgggatctctgaggagaacaaccacttggattctcttggtttcagccttgaacctagcttagagaccacccctcaaccactgttatccagttatctgtcagatcatgcctgtgatgatgtgacgttatgccacgacaatgcgttggattctagtcatgagccagaaccatccccagctgactcatttgggaaactaggcacaagtgatcattctagagctttgattcctgttgcctcagcagcaatgctggctcctcggcctcctaaccgtaagtttaaaaggactgagcagcagctagctgcacaacgcagaattcgtcgacctttctcagttactgaagtagaagcactggtccaagccgttgagaaactcggaaccggaaggtggagagatgtgaaggttcgtgctttcgaggacgcagaccatcgtacctatgttgatctcaaggataagtggaagacgctggtccacacggcaaggatatctccacaacagcggagaggagagccggtgccacaggaacttctggaccgtgttttgaaggcacacgcttactggtcacaacacctaatgcatcaactgcagactgagccaccatccactcaggtagaggctctctaa

SEQ ID NO: 1661 - DNA, 4731 bp, Arabidopsis thaliana
  Clone ID: AT_K7J8.C1.o10.tg
atggctcttaggaaaaatactccaaaaggcgattcagtttcactacctatgaagcctttgaatttctccagaaaattgccaggaaatgtgcagattccagaccctgatattgttcaaagtgttgcgcctaacattgatctagacctccgggaagtttactttttgatgctccacttactttcatctgggccgtgccagaaaacttatgcactgttgcggcatgaacttcttgaacatgagcttcttcctagaagatatcatgcttggtactcgaggagtggattgcctagtggggatgagaatgatgatggcaattcctttcctttgaactatactgagttggctaagaggtattctcatgtaaaaaaagatcacctggtggagcttctaaagcaattggtctttgtttcaaataggcctaatccctcacgagggatcggtgatggaaataaaatgattggagctggggttccaacacttttaggcactggctcgttctcccttttgagctctgacaaggaaatagttggaagtgatctcaaaccaccacctattggcatgcgttggcctcatatgcatgctgatcaggttcgtggtattagtttgagggaaattggtggtggttttgccagacatcatcgtgccccatcaattcgagcagcatgttacgtcattgcaaaaccatcgtcaatggtacaaaagatgcagaacatcaagaggctacgtggacacagaaatgctgtgtactgtgctatattagatcgctcaggaaggtatgtaatcactggttcagatgaccgccttgtaaaagtatggtcgatggatactgcatactgcctggccagctgtcgagggcatgaaggtgacataactgatcttgctgtgagttcgaacaacattttcatagcatccgcatcaaatgattgtgtgatccgcgtttggcgattgccagatggcttaccagtttctgttctccgtggacatactggagctgttactgctattgcctttagtcccagacctggatcgtctgatgatggtacatgtaggatatgggatgcccggggagcccaatttgctccccggatatatgtccctaggcctcctagtcctgatggtgattgctttacgttcatagttaaattattttgcgttgacttattggaagctgtttggagtgctaataagaccaatactgatgatccagagcagccaaatcatgagatggatgttctggctggacatgagaatgatgttaattatgttcagttcagtggttgtgctgcggggtctaaattttctgtaactgactactcaaaagacgagaatgttccaaaatttaagaattcctgggaaaaagctgccgatggacacgagcatatcatctcaaggttccacctccgcccatgccccctcaacctcctagaggggggccacgtcaaaggatcctacctacaccccacatatgttatggacgtccatccattcaatcctcgtatagctatgagtgctggctatgatggaaaaacaatagtgtgggatatatgggaaggcatacctatacaaatatacgacatttcacactacaagttggttgatgggaagttttcaccggatggaacttcaattatactttcagatgatgtgggccaattgtacatattaagtactggccaaggggattctcaaaaagacgctaaatatgatcagttcttcctgggggattatcgtccattaattcaggacacatatggtaatgtccttgaccaggaatctcagcttcaaccttatcgccgaaatatggaggatcctctttgtgattcagggatgattccatatgaagagccatatcagaccacgtttcagaaacggcgactcggcgccttaggcaaagaatggcgaccatcttctttgaagcttgctgtcgggccagatatcactttagatcgagattaccaaatgccacctctggcagatctagacttagccgaaccgttgccagagtttatagatgtaatggagtgggaaccagaagttgatatcttaagtgatgaaaacgactctgaatacaatgtgccagaggagtattcgtctggaaaagagcaagaatgtttaaattcttcaacctctggtgagtcaggttccagttctggtgaaagctatgaggatgatgatcatcagaatagccttagaagatccaaaaggaaaaaacataagaaagaagctgggatcatgacttcttcgggtaggcgtgtcaaaaagaggaactttgatgagcttgagggagctccaagcaacaaaaaacgtaccagaaaatctaggagtggtcgtaaagaatcgaagaggaaatcttcaaaatctaaatcgtctagacctaggcgagcagctgcacgaaatgctctctcttggttttctaagattacaggtacatctaaagatgcagaagaggaggaagtctctgaattgagtgattcatcagaaagtgaatcgacaacacaagactcaggtactggggatagtgaacttgaagtagctttgttaaatgggcatgggaagcaatcgaaggggaaaactatcctcgtatgtgattctgatgatggggctcaacaatgtgatatcagagaaactcatactgctgaaaggaggagattggttcttagatttcctgttaggaattcagataagcttaccttactggagaacctacctggatcatcttgtgatgttccaagtccaactttagggaacggctgtactgaagactcgaggattcctgggaaccaatttgaagggctagatgtaagtaaagtcaaatggggaatggttaaggctcgtacaacaaagcgaataagaggtgaagcaatatcatcgcatgaacttatgggctctgacccggagggaaaggaaaataatgttaaggaagactcaaatcaccgtggaaatggtgttacagcacctagttgtttggaattgaaaacagatatagatgacatggcagttgacactgacacggtgatctctaatggtttgccaaatggtgggaagcgatatccagaactggatgggtcaccaagtcgagtggctgatgacaaggcctctaatagttctcaaaatgtaacccaccggcacgatctaatagatagccttccaccaatctcaacgacattgaagatacgctccaagagagtttcaagggctccggatacatctttgaggcaagaaggaaaatccttatcaatagatcaagagactggtggctctgatgcattaaatgatggttttgaagatgctaaatgtgatttgacattggactgtcaaaaggatggtgtggttgggacagagatatctctgcgaaatgattgtgttctggaattaaatcctcagatctgtgatgcgctctcaattgctaatgatgttcctgtgtcacactcacatcctaaacggatgtttgattttgtctatagacgaaagtcacggaagcataagaacaacttagacagggatgctgctcttactaaagaagtcagtccaggttcttgtagtcaggatcatggtagtggctctaagtcccatgaaggtgcctctaatgggttccatgggactgagttgaatggattagagaagtcggaaggcagtttgacccacatccaagataaaataagtgattcacgtggaaaccaaaactctcaggaagaattgagatccgcttctggagcaacacttcggttgagatccacaagaaatagaaagtctacttatccctttagtgaaactaaacctattgaaacaaagaagcctcagcagttaatagaaaatgtatcctggttgacattatcgatacatgaagagggttctcgttatattccacaaatgggggatgaagttgcgtatttgcgacaggggcatcaagaatacttaaactttagctccctgagggaagtggctccttggacatcaataaaaggaggaaatataaaggctgtagaaatttgtaaagtggaaagtcttgaatatgcaactctgcctggttctggggatagctgctgcaaaatgatacttaaggtcatcgatccaaactccgaagtgttcaacaaagctttcaaacttacgttgcctgaagtggtgacgtttccagattttcttgtggaaagaagtcggtatgaagcagcaatacagaggaactggacttgcagggacaagtgtaaagtttggtggagagacgaaggcgaagaagatggtagttggtgggaaggacggattctagctgtgaaacccaaatcacctgattttcctgatagtccgtgggagaggtacacagttaagtacaagagtgaccctgccgagacacatcttcacagtccctgggagctttttgatgcagataccaagtgggagcagcctcacattgatgatgagcaacgaaaccgtttgctctcggccttaacaaagttagagacttcagacaagagaacccaggattcttttggcctccgaaaactgaaccagaccgtgggaaattccagctactccaacaggttcccagttcctttgtctcttgaagtaatcagatcaaggcttgagaacaactattaccgaagtgtggaagcattacgacacgacgtatcagttatgttgtccaatgcagagactttctttggtcgaaataaaagtgtagcagccaaaatctcaaatctctctaactggttcgaccggacgctaccttcttcgtag

SEQ ID NO: 1662 - DNA, 1059 bp, Arabidopsis thaliana
  Clone ID: AT_T15J14.C1.o7.tg
atgacttctttgagtaggcgttgcgaaaagagaaactttgatgagcttgagggagctccaagcagtaaaaacacatatattgatggcatggcagttgacactttctcggtggtttttaatgggtttacaaatggtgaaagacaatatctagaactaaatgacggtgagtctaacggttctcaggatgtaactagtcgcctgaatgatgtagcagatagctccatgtgggtttcaagggctcctggtggcactgatgaattaaatgatggttttgaagacatcaaatatgatttgacattagactgtcaaaaggattgtgtggttggagcagagatatctctgagatatgattgtgttgggatatcaaatcctcacatcagtgattctctctcaagtggtagtgtgttcctatgtcatggaagcataagaagaaaccaaacagggttgctactgactcaagaactcagttcttgtagtcaggatcagagtagtggcgctaagtcccatgacgttggtccttttgaaatattgaagcctcaacagttaaaagaaaagttatcttggttgacattatcgatacatgaagaggattgtcgttatattctacaaaaggaggatgaagttgcgaatttgcgacaacaaactttcaagcttacattacctgatttagtgacctttccagattttcttgtgaaaagaagccggtatgaaggagcgatacagaggaaatggacttgcagggacaagtgtaaggtttggtggagaaacaaaggcgaagaagatggtcgttggtgggaaggaggaattctagctgtgaaacccaaatcaactcattttcttgatagtccatgggagaggttcccagttcctttgtctcttgaggtaataagatcaaggattgagaacaactattaccggagtatggaagcgttaaggcacgatgtatcagttatgctatccaatgcagagactttctttgatctaaacaaatgtgtaggtgtagcagtcaaaatttcagatctttctcaatggttcgaccgcacgttgtcttctttgtag

SEQ ID NO: 1663 - DNA, 4170 bp, Arabidopsis thaliana
  Clone ID: AT_T30B22.C1.o29.tg
atggactggatacacaaatctactccttttatggaaccttcgaatttggcaaaactggttcaaggaaatgttcctcttcagccacatgacagccattcttcgctaactgatctagatatggaccttagagaagtctatttcctgattttacattttctttctattggcccctgcgaacgaacctttggccacttgagagacgaaattttggaaaaagggcttttaccccgtagatatcattcctggtggtcaagaagtggcatttatagcgggcgtgctgatgatgatggcatctccctccccttgagttatgataatttgatagagaggtatcctcatatcgaaaaggatcacttggtgaagcttctcaaacaactaattttaaacccgtctttcccttcacacatgagagttgaaggaaatgctcctaatgctgctgatgttccaacactattgggatctggcaccttttcacttgtggatcgtagtaacaatatagagtctcagaaagctaggcatgttgcgtcatacttacgctggccgcatatgcatgccgatcaagtgcgtggcctaagtctcagagaaattggaggaggtttcaggaaacaccaccgtgctccgtccattctttcagcatgtcatgctattgcaaaaccatcaacaatggttcaaaagatgcaaaatataaagaagctcagaggacatcgtaatgctgtctactgcgctatatttgatcgttctggaagatatgttatcactggctccgatgaccggcttgtcaaaatttggtcaatggaaactgcgctttgcttggctagctgccgtgggcatgaaggtgacattacagacttggccgttagttcaaacaatgctttggttgcttcagcttcaaacgattttgtgattcgagtgtggcggttgcctgatggaatgccaatttctgtattgcggggacacactggagctgttaccgcaattgcattcagtcccagacaggcgtcatcagatgatggaacctgtcgtatctgggatgctaggtattctcagtggctcccacgaatctatgttccaagtccttcagatgctaacactggctcattggaagtttctctcttaggcgaaagcacttttacatcttccaacacaggatccacgagcaatgcatctcagagtcatcaaatattatgttgtgcatacaatgctaatggaaccattttcgtcacgggtagctctgacagcaatgcaagggtctattgcaggatttgtgtttggaatgctgctgatggtagcttagtgcattgtttaactggtcacagtgaatcgtcttatgtcttggatgtccatcctttcaatcctcggattgctatgagcgctggctatgatgggaaaacaatcatctgggatatatgggagggtataccaatcaaagtgtacgaaatcgggagatttaagttggttgatggaaagttttcacaagatgggacatctattgtgctttcagatgatgttggccagatatattttctaaacacaggacaaggagagtctcaaaagaatgcaaaatacgaccagttcttccttggtgattatcgtcctcttattcgagataccaatggacatgttcttgatcaggagacgcagctacttcctcatcggaggaaccttcaggatcttctttgtgattcaagtatgattccgtatccagaacctgaccagacaatgtttcagcaacgcagacttggtgcattaggagttgaatggcgtccttcctcgataaagttttctgttggccctgattttagtttaggtcaagattatataatgcctcctttggctgatctggatagactgattgagccattgcctgagtttatagatgctatgtactgggaaccagaacacgaagttctgagtgacgacaatgattcagagtataatgctgaagtttcctctgatggggctagggcaagcccatgttccaactcttcaaatgaacttgagtgcagctccgaggacagtgacgttgaaaatattcacgaaagtagctatcattggaaaagaagaagaaaacatcctaaggtcaacgtctctacttcatctggaagacgtgataagaggattttggatgagaatgatagctcgaattctggaattaagagaaccaagaaccgaagaattgtcgtgaaggcttcaaaaagaaaacattctgatgtcaaagcatcacggccgcagagagcagcagctcaaaatgctcgatccttgctttctaaaatttctggaagctcttcggatgaagttgatgatgataatgattcatccaacagtgaatctgatagaagcatacccactttgcgacagttggacaaaccatctcagatgctggaatctctttcaaatgacaaacagaagaaaagattgattgtaaagatctctgttaagaagccagcagagtctatgggaagcaagggagatgtgataaatcaggctgatttagagcaactatcttccaaacctttggaggagaatcacagagtgattggtatatattccagagaacccgggtcaagttctgtagatgcaaaaggtgattcagggtgtcagagtattccctactctatgaatacgccacagagagaaaaggccgataatcagttgataagatcttcagatcaagaccagaatatgtgcaagtggagggaagagattcctgtttgtgaacctaccgaattaactgcgcctgagaacatagaagaagcccaaccattttatggggatgaagctgatgagattcttccaaagaaagttcgacgactgaggttaaagcttcggcatcccaacagtcctcgaaaactagaacctgatgaggtggcagatgatttggcagatggtggagatgggtttgcatccatagctccctctttcatgaatccgattatggattctgaacctgtgatagatagcgttagagattcttctgcacataactttgagtttggagaagctacagctgatgtgatacgtaggaaaagatccataagaagtgaatctagtacaagaaatagcgcattacgcataaggttgggctctggatctgtagacaaaataaagaaacaagggattccttccacaagcgtgtatgatgatgcatcacttgaagaatggccttctacctcaaaagctgggtccaggtctagatctgcaagcgtcagcaaaccaagtcttcatactgggataaggttgaatagtgtctcaggaaaaatctcatggttattgttgtctgaacacgaggaaggctgccgttatatacctcagctaggggatgaagttatttacttcaagcagggtcatcaagagttccttaaaactaaagaattaaatgacagggaccgatcaaggtaccttccccgaaacctaggagcagtagagatttgcaaagtcgagaaacttaactatgatacatatcctggttctggagatagctgctgcaaaatgaccctcagggttctggattcttcttcatcacatgcctcccgcaaagagtttcaactgacacttcctgagctcattaatttccctgattttattgtggagaagactcgatacgacgctgcaattcaaacaaactggaaaattggtaatgagtgccgtgtgtggtggagagacgcaaccggtgaaggcggggcttggtgggaaggtaggattgagtcttcacaagtaaaatccactgacttcccagagagtccatgggaaagatacagagttgtctatgaaacaggggaaacgagtcttcacagcccgtgggagtttgacaatcccgagtttccctgggaaaaatctaccatcgaagatgagagaagagagaaactgctttcattatttgctggactagtaaaatcaatcagcaagcatcaggatagttacgggatccaaaagctaaacgaagcagctcaaaagatggatttctgcaataggttcccggttccattataccctgagctgattcacgaaagactagagaatcagtactacagaagtattgaatcgtttaaacacgacgtggatgcaatgctctcaaatgcggagttgtatttcgttagaagtgcacatatgctttcgaagataaagcgactgcgagataaattgacaaaaacgttaagaaagctgatctga

SEQ ID NO: 1664 - DNA, 1386 bp, Arabidopsis thaliana
  Clone ID: AT_T18K17.C1.o19.tg
atggcgtctggtcctatagctggtggtggagtttcgaagacgaagcataaatggagtgatagtggcaacaaaagccaaaaacgatccaagcccacggtggcgaattcgaattcgcttgggttggaagataatcatcagatgatgaagataagtttaagctcaatttccaagcttgaagttaggaacttgaagcggaaactacaagctgagcttgaggaagttaggagcttgatcaaacggctcgaaccacaaggtaacaacttcgctcccgtgccgaacaagaagctgaaaacagcaaacggtggtaagaaaggtggagtacatggagctgctgctgataaaggtactgttcagattttgaagagctgcaacaatttgcttaccaagttaatgaagcataagtctggatggattttcaatactccagttgatgtagttacgcttggtttacatgattatcacaatattattaaggagcctatggatttaggaacagtgaagactaggttgagtaagagtttgtataagtcacctttggagtttgctgaggatgtcagacttacttttaacaatgcaatgctgtataatcctgtggggcatgatgtgtatcatatggctgagattttgttgaatctgtttgaagagaaatgggtgcctcttgaaacgcagtatgagttacttattaggaagcaacaaccagtccgtgatatcgatttccatgctcctgtttcgacaaacactcataatgtagaggcgttaccgttacccgctcctacaccttccctgtctcctcctcctcctcctaaagtagttgaaaataggactttggagagagctgaatctatgacaaacccagtgaaacctgcagttttacctgttgtccccgagaagcttgtagaagaggcgtctgcaaacagggacttgacgtttgatgagaagcggcaactaagtgaagacctccaggatttaccttatgacaagctagaggcagttgtgcagattataaagaagagaactccagaactctctcaacaagatgatgagattgagttagatattgatagtcttgatctggaaacactttgggagcttttcagattcgtgactgaatataaggagagcttaagcaagaaaaaggaggaacagggattagactcagaaagagatgctgaatcttttcacaatagtgtgcacgaatcgaacacgctagtaactggccttgaatcgtcaaaagttactgaattaggtcatgtggcatctactgttcgacaagaagtaaatgttggaggatcaagtagttctaacagttctagtagtggctcaggctcgggttctagtggctctgacagtgatagctcaggacatgaatctgataccggtaattaa

SEQ ID NO: 1665 - DNA, 5760 bp, Arabidopsis thaliana
  Clone ID: AT_F6N18.C1.o20.tg
atggctgaatccaatggcaagggttcccacaacgagacttcctcagatgacgatgatgaatatgaggacaacagcaggggttttaaccttggattcatctttggaaatgttgataactctggggacttggacgctgattaccttgatgaggacgccaaagaacatctttctgcattggcagataagctgggttcatctctaccagatataaatttattggcaaaatcagaacgtacagcaagtgatccagctgagcaagattatgatagaaaagctgaggatgctgttgattatgaggatattgatgaagagtacgatgggcccgaagttcaagtagtcagtgaggaagatcatctactgccaaaaaaggagtatttttcgactgcagttgctttgggtagtttaaagtccagagcttctgtgtttgatgatgaagattatgacgaggaagaagaacaagaggaggagcaagcgccagttgaaaaatctcttgaaactgaaaagagggaaccagttgtcttaaaggaagacaaggccttggagtatgaagaggaggctagcatcttggataaagaggatcatatggacaccgaagatgtccaggaggaggaggtggatgagttattggaaggtacattggatgacaaaggcgccaccccactgcctacgttgtatgtggaagatggtatggttatcttacagttctccgagatatttgctatccatgagcctccacagaaacgggataggagagaaaatagatatgtcacttgtagagacaaatacaaatctatggatatatctgagcttgttgaagacgatgaggaggtactcctgaagagccatggtaggattgatactcatgtagaacaagctgatctgattcagctggatgttccctttccaattagagagggtttacagctggtaaaagctagcacaataggtggtatcacaccagaatcaagagaatttacgaagctaggaagagattcatgtattatgggtgaactgttgaagcaagacttcatagatgataattcatctctgtgccaatctcaattatcgatgcaagtttttcctcttgaccagcatgaatgggaacgtcggattatttgggaacattctcctgaaattagtggtaattctggtgagatcttcgaacctggacttgagccggaaggtatgctggttaaaggaacaaattcagagactgaacaagaaagcttgaatgtggtgaactctagagtgcaagttcaagcggacaataatatgtttgtgcctttttctgccaatctgttggagtcttttggctcaagaggttcccagtcaacaaacgagtccactaacaaaagtagacatcatccacaactgctaagattagaatcccagtgggatgagaatcatcttagtggaaatgatgaagctggagtaaagaagattaagcgacttgaaaaagacgcccttgggcgctttagcagacttgtattgcgagagagggatttgggggatgaggcatggttagatagtataatatgggactcagagaaagagttgagcagatctaaactaatttttgatcttcaagatgagcaaatggtctttgaaattttcgataacgaggaaagcaaaaatcttcaacttcatgctggagctatgattgtatcccggtcttcaaaatccaaggatgaaacctttcaagaaggctgtgaatcaaattctgggtggcaatttaatctttccaatgacaagttttatatgaatgggaaaagctctcagcaactgcaggcaaatactaataaatccagtgttcatagtttgagagtttttcattcagtaccagcgattaaactgcagacgatgaagagtaaattgagcaataaagacatagcaaattttcaccggcccaaagctttatggtatccacatgacaatgagctagccattaaacagcaaggaaagttaccgacccgaggatccatgaaaattatagttaagagcctggggggtaaaggaagcaagctacacgttggcatagaggaatctgtctcttctttaagagccaaggcttctagaaagctagattttaaggaaacagaagcagtgaagatgttctataagggaaaggaacttgacgatgaaaagtctcttgctgcacaaaatgttcaaccaaattccttggttcatcttatacgtactaaagtacatctgtggccatgggcacagaagctacctggcgaaaataaatctttgagacctcctggggcattcaaaaagaaatctgacctatctactaaagatggccatgttttcttgatggagtactgcgaggagaggccgctgatgctcagcaatgcaggaatgggtgcaaatttgtgcacatattatcagaagtcatcccctgaggatcaacgtggcaacttgctgcgcaatcaaagtgacaccttagggaatgtgatgattctagaacctggggacaaatctcctttccttggggagatacacgctggttgcagtcagtcatctgttgaaacaaatatgtataaagcacctatttttccgcagagattgcagtcaacagattacttgttggtccggtctcctaaaggaaagctctctctaaggcgtattgacaagatagttgttgtcggacaacaggaacctcgcatggaagtaatgtctcctggatcaaagaatctacagacttatttagtgaacagaatgttggtttatgtgtaccgagaattttttaagcgtggtgggggggagcacccaattgctgcagatgagctgtctttcttattttctaacttgacagatgcaatcatcaagaagaatatgaaaattattgcttgttggaagagggataaaaatggccagtcttattggaccaaaaaagatagtttactagaacctcctgagagtgagctgaaaaagcttgtggcaccagagcatgtatgttcttatgagagtatgctagctgggctgtatcggctcaaacatttagggatcacccggtttacattacctgccagtatatcaaatgcattggctcagctcccagacgaagctattgctcttgctgctgcatcacatattgagcgggagttgcagattactccatggaacctgagcagtaattttgttgcttgtacaaatcaggacagagcaaatatagagcggttggaaattactggggttggtgatccctctggacggggtctaggatttagctacgtcagagctgcgccaaaagcaccagctgcagccgggcatatgaagaaaaaggcagcagccggccgtggagccccaactgtcactggtacagatgctgatcttcgcagattaagcatggaagcagctcgagaggttcttatcaagtttaatgtccctgatgagataattgccaagcaaactcgatggcatcgtatagctatgatacggaagctatcaagtgagcaggctgcatccggtgttaaggttgaccctacaaccataggcaagtatgctcgtggccagagaatgtctttcctgcagatgcaacagcaggcccgagaaaagtgtcaggagatttgggatagacagcttttgtccctttcagcttttgatggtgatgagaatgaaagcgaaaatgaggcgaatagtgacttggactcctttgccggagatctggaaaatctacttgatgctgaggaaggtggggagggggaagaatctaacatttctaagaatgacaaattggatggagttaaaggtctcaagatgagacggcggccatctcaagttgagacagatgaagagattgaagatgaagctactgaatatgctgagttatgccgactgctgatgcaagatgaggatcagaagaagaaaaagaagaagatgaaaggtgtgggagagggaatgggctcttatcctcccccacgacccaatatagctttgcagagtggtgaacctgtacgaaaggccaatgccatggacaagaaacctattgccatccaacctgatgcatcgttcttagtaaatgagagcaccatcaaagacaacagaaatgttgattctattataaagacccccaaaggtaaacaggtaaaagagaacagcaattctttgggccagttgaagaaggtcaaaatactgaacgaaaacctaaaggtattcaaggaaaagaaatcggcgagagagaactttgtttgtggagcctgtggtcagcatgggcacatgagaaccaataaacactgcccaagatacagggaaaatacagaatcacaacccgaaggcatagatatggataagtctgccggaaaaccgagttcttcagaaccatcaggtctgcccaagctgaaacctattaagaacagcaaagctgcgccaaaaagtgcaatgaaaacttctgtagatgaagctctgaagggagataagttaagttccaaaactgggggtctccctctgaagtttagatatggtatccccgctggagatttgtcagataaacctgtttctgaagctccaggaagttctgagcaagcggtggtgtctgacatagacactgggattaagtccacatctaagatcagcaaactcaagatttcaagtaaggcaaaacctaaagaatcaaagggtgaatctgagagacgttcacattcattgatgcctacatttagcagagagagaggggagagcgaatcacacaagccttccgtctctggacaacccttgtctagtacagagagaaatcaggcagcctcaagcaggcacactatttctatcccgcggccatcattaagtatggacacagatcaagctgaatcgcgtaggcctcatcttgtgatacgaccaccgacagaaagagaacagcctcagaagaaacttgttataaaacgttcgaaagagatgaatgatcatgacatgagtagtcttgaagagagtccacggtttgagtcccggaaaacaaaaagaatggcagaactggcgggttttcagaggcagcagagctttagattgtcagagaattctctggagcggagaccgaaagaggatagagtatggtgggaagaagaggagataagtacgggaagacatagggaagtaagggcgagaagagattatgatgatatgagtgtatcagaagaacccaatgagatagctgagatcagaagatacgaagaggtaatacggagtgagagggaggaagaggaacgacaaaaagccaagaagaaaaagaagaaaaagaaactgcaacccgaaattgtagaagggtatctagaagactatcctcctcgaaaaaacgatagaagattgtcagaaagaggtcgaaacgtcagaagccgctatgtgtccgactttgaaagagatggtgcagaatatgcgcctcaaccaaaacgacgcaaaaaaggagaggttggcctagcaaacatcttggaacgcatagtggacacactaagactaaaagaagaagtgtcacgtctcttcttgaaaccggtatccaagaaggaagctccagattatcttgatatcgtggaaaacccgatggatctctcgacaatccgagataaggtacggaagatagagtacagaaaccgagaacagtttagacacgatgtctggcagataaagtacaatgctcatctttacaacgatgggcgtaacccaggaataccacctttggcagatcagttactggagatttgtgattacttgttggacgattatgaagatcagttaaaagaagcagagaaaggtatagatcccaatgactga

SEQ ID NO: 1666 - DNA, 1110 bp, Arabidopsis thaliana
  Clone ID: AT_T25B15.C1.o50.tg
atggctgactcagtgccaggtcatgtcgccggcggaggtttacagggtttctctgtcgacgccgagtgcatcaagcagcgtgtcgacgaggttttacagtgggttgattcgcttgagcataaactgaaagaagtggaggagttttactcgagcattggtgtctcaaactctggctctattggtaaagatacagaaaaagggagacatgttgtggggattaggaagattcaacaagaggctgcgcgtagagaagctgttgctgctaaaagaatgcaggaccttatgcgtcaatttggaacaatctttcgtcagataactcagcataagtgcgcttggccgtttatgcatcctgtcaatgttgaaggtcttggtttgcatgactactttgaggttattgacaagcctatggacttcagcacgataaaaaatcaaatggaggctaaggatggtaccgggtacaaacatgtcatgcaaatttatgctgatatgcggctagtgtttgagaacgcaatgaattataatgaagaaacaagtgatgtttactctatggcgaaaaagttactggaaaagtttgaggagaagtgggcacactttcttccaaaggttcaagaagaggagaaaatacgagaggaagaggagaagcaagcagcaaaggaggcgctgctagcaaaagaagcatctcatatcaaaacaactagagaattggggaatgagatttgccatgctaatgacgagctggagaagctaatgcgtaaagttgtggaaagatgcaggaaaatcacaattgaggagaagcgtaatattggattggcattgttaaaactgtcaccggatgatctacagaaagtgttgggtatagttgctcaggctaacccgagctttcaacctagagcagaggaagttagtattgagatggacatactggacgaaccaacactatggaggctaaagttctttgtgaaggatgcgttggataatgcaatgaagaagaagaaagaagaggagacaaagactagagaattgagtggagcacaaaagaaagaggtttcgaagaaacgaaatgcgactacaaagttagctgagaggaaaacgaagcggtcacgcatatga

SEQ ID NO: 1667 - DNA, 1446 bp, Arabidopsis thaliana
  Clone ID: AT_F2H15.C1.o2.tg
atgtcttctgaacatatatcaggtggtggagcttcaaagacgaagaaacataagtggagctcaagccagaaccgacccaaaccaatgggagtttctagacaggaacgatctgttcctcttgtatctccttcgaactcgtttgcgtcggaggacgatcatcacatgttgaagataagtctgagctcgatttcgaagcttgaggttaggaacttgaagcggaaactaaaatctgagcttgatgaggttaggagcttgatcaaacggttcgatcccgaagctaatcctggtgggtcaatggctaaaagtggtgttgtagggagaagcaagaaggtgaaaacagggaatggaggaggtaagaaaagtgggcatggagctgataaaggtacggttcagatttttaagaactgtaacagtttgcttacgaaattgatgaagcataagagtgcatgggtattcaatgtccctgtggatgctaaaggacttggcttgcatgattatcacaatattgttaaagagcctatggatttgggtacagtgaagactaagttggggaaaagtttgtataagtcgccattggatttcgctgaagatgttagacttacttttaacaatgcgattttgtataatccgattgggcatgatgtgtatcgttttgctgagcttttgttgaacatgtttgaagataaatgggtatccattgaaatgcagtatgataatcttcataggaagttcaaaccaactcgtgatattgagttccctgctcctgctccatccattgctcctattgtagagccattacctgccattgttccttcaccatccccgtcttctcctcctcctcctccaccgccaccagtagcagctccggtacttgaaaataggacttgggagagagaagaatctatgacaatccctgtggaacctgaagctgtaattactgctccagagaaagctgaagaagaggaagcacctgttaacaacagggacctcaccttggaagagaaacggagactcagtgaagagcttcaagacttgccttatgacaaactagagactgttgttcagatcataaagaagagcaatccagagctctctcaaaaagatgatgagattgagctggatattgatagtcttgatatcaacacgctttgggagctttatagatttgtgactgggtataaggagagcttgagcaagaaaaacgaggctcatggatttggttcagaaagagatgctgaatctgttcacaatagtattcaagaacctaccactttagtaagtggcaccacaacatcgagagttactgaatcaggaaaagcagctcggcaagaaaacaatgcaagtggatcaagtagttctaacagttctagtagtgactcaggatcttgctctagtgatactgacagtgacagctcttcaggacgtggatcagataatggtaattag

SEQ ID NO: 1668 - DNA, 2442 bp, Arabidopsis thaliana
  Clone ID: AT_K17E12.C1.o8.tg
atggttgaaagtgctgcgttcccaggagggtattatcggaatacttttgaagcgcctgaggaatcagagggctctgggagctctgcacagattgatactgaggtcactgcgtctgagaattcaagtactcctgcacggaagtgtattatgttgaattcgaatgatgaagatccttatggtgttcagagacaagtcatttccttgtataacatgtcacaatctgagaggaaggatttgatttatcggcttaagctggagttggagcagacaaagatagttcttaaaaatgctgagttgcagagaatgaaccctgctgctgtgtcgtctactagtgatagggtgggttttagcactggtcaaaagatatcatctcgagtcagcaattcgaagaaaccatctgattttgctgtgggttcggggaagaaagttcggcatcagaatgggacttctcgtggatggaatcgtggtacctcagggaagtttgagtcttcgaaagagactatgactagcactcctaacattacactgatgaagcaatgtgacacgctactgagaaaactgtggtctcatccgcattcttgggtgtttcaggcgccagttgatgtagtgaaactgaacatacctgactatctcactactatcaagcatcccatggacttagggacagtaaagaagaacttagcgtctggtgtatactcaagcccacatgagtttgctgctgatgtgaggcttacatttaccaatgcgatgacatataaccctccaggacatgatgttcacattatgggggatatccttagtaaattatttgaagcgcggtggaaaactatcaaaaagaaattaccaccttgtagcatgcaaacgttgcctgcagtaacattggagcccaatgatgaaaggaaagctgctatatctgtacctccggcgaagaagagaaagatggcttcacccgttagagagagtgttccagaaccggtgaagccacttatgacagaagtggagaggcatagattgggcagacaactcgaatcactactcgacgaacttcctgcacatatcattgacttcttgaagaaacacaattcaaatggcggagaaattgcagaagacgaaattgagatagacattgatgttctcagtgatgaagtactggtcactcttcgaaaccttctagatgaatatatacaaaacaaagaagcaaagcagacgaatgttgaaccatgtgaaatagagcttattaatggatcacgaccgagcaattcgtcgctgcaaagaggaaatgaaatggctgatgagtatgtcgatgggaatgaaccgcctatctcaaggagctccagtgattcggattctggtagctcggaagatcaatctgatgacgctaaacccatggttcaaggggattcttccaagatgcctgaaactgcaaactctgaggcgcaaagagatgaaaatacaagaattgatgatctttttgttgggagtcaatctactggtgcgcttgagcagatggatatttgttctcagcaaaagcttagttctgatgaatcagatggccaacatgagggaaatatattagagactccagcttcatctgagaagcgctatagagctgcgctgttgaagaaccggtttgcagatatcattctaaaagcacgagagaaaccacttccacagaatggtattaagggcgatccagaaaggctgcgtaaagaaagagaagaactcgtactgcagaagaagaaagagaaagcgcgtctacaagctgaagcagaggctgctgaagatgctcgtcgccaagctgaagcagaagccgctgcagaagctgctgctgaggctaagcggaagagagaactcgaaagagaagccgctcgccaagctttattgaagatggagaaaactgtagagattaatgagaactcacggtttctcgaggacctagagatgctgagttcgagtgcacctgagcaattaccaagctcagccgaagaaaccagccccgagagacctttagacgcacttggaagtttcaacctcagaggaagcaacccacttgagcaactcggactgtacatgaaacaagatgatgatgaagaagagcccgaagctcctgctgttccaaaacctgatgaaaccagcaccgagagacctttagacgcacttggaagtttcaaactcggagaatgtaatccgctggagcaacttggactgtacatgaaacaagacgacggtgaagaagaagaacccgaggctcctgtggttccaaaacccaatgaaaccagcctcgagagacctgtagacgcatttggaagtttcaacctcaaaggaagtaaccctcttgagcaactcggactgtacatgaaacaagacgatgatgaagaagaacccgaggctcccgctgttccaaacctagccaacgacgtggaagaaggtgaaatcgattga

SEQ ID NO: 1669 - DNA, 5103 bp, Arabidopsis thaliana
  Clone ID: AT_K13E13.C1.o16.tg
atgggagcaatgatgaagagtatgatgggcctgagcttcaaagcttctgtgtttgacgacgaagattatgatgaacaaggaggacaagagaaggaacatgtaccagttgagaaatcttttgattcagaagagagggaaccagttgtcttgaaggaggaaaagcccgtaaagcatgaaaaggaggctagcatcttgggaaataagaatcagatggacacaggagatgtccaggaggtcagcaagaatgatttcgaagctactttggatgagaaacgtgtcaccccgctgcctacgttatatcttgaagatgatggtatggtcatcttacaattctctgagatatttgctatacaagagccacagaagaaacggcagaagagagaaattagatgtatcacttatagagacaaatacatatctatggatatttctgagcttatcgaagacgatgaggaggtactcctgaagagccatggtaggattgacactcatgggaaaaaaactgatcaaattcagctggatgttcccttaccaatcagagagcgttcacagctggtaaaatctggcatagtaagggatactacatcagaatcgagagagtttaccaagctaggaagggattcatgtatcatgggtgaactgttgaagcaggacttaaaagacgataattcatctctctgtcagtctcaattaacaatggaagttttccctctagaccagcaagaatgggaacatctaatactctgggaaatttctcctcaatttagtgctaattgttgtgagggcttcaaatctggacttgagtcagcaggtataatggtacaggtgagggcttcaaattcagtgactgaacaagaaagcttaaatgtgatgaactctggagggcaaactcaaggggacaataacaacatgctcgagcctttttttgtaaatccgttggagtcttttggctcaagaggttcccagtctacaaatgagtccactaacaaaagtagacatcatccacaactccttagattagaatctcagtgggatgaggatcattatagggaaaatggcgatgctggacgggagaatttaaagcagcttaatagtgacgctcgtgggcgcttgagtggacttgcattgcaagatagggatatgtgggatgagtcatggttagatagcataatatgggagtcagataaagatttgagcaggtctaaactaatatttgatcttcaagatgagcaaatgatctttgaagttccgaacaataaggaaagaaaatatcttcaacttcatgctggatctaggattgtatctcgatcttcaaaatccaaggacggatcctttcaagaaggctgtggatcaaattctgggtggcaattcaatatttctaatgacaaattctatatgaatgggaaaagcgctcagaaactgcaaggaaatgctaagaaatctaccgtacacagtttgagagttttccattcggcaccagcgattaaattgcagacgatgaagatcaaattgagcaatctggggggtaaaggatcactgctaaccgtcggcagagaggaatctgtctcttctttaaaagccaaggcttctagaaagctagattttaaggaaacagaagcagtgaagatgttttatatggggaaggaacttgaggatgaaaagtctcttgctgaacaaaatgttcaacccaattcccttgtccatcttttacgtactaaggtgcatctgtggccatgggcacaaaagcttcctggcgaaaataaatctttacgacctcctggggctttcaagaagaaatctgacctatctaatcaagatggccatgttttcttgatggagtattgtgaagagaggccgttgatgctcagcaatgcaggaatgggtgcaaatttgtgcacgtattatcagaagtcatccccagaggatcaacatgggaacttgctgcgcaatcaaagtgataccttagggagtgtgattattctagaacatgggaacaaatcccctttccttggggaagtacacggtggttgcagtcagtcatctgttgaaacaaacatgtacaaagcacctgtttttcctcataggttgcaatcaacagattatttgttggtccggtctgctaaaggaaagctctctctaaggcgtattaacaagatagttgctgttggacaacaggaacctcgaatggaaataatgtctcctgcatcaaagaatcttcatgcttatttggtgaacagaatgatggcctatgtgtatcgagagtttaagcatcgcgaccgtattgctgccgatgagctgtctttctcattttctaacatatcagatgcaactgtcagaaaatacatgcaagtttgttccgatttagagagagatgcaaatggcaaggcttgctggtccaagaaacgtaagtttgataagattccacttgggttgaacactctggtggcaccagaggatgtgtgttcctatgagagtatgctagctgggctgttccggctcaaacatttagggatcactcggtttacattgcctgccagcatatcaactgcattggctcagctcccagatgaaaggattgccgctgcatcacatattgcgagggagttgcagataactccatggaatctgagcagtagttttgttacttgtgcaactcagggcagagaaaatatagagcgtttggaaattactggagttggtgatccctctggacggggtctaggattcagctacgtccgagttgcaccaaaatcatcagctgcatccgaacataagaagaaaaaggcagcagcctgtcgcggagtcccaactgtcactggtacagatgctgatcctcgcagattaagcatggaagcagctcgagaggttcttcttaagttcaatgttcctgatgagataattgccaagcaaactcaacggcatcgaacagctatgatacgcaagatatcaagtgagcaggctgcatctggtggtaaggttggccccacaacagtaggtatgttttcccgtagccagagaatgtctttcctacagttgcaacagcaggcccgagaaatgtgtcatgagatttgggataggcaacgtctgtccctttcagcttgtgatgatgatgggaacgaaagtgaaaatgaggcaaacagtgatttggactcctttgttggagatctggaagatctacttgatgctgaggatggtggggagggggaagaatctaataagtctatgaatgaaaagttggatggagtgaagggactcaagatgagacggtggccatctcaagttgagaaagacgaagaaattgaagatgaggctgctgaatatgtcgagttatgccgattgctgatgcaagctaaagatcctcttcttaatgaatcactcactggtggtgcttatttagatgagaatgataagaagaaaaagaagttgaaagatgtgggagagggaattggatcctttcctcctccacggtccaattttgaacctttcattgacaagaaatatattgccaccgaacctgatgcatctttcttaatcgtgaatgagagcaccgtcaaacacaccaaaaacgttgataaagcaacttctaagtcccccaaagataaacaggtaaaagagatcggcactcctatatgccagatgaagaaaatactgaaggaaaaccaaaaggtattcatgggaaaaaaaacagcaagagcgaacttcgtctgtggagcctgtggtcagtctactggaaaaccgagttcttcagatctatcaggcgaggtctggctgacacctatcgacaacaagaagcctgcgccaaaaagtgcaacaaaaatttctgtaaatgaagctacgaaagtaggtgattcaacttccaaaactccaggaagttctgacgtagcagctgtttctgaaatagactctgggactaagttgacatctaggaaactcaaaatttcaagtaaggcaaaacctaaagcatcgaaggttgaatctgacagtcctttccattcattgatgcctgcatatagtagagagagaggggagagcgagcttcacaatccttctgtttctggacaactcttaccaagtacagagacagatcaggctgcctcaagtaggtacactacttcagttccgcagccatctttaagcatagataaagatcaagctgaatcttgtaggcctcatcgcgttatatggccgccaacaggaaaagaacattcgcagaagaaacttgttattaaacgtttaaaagagataactgatcatgacagcggtagtcttgaagagactccacaatttgagtccaggaaaacaaaaagaatggcagaactggcagattttcagaggcagcagagactcagattgtcagagaactttctagactggggaccaaaagatgatagaaaatggcggaaagaacaagatataagtacggaactgcacagggagggaaaggtgagaagagcttacgatgatagtactgtatcagaagaacgcagtgagatagctgagagcagaagatacagagaggttatacggagtgagagggaggaagagaaacgacgaaaagccaagcagaaaaagaagctgcaacgcggaatactcgaaaattatcctcctcgacgaaacgatggaatatcttcagaaagtggtcagaatatcaacagcctgtgtgtctctgactttgaaaggaacaggacagagtatgcacctcaaccaaaacgacgaaaaaaaggacaggttggcctagcaaacatcttggaaagcatagtggacacactgagagtcaaagaggtaaacgtgtcatacctcttcttgaaaccggtcacgaaaaaggaggctcccaactatcttgaaattgtgaaatgcccaatggatctctcgacaatccgggataaggtacggaggatggagtaccgtgaccgacagcaatttagacacgatgtctggcagatcaagttcaatgctcatctatacaacgatgggcgtaacctgtcaataccgcctttggcagatgagttgctggtgaaatgtgatcgcttgttggatgaatatagagatgagttaaaagaagcagagaaaggtatagtagattccagtgattcattgagatag

SEQ ID NO: 1670 - DNA, 1959 bp, Arabidopsis thaliana
  Clone ID: AT_F2D10.C1.o13.tg
atgggtgaggtagcagatacaatgacgaagaagaagaagaaaggaaggccatctctattagaccttcaaaaacgagctatcaaacaacaacaacaacaattacaacagcaacaacaacaacacaagaacaaccatcaagacgacgatgaccaccaccacaacaacaacaatagatccggctcgaaaaaccctaattctctcaatcaccgatccaaacgccggaaccctaattcaaacgacggcgattccccttggatcaaagacgaaggtgaagacaacgacgatgacgagcggcgagagaagaaacataagcttttacatggattgaactctcactctcatcgacattctcctaattctcaatccgatctgaatctcgaccaaactccagaaccgtcctttaatagacgcaacctctccgccgccgcctccggatctgattatcatacgggagaaaaggcttcgaaagcgacagacattcttcaagggtctcccgtggagtctggtcccactactcctttgccagacaaaaagttgttactcttcatcctcgatagacttcaaaagaaggatacttatggagtttactctgacccggttgatcctgaggagcttcctgattattttgagattattaagaatccaatggattttagcacattgcggaacaaattagactctggagcatattccactttagaacaatttgagagagatgtgtttttaatatgtacaaatgcaatggaatacaattcagcagacactgtatattatcgacaggcacgggctatacaagagttggcaaaaaaggattttgagaatttaaggcaagacagtgatgatgaagaaccacaaagccaacaacagcaacagcagcaaccaaaagttgcaagaagaggccgtccgccaaagaaacatcctgaaccatcttctattgaccgcactgcttctgaaatttcagctgatgctctcattcctggagatagctctaacaagttttctggtgcttacaatttaagaaaggctcctccttcatacaaattccgccaagcagaatcatcagttagaatcaatcataacagtgaaacccagagtggttggtcggtagactgggagagcgaatttccatcttcggttgtgaaggcggttaacaagtatgggatgaaacatttcaatgtcgatgataacagacgcgatacctacaaccacctctcgacttctacccaagaaccatcggttttgacaacgcttgaagacgagttaaaacagttgattccagttgggctgaacatggagtacggttacgcgaagagtctagcacgatatgctgcaaatcttggtcctgttgcctggaaaattgcatcgaggagaatcgagactgtattgccctctggaatcaaatttggtcaaggttgggttggagagaacccagcaggacctgaagaggatgattctcagaaacaaaacatattaatgtcgtcgggaaaacaaaagtgttctaatgacttagcgtctgatgatcattctaacagaatcctgtctccaaccgcttcagtttcaagtgctttcataggaaacagacatgcttcctctcaagccatcgaagagaccacaccaccacctgctcgtgtcttgaatccagaaatcgatcacccatcctcctcctctcaccaagcaggactgctaatcaaaacagagagcagcaacggcctcatccgcggattcaaccataatgcaaatcagatgctcggaattgctagacagcaacaaccaaacgtaagcaacgaggccacaccggtctcgcaacaacaaggctcattgtttccttaccccaaacaagaattccaccggtttccgccagaccttaacgctaggctagtctcaccaaactccccgggctctaatcagcagactggttcgtcctcgtcgcagcatccggatctggcattacagctgtga

SEQ ID NO: 1671 - DNA, 438 bp, Arabidopsis thaliana
  Clone ID: AT_K13P22.C1.o4.tg
atgttgcattttctgtgttactttgtgtttagagctttgattatcatgactaatctcatctctcagtctgctttggttgtcgttcttgttgtattagggaatcagtgtgatcattcttcagaaacaacacctatccttgacaagaagtctttggagttgattcttgacaaacttcaaaagaaagacatctatggtgtgtatgcagaacctgttgatcctgaagagcttcctgattatcatgatatgatagagcatcccatggatttttccacagtgaggaagaagcttgcgaatggatcatattctacgttggaagagctcgagagcgatgtcttattgatttgctcaaatgcaatgcaatacaattcctcagacactgtctactataaacaggtaaatcatgtttttatattctcaccaattttctttctttgctaa

SEQ ID NO: 1672 - DNA, 1896 bp, Arabidopsis thaliana
  Clone ID: AT_T24P15.C1.o6.tg
atggcaaagccggaaaatgacgtcaccttaaccgagaaacaaacatggagcacatgggaagagcttcttctcgcctgcgccgtacaccgtcacggtaccgaatcatggaactctgtttccgccgaaatccagaaactgagtcccaacctctgttccctcaccgcctccgcttgccgccacaagtacttcgacctcaaaagccggttcacccaagagctgcccgtaccggaatccgtcgctgagatctcaaccgctccttggctagaggagttaaggaagctccgcgtcgatgagctccgtcgcgaagttgaacagtacgatttatctatctccacgttgcagtcgaaggtgaagcaattggaagaagagagagagatgagtttcattaaaccggacacggaaaccgagaatttagatctagagaggaagaaagagcgtagcgattccggtgaaccagtcccaaacccgccggttcagctaatgaacgaaaccatttctccagatcccaaagaaatcggatcggaaaacacggagagggaggaggaaatggccggaagcggcggcggagaatcgaagcttgccggagaggattcttgtagaggaagctgtgaaagtgtggagaaggaaccgacgacgaactcggagagagttgaaccggtgagtgtgaccgagttgatagagtcggaggacggagcgagtcgtggagaggagattactagtgatgtgcagagctcggcgagcttgccaagaaagggaacgtcggagccggataaggaagatcaatctccgacgagcgccaaagatttcaccgttgaatcacagccgttgattagttttgtcgagattcttctgtctcatccctgtggttcccacttttcgcgccgactcgaacgtcaggaaacaattgagtacggtacaataattagagagcacgtagattttgagataattcggaagcgagtcgaaggaggcttgtacaaaagttggaggatcaacttctttcgtgatttgctgctacttgttaataatgcaagagtgttttatcacagaggatcttcagagtttaaatttgctgagcagcttcaccaactcgtcaagaaacagatgactactactctcaagggacttagtaatagagatgagatctcaatctcaccaccaaaagaagaagttgttgcaatcccttcatcaaagcctgtttcttctaaaccaagaatgtctgttcctaatattgtagcttgtcggaaacgtagtgccttggctgctaaacctttgctattattgcctcctggaccagataaaaaggccaagaaaacagatcatgttgtggactatgatgagaagccggtttcagacaaggatggtgaagcctctgggaaagacgatgatgactctctgattgtgaagataatgactagaggaagaacctcctcgacgggaaaagtagctaacaggaacgacaagaaccgtgactccagtttgaatgttgatgatagcaaagataaggttaagaaaactgatgaagagaagaaaggtggctcgaaaaagaaaagggctgcgagttttctcaggagaatgaaagtgggctcttcggatgacacattgaagcgtagctctgctgctgattcttctactacgggaaaaggaggaggagcggaacagaggaagaataacagcaacaaagctgataataagaaaacaccgataccaaagataagacaaacaaataagaaagcaagtcctgtgaagagaagcaataatggtcgaaactcagaaagagaagctgctccatcttcttcatcttatcctattctagcaaagcgaagcagagatgctggtgaaaaagaggaggcgtcttcttattcaccacgcttgaagaaacgtgcaaggaggtga

SEQ ID NO: 1673 - DNA, 2112 bp, Arabidopsis thaliana
  Clone ID: AT_F18O22.C1.o60.tg
atgacagagagaaacggtggtttccctggtgattattgttttgaggcacccggtggagattatgatgaaggatctgatagtccgagggtctcagagggttccaattgttcaaaaagaaaggtcggtgaaaccttcggtgtctcgaaaatggtattacccttatctggcctatcatcatcagataggaaggagttgattcgtaggctaagacaagagctggaacaaatacgagttttccagaagaattttgagctttctagaacagtggctctcactagctcttctgctagtggtttgactcgagtcaagagttttggaatgtcgcgatgttccacgggtccaggaaagacggtgaaccctataagtgctgcttctaaaccgactcctgtcactactgcggttatgcttctgatgaagcaatgcgaggcgcttttgaaacgattgatgtcacatcagtatggttgggtgttcaatactccagtggatgttgtcaagctgaatatactggactattttaatgttattgagcatcctatggatttaggaactgtgaagaataagttaacttcggggacatattcctgtccgtcagagtttgctgctgatgttcggcttaccttcagcaatgcaatgacgtataatccacctggtaatgatgtttatgttatggctgatacacttcgtaagtttttcgaagtgaggtggaagacccttgagaagaaattatccggaactaaagttcatactgaaccgagtaacttagatgcccataaggaaaaacatatcgtaatacctgtgcctatggctaagaagaggaagaccactgcagtagactgtgagaatgtcgtagatcctgctaaacgggttatgactgatgaggatagactcaagctgggcaaggatttggagtccttgactgagttcccggcacaattaataaatttcttgagagatcacaactcaaatgaaggagggattggggatgatgagattgagattgacattaatgatctcagtgaccatgccttgtttcagttgcgggatctcttagacgagcatttgcgtgagatccaaaacaaaaaatcaagtgttgaaccctgtgagatagagcttctgcatggatcagtgccagggaattcatcaatgcaacattgtgatgggagtgaattggatgatgaagttgttgacattggtgaaaatgaacacccaacatccagcatttctcctgtcacgatagagaaggatctggtgttaggaaactctaatgactatcccctgggttgtactactgattgctcctcttttgatgcatataatctaggtaatagcttgggaagtgtgtccggtgatcctaaaatgtcaagtttaccgagggcatcaaaggggcttggaaccatcgatcttgaacctatgttggatggagctacaagcgcttccccaacaagaggatcatctgttggtggattggatcagctggaaagtgcatctccggagaaaataagttctgttgaggcggattgtcagcaagatggaaatagtgctcagaatgagaagcaattacctcctgaaaagagctacagggctgctattttgaagaaccgatttgcagacataattttgaaagcccgagagaaacctcttaaccagaatgacactcgagatccagagaagctgcagcgtgagagagaagaactcgagcttcaaaagaagaaagagaaagcgcgattacaagcagaagctaaggcagctgaagaagctcgtagaaaagctgaggcacaagctgcagctgaagctgcggctgaggctaagagaaagctggagcttgaaagagaagcagcacgccaggcattgatggagtcggttgaactcaatgagaacgcaaagtttctcgaggatctagaactgctgaaaacagtcgacacagaccatttgacaaatacaatagaggaggaggatgggcctgatgttgggttgcgtagtttcagttttgggggtagtaatcctcttgaacagcttggactgtttatgaaacaagatgaggatgaggaggaagctgacccgctaacttcgccagcccctgaaatagatatagaagagggagagattgattga

SEQ ID NO: 1674 - DNA, 1434 bp, Arabidopsis thaliana
  Clone ID: AT_K9H21.C1.o3.tg
atgggtaaagcgcggaaacactctagagggagaccatcaggctttgttcctgattacatgcaagctgttgagcctgatgaatttgtttactcagagaggatgaattctgaggcgtctcctccactgaaaaggagacgttttggtttgaatggagataacaatggcgtttctaaagaggttttgtctctgtcaaagatgtcgaggtctgagagaaagaatttagttcacaagttgaagatggagcttcaacaggtcagggaccttagtaagaagattgcatctttcagttcagacactgttctgttgtcgccatacaatgatcatagctgcagtgatgggcctaggaggccgccaccagaaaactttgctacatttgttgggtcacagggcaaaaagcgccctcctgtgcgcagtgataagcagcggaataagaaaggtccatctcgattaaatgtcccaacaagttatactgttgcttcagtgatgaaggagtgtgagacgttactcaatcgtttatggtcacataagtcggggtggccatttcgtactccagttgatccagtgatgttgaatattccagactattttaatgtgattaaacatccaatggatcttggaacgatacgaagcaggctgtgtaaaggtgaatactctagtcctttggactttgcagcagatgtgcgtcttacattttcaaattctatagcttacaatccaccaggaaatcagttccatactatggctcagggtatcagtaaatattttgaatcgggatggaaaagtatagagaaaaaaatacctatgtctaaaccaccagttattcccctaaccagttctgcttctctggagtctgaaatccctttcgaagtagcaccgatgagaaagaaggaagctgcaatgaacgataacaagctgagggtggaacctgctaagttggtcatgacagatggtgagaagaaaaaattaggccaagatctgatggcattagaagaagatttccctcaaaagattgctgatctcctgagagagcaaagtggcagtgatggtcaatctggagaaggtgagattgagatagatatagaagcgctttctgatgaaatcttgttcatggttcggaaactcctggatgactatttaagggagaaaaagaaatccatggaaaagagcgaaccttgtgagatggagattgttcatgactctggattcagtaattcccctttgcagcctagtaaaggtgatctgcaaattgacgaggatgttgacatagttggtgggaatgacccctcggtctcaagccatcctcctcttaagatagaaaaagatgctgcatgtagaaataatgaaagcagcagttcgagtagctctagtagtgaatcaggctcttcatctagtggttcgtgtttatgcgagccttcttctatttccttagaataa

SEQ ID NO: 1675 - DNA, 1671 bp, Arabidopsis thaliana
  Clone ID: AT_F15M4.C1.o12.tg
atgggtgaggtagctgataataatacattgatgaagaggaagaagaaaggtaggccatcacttcttgacctccaaaagcgagctctcaaacagcaacaattgcttcagagaagaaatcccaatgaagaaaacgaagaagagcttagatccagttccagaaaccctaatttcagcaaccgatcaaatcgccggaggaattcaaattctgaagacgacgacgatgagaggagagacaaaaagcatcggcttttacacggattgaattcacacgagggtcgtgattcttctaattccaaatctggcggcggcgatttggactccgatgcacgcaaccgccggaaaattgacggatctgacaatacgggagaaaaggcttcgaaagcgacagacattcttcttcaaagagggtcacttgtggagtctacacctttgccagacaaaaagttgttgttcttcattcttgatagagttcaaaagaaggatacttatggagtgtactctgatccagctgatccagaggagcttcctgattattatgagattatcaagaatccgatggatttcaccacattgcggaagaaattagaatccggggcatacaccaccttagaacaatttgaggcaagtcttcaagacgtatttttaatatgtacgaatgcgatggagtacaattcagcagatacagtatactaccgacaggcaagagctatgcttgagttggcgaaaaaggactttggaaatttgagacaagaaagtgatggagaagaaccagtgtcactgtcacaacagccgaaagtagtcaaaagaggccgtcctccaggctcaggccttaagaaacagcttgagcaatctttgattgatcgcacgacttctgatatttctgctgatgcagcagcattcacttatgctggagatagctctagattatccggttcttacaatctaagaaaaaatcctccttcatatggattccgtcatgcagaaacttcggctgtcaataaatacgggatgaaaaatgtcgacgagaacaggcgagatacctacaaccagaactctgcttccttgcaagattcttcgatttttacactgcttgatgataatttaaaacaattaactccagttggactgaaagctgaatatgggtatgctaggagtctagcacggtatgcagcaaatattggtcctgttgcttggacatttgccaatgtaaggattgaaaaactgttaccaactggaaccgaatttggtcccgggtgggttggagagaaccctgagaatcctcctcaacagcaaaacttaatgtcgggaaagcaaaagtgttcgaatgactatgcatctgatgatcatcatcagtcaagtagaatcatgtctccatcaacctctgtctcaagctccatcataggaaacatacattcttcccatgaaagcaaagagtctgttcaggtattgaatcaagaaaccgagataaatggtctagtccgtggttccagcggatttaaccataaaccaaaccagatgctggaaacagctggctcgcagcaaggcaacataaaacaggaatttcagcggttgccaccagatctcaatgctaggctttcctcaccaaactcaccaggctctaaccaccaggcaggttcatcgcagcatccggatttggcgttacaactctaa

SEQ ID NO: 1676 - DNA, 1899 bp, Arabidopsis thaliana
  Clone ID: AT_T10K17.C1.o190.tg
atggaggagctcctcctcgcctgcgccgttcaccgtcacggtactgattcatgggactccgtcgcttctgaagtccataaacagaactccacttttcgtacactcaccgccatcgactgtcgtcacaagtacaacgatctcaagcgccgattctcccgtaacctggtctcgccaggatctgccgatgaagaaaccctcgccgccgagatctcttccgttccttggcttgaggagttgagaaagctccgtgtcgatgaactccgacgagaagtcgaacgttacgatctatccatctcgtcattgcagttgaaggtgaaaacattggaagatgaaagagagaagagcttgaaaactgagaattcagatctagatagaatcgcggagacgaaagagaaccacactgaatcgggcaacaactccggcgtaccggttactgagctgaaaaattctccagatccgaatgataatagtcctggaaccggatctgagaacacgaacagagctgttaaaatcgctgaaccagtggacgaagaaccgaaccggatcggcggagaagacaacgacgagaagccggcaagagaggattcgggtagaggaagttgcgagagcgtggcgaaggaatcggatagagcagaaccaaaaagagagggaaatgactcgcctgagttagttgagtcaatggacgagtcgaaaggagaggaagatacgaaagaaacgagtgatgggcagagctcggcgagcttcccgagaaaggagacggtagaccaagaccaaccggataacaaagatcaatctctcaccgtcaataagatcttcgttgaatctcagccgttgagtgatttcatcgagattcttcagtctcaccccattggctctcacttttcgcgccggctcgaaacccaggaaacatccgactactataggataataaggcaacacatagactttgagatgattcgaagtcgtgtggaagagggttactacaaaactgccaggaccaagttttttcgggatttactgctactaatcaacaatgtgagagttttctatggcgagccatcgcctgagtttaatgcagcaaaacagctttaccaactcatcaagaaacagatgagtttcaagattcctaaacaaaccttaccaccaccaaaagaggatgccttggtgacgtctaaggaggaagtcaaagtctcttctcttaaaccaacactttcagtgcctattatagcttgtcggaaacgtagttccttggctgttagatctccagcgtcagtcactgaaactttgaagaaaaagactagagtagttccaacagttgatgagaagcaagtttcagaagaggaggaagggagaccctctgataaagatgagaaacctattgtttctaagaagatggctagaggagcagcaccctcaacagctaaaaaagtagggagcagaaacgttaagaccagtttgaatgctggtatctctaatagaggccgatctccaaacggtagctctgtgctgaagaaaagtgttcaacaaaagaagggtatcaacaccagtggtggctcaaaaaagcaaagtgctgctagttttcttaagagaatgaaaggggtttcatcatctgaaacagtcgtagagacagtgaaggctgaatcctctaatggaaagagaggagctgaacagaggaaaagtaatagtaagagtgagaaagtggatgcagtaaaactgcctgctggtcagaaacgattaactgggaaaaggccaacaattgaaaagggtagtcctacaaagaaaaacagtggtgtcgcctctaaaagaggcactgcttctctgatggcaaagcgggacagtgaaactagtgaaaaggaaacaggttcttctactcgtccgaagaagcgttcaaagaggtga

SEQ ID NO: 1677 - DNA, 1932 bp, Arabidopsis thaliana
  Clone ID: AT_K21L13.C1.o15.tg
atgatgcctcccatcttcttcctcatcatcatcgaccatctcccaaaaaaccctcttttcatccctttttctgaagctctaaaatttttcagttccccgatcgccggaattttcgccggtgatctcgagaagagtgaaaaccccagaaatgaccttgcgattcgtatggctccggctgttttcgctaccttaaacgaaccgtcgtaccaggaacaatgcggcgccgtttttatgaggaaatttacaaaccaatccgtcaccgaaaacaccaataaccttccgctcttcaaccctaaccctaaccctaatttcgaaaggagcaattcgagcaagcagtgcgatgactcgtcggaatttggaagctatgctacttttaatctcgctgggtacacctcaagtcagctcagggagcttaagaagcgctttacctcagagctcaagcagattcggatcctgagagaacggatcgagtcagggacgttcgagactcagcaaggttatactatcccagaggtacccgccgttcgatcagctccgttgaataacttcaccggtgaaaagaatgaccttggaccgaagaagaagaaacagaagaaaaatgtgtcaggtctcaagcgaagcaatcaatttggtccgtcggatccggagtcggagaaattattggccggtatgttgaatacctgtagtcagatcttggtgaagctaatgaagcataaatgggcgtgggtgttcaacactcctgttgatgtggttggtttagggcttcatgattatcatcaggttgtgaagaaacctatggatctgggtacagtgaaattgaatcttgataaaggattctacgtttcgccgattgattttgctactgatgtcagattgacattcgacaatgcaatgacgtataatccaaagggacaagatgtgtattttatggctgataagcttttggatcatttcgatggaatgttcaatcctgcttttaagaagtttgaggctcagcagcttaaactcactggttcttcatctcgtcctgaacctgacttcaaacctgacttcaagcaaagacagtggaatcagaatccgccaatggtggcgaatcctaggaaaggaaccgaacaaatatctattgcgaagaagcttgattcagtgaagccgccacaacctacattgcctcctcaattagtcgagccgtcacgcgttcaatctccttctcctcctccccctcctccggtgatacagcctgaacttccgcagcctcaaccaccacctccacagcttgaaattgaagtagaagcacctcctgatgtgagtgaagtgtcaaaaggaaggaaggggaagttgccgaagcctaaggctaaggatccaaataagaggttgatgacgatggaagagaagtcaaagcttggtatgaatctacaagacttgcctcctgagaagcttggtcagttgcttcagattctcaggaagagaaacggacatttagctcaagatggggacgaaattgagctggatatagaagctgtcgacaatgagactctatgggagcttgatcgttttgtgacgaactacaagaagatggctagcaaaatcaagcgccaagggtttatcaggaacgtgtcaactccacctaggaacatggcttcggtagcagaaatgggtagtgcggagaagagaacaaggagaggagatgcaggggaagaggatgttgacattggagaggacataccaatcgaagattatccatctgtagagatcgaaagagatggtactgcagttgcagctgctgctagtagtggttctagttcttcaggcagttccagttctagtggtggtagttcctcgtctagtgggtcaggtgggagttcatcaggtagtgattctgatgcagatagtgttcaatcgccatttgtggaagcaaaagaagcccaatgttaa

SEQ ID NO: 1678 - DNA, 1941 bp, Arabidopsis thaliana
  Clone ID: AT_F4I1.C1.o24.tg
atgaggaaggaagaagaagaagaagcaggatcttataacatgaacgtcgacgatactaacaacaacaacaactatatctgcactgataatgattacatcgaagaagatgaagataatagcaacactaagaagagccaaacacaagcatggggcacgtgggaagagctgttattagcatgcgccgttaaacgacacggatttggtgattgggattccgtcgctacggaggttcgatcccggagctctctctctcacctcctcgcttccgctaatgattgtaggcacaagtatcgagatctcaagcgtcgatttcacgaacaagaaaaaacagatgtgacggcgacggtggaagaagaagaagaagaagaagagagagttggtaataatatcccgtggcttgaacagctacgtaaccttcgtgtagctgagctccgtcgtgaagttgagcgttatgattgttcgatactatcgcttcaattgaaagttaagaaattagaggaggagagagaagtcggagaagagaaaccagatctggaaaacgagaggaaagaagagagatcggagaacgatggttctgaatctgagcaccgtgaaaaggcggtttcagcggcggaggaatctgatcgggaaaataggtcgatgaacgagtccaactcgacagcaaccgccggagaagaagagagagtttgcggagacgaaccgagtcaaactcgagaagatgattccggtaatgataagaatccggatcctgatccggttaacaaggatgcgacggctgcggaggaggaggaaggatcggttagtagaggatcggaagcgagtcactcagacgagttaggcgagtcagggacatcggaaagtaaatggaaacggaaacgaaggaaacagggtggtgccggcgagatcagatcggctgagagtaaatcacagccgttgattagtcttcttgatctgattcggtcccatccgcgtggatctttgttcgaacgccggcttcggagccaggaggctaaggattacaagagcatggttaagcaacatttggacattgagacaatacagagaaagttgaagcaaggatcttatgattcttcaagcctcattttttacagagatctacagcttctcttcacaaacgcaattgtcttctttcctttatcttcctcagaatcgatggcagctcacgaactacgagctgttgtttctcaagaaatgagaaaagagaccggaaaagctggccccaggttaataaaacaggaagcatccggtatgcgtagtggcaaagcggatgctgaaacatcagactcgtctctctctaggcagaaatcttcaggtcctcttgtcgtttgtaagaagaggcgttctgtttccgctaaggcttctccttcgtcatcaagctttagccaaaaagatgatacgaaagaagagacattatcagaggaaaaagacaacattgcgactggtgtaagaagctcgagaagggcaaacaaagtggctgcggttgtcgctaataataccaagacgggcaaaggcaggaacaaacagaaacagacagagtcgaaaacaaattcgtcgaatgataatagtagtaaacaagacacaggtaaaacagagaagaaaacggtttcagcagataaaaagaagagtgtggctgatttcttgaagagattaaagaagaactctccgcaaaaagaagctaaagatcagaataagagcggtggaaatgttaagaaagatagtaaaacaaaaccaagagaacttagaagtagcagtgtgggtaaaaagaaggccgaggtagagaatactccggtgaaaagagcccccgggagaccgcagaagaaaacagcagaggcaactgcatctgcctcaggaaaacggggtagggatacaggaagcacggggaaggacaataaacagccaaagaaaagaatcagaaaatga

SEQ ID NO: 1679 - DNA, 1521 bp, Arabidopsis thaliana
  Clone ID: AT_F10E10.C1.o2.tg
atgtttgcttacaggtttttatttgttcttgtaagaatggttgcgatacccaatattaagataaagtttggtcctcaaggttctgtcagaacattccaaacgttgtctgatagttcgaagaaaattgagcatgtagtgactgaagatttatctcaatcctcggagaaatcaaagaagcgtggtgggcctaaagagctagatgaagttcaacctaagaagaagcagaggctggattgtgattggtctagtcaatgtttggcattgttacgttttttgatggagcaccgtggtggatggctctttaaggagcctgttgatcctgttaaaatggagattcctgattacttcaatgtcatacaaaagccaatggatttaggcactgtcaaatcgaaacttttgaagaatgtctacagtaatgctgatgagtttgcagcggatgttcggttaacttttgccaatgcgatgcattataatcctctgtggaatgaggttcacacgattgcaaaggagattaatgagatttttgaggttagatgggaatcactcatgaagaaaaaggttttgaggttatcctggaatgaagttagagaaggttataagagacagccagttgaacgtgattgttctagacggagcagcactggaacatcagcttcctctggggtgggattgacgaaaccagctaaagagaactccgaaaagggttctctttcgtccaagccagtgaaagtgcagagcaaaaagaatactcctgctgtgacgcctaaagcattagcaacctgtaaatgtggtaggataatttgcatatgcctcaagtcctgtagctcatttggaagtgacgtttgttcgttaacggattgtcaattaaagaacatttcaggtgcacaagcgagcgagttagatcctcaatctaatgggtctgacacttcaaagaaggagagaaatggtagtctcaagtctcagcttgataaaccttcaaacagtgatctgttgggtaatgagttgaaaacggcttttcctgctctgccgccggtacctcctgagaaagctcttcgtgctgcaatactcaaagctcaatatgcaggaaccatcataaaagctaaacacagaatagtccttggccagaataacaaagctgatctgattagaatacagatagaaaaggaacagatggaaagagcacaacgtgaagagaaagctagaattgaagccgagatgagagctgctaaggttgctgaacgaatgagggcacaagacgagttgaaacagaaacgtgagagtcaacggcttgaaatagcaaagatgaaaaaaggcttcgattttgaacggaacaaccactcgaaattgaagaaaaaattcgttaaagtctgtggctgctttagtctgacaaaagctcggttgttacttgaagagttgggtctggttttgaaaaatgattattgtccggaactggaagtgatcgggtcagaaaaatttgatgcaatgagaatggacgatcttgaggaaggagagatcctttag

SEQ ID NO: 1680 - DNA, 1935 bp, Arabidopsis thaliana
  Clone ID: AT_T2O9.C1.o90.tg
atgaaggaggacgaagaagaagaagcagtgatatcgaacggcatgaacgacgacgacgatactaacaatattaacaacagttccactgaatttgataacaatcgtatcggagacggagacgataacagtaatctgaatcagatcaaacaagtatggggaacgtgggaggagttggtgttaacatgcgccgttaaacgtcatgctttttccgattgggactccgtcgctaaggaggttcaggctcgttcccggagttctctcatcgtttccgccgtcaattgcaggcttaagtatcaagatctcaaacgtaggttccaagattccgtcgacgtcggagacgaaaataccgaagcggcggcgaacgaggaggatgaagtcggtgaaatctcttggctcgagcagttacggagtcttcatatggcggactccgccgtgaggttcaacgatgtgacgactcgatactgtacggagaagtcgcttcagttaaaagttaagaaactagaggaggagaaagacggagatgatggggacaataaaccagatctgaaaaacgacgaaactaaaccggtgagagttaaccgggaaacgacggagtctgaccgggatgataataggtcgatgaacgagtccaactcaactgcctccgtcgataaaatcgccgatcacgaccgattagacggagataaaatggttaaggctaacgagaattcgagaaatccagatcccgatccggttaataaggcggagacgccggaggaggaagaaagaacggttagtaaaagatcggaaatgagtaactcaggcgagttggatgaatcgggaacgtccaattgtcttggaaagaggaaaggacagaaatacagaagcggcggaggcggcggtggtgtcaaatcggccggcgataaatcacagccgttgatagatatcattaagcttattcggtctcatccccgtggttccgtgttcgaatcccggcttaggagccaggacactaaggattacaagaggttgataaggcagcatttggacatgaagacaatagagaagaagatggagaaaggatcttatgtttcttcaagcctctctttttacagagacctcaagcttctcttcacaaacgccattgtcttctttcctacatcttcctctgaatccatagctgctcaagagctaagaacactcgtctcaaacgagatgaagaaacgaacgggaaaattgggtcactgtgtcatcaaatcagaggctgaatcttcggtttctagacagaaatcctctgttctttctcttgttccctgtaaaaagaagagctctgctttgaaaaagacgtctccttcttcaagctctagacaaaaagatgagaagaaatctcaggaagtttcggaggagaagattgtgactactactgctactactagtgcaagaagctcgaggagaacgagcaaagagattgctgttgttgctaaagatactaaaacgggaagagccaagaataatattaagaaacaaacggatacgaaaacagaatcatctgacgatgatgatgatgagaaggaagagaattctaaaacagagaagaagacagtagcggataagaagaagagcgtggctgatttcttgaagaggataaagaagaactctccacagaaaggaaaagaaacaacgagtaaaaatcagaagaagaatgatggaaacgttaagaaagagaacgatcatcagaagaagagtgatggaaacgttaagaaagagaacagtaaagtgaaaccgagggaattgaggagtagtacgggtaaaaagaaggttgaggtagagaataataatagtaagagctcatcgaaacgaaaacaaacgaaagaaacagcagaggtggctactggaaaacgaggtagggaatcgggaaaagacgataaacagccaaggaaaagaagcagaagatga

SEQ ID NO: 1681 - DNA, 3210 bp, Arabidopsis thaliana
  Clone ID: AT_T20M3.C1.o16.tg
atggatgctgaattggcaccacgtcgtgagggtctccgtcctcgtcgttcaacaacaattgctaataaacgactgaaaacagaatctggcgctgaccaagatacatcagaagagaaagatggccaagatgaaactgagaatgggaatgaattagatgatgcggatgatggtgaaaatgaggttgaggctgaagacgagggtaatggagaagatgaaggcgatggcgaagatgagggagaagaagatggtgatgatgatgaagagggtgatgaagaacaagagggaaggaagagatatgatctgcgaaaccgtgctgaagtccggagaatgcctacgggagaaatcaacaagcaacaacaacctagatctcctcggagagtattgcatcagggcatgggcaccagggttggaagagatggtaggagaggtgggtctcggcctcacaagcgccatcgctttacaagaacagatgattcagatgattctcttcttgtggacgagttggaccagggccctgcaattccctgggctcgaggtggaaacagatctggagcaccttggctatttgggggtttggacacgtatgggtcaagttcattggggttgaacgttggagcttctggttggggtcaccagagtgatggtttggctgcattaacttctggtgttcagactgctggcccaagctctaaaggaggtgcagatatccagccactgcagattaatgaggatataaattttgatgacattggtgggctgtccgaatacattaatgatttgaaggaaatggttttctttccgttgctgtatccagagttctttgcaagttacagcattactcctcccagaggtgtactgctgtgtggtcctccaggcactggtaaaacactgattgctcgagcattagcatgtgctgcttcaaaagctggacagaaagttagcttttatatgcggaagggtgctgatgttcttagtaagtgggttggcgaggctgagagacagctaaagctactctttgaggaggctcagcgaaaccagccttccataatcttttttgatgaaattgatggtcttgctcctgtaagatctagcaagcaggaacaaatacataattctattgtttcaactttactggcgctgatggatggcctcgattctcgtggtcaagttgttctcattggagcaacaaacagggtagatgcaatagacggagctttacgccgccctggcagattcgatcgggagtttaatttttccttaccaggttgcgaagcacgagccgaaatattggatattcacactcgtaaatggaagcacccacctactagggagctgaaagaggaactggcagctacttgtgtagggtattgtggtgctgatctaaaagctttgtgcactgaagctgcgattcgtgcttttcgtgagaaatatccacaagtttataccagtgatgataaatacgccatagatgttgggttggttaatgttgaaaagagccactttgtagaggcaatgtcagctattactcctgctgcccatagagggtctgttgtgcaatccagaccactctctccggttgtgttgccatgtttacatcgacacctccttgaatccatgagtttaatatcagatatttttccctcgtcagccacgtcatcggagttgacgaagctgtcaatacttacatttggatctgcaattcctcttgtttatcgacctcgacttttgctgcttggtggtgaaggagttggactggatcatcttgggcctgcaattttacatgagctagaaaagttccctattcattctctgggacttccatctctcctttcggatcctggtgcaaagaccccagaagaagcgttagtacatatatttagtgaagctagaagaacaacaccttcaatactttacataccaatgttcaataattggtgggaaaatgctcatgaacagcttagggctgtatttctgactttgttagaagaattgccatcaaatctacccatattattacttgctacatcttatggtgaattgtctgacatggaagagcagtcagtatttgacaatcgatctgtctatactgtggacaaaccatcaagtgaagacaggtctttgttctttgaccgtttgattgaagctgctctctcagtcatttctggcttaaatggcaaacctgatggaccacaaccccttccagaacttcccaaggttccaaaagaacctactggtccaaaacccgcagaagtaaaagccaaggtggaagcagagcagcatgcccttcggcgattgcgtatgtgtctcagagatgtttgcaatagcgcattccactttccagttactgacgaggatgctccaaactatcgctcaataattcaaattccaatggatacggctactctgctgcagcgtgttgatactgggcagtatctgacatgtacaccgtttttgcaagatgtggatctcattgtgagaaatgccaaggcttacaatggagatgattacgctggagcgagaattgtcagtagagcctatgagcttcgagatgtagtgcatgggatgctgtcacagatggacccagcactgctaacatattgtgataagatcgcagctgaaggtggtccttcactgataccagatgatctgagtggatcaatcctcggtttagctcctgttgtgcagatgggaactgttactagaaccagtgccagacttcgaaatgtgcagccagaggttaatttagatcgagattatgaaggtcttaaaaagcccaagaaaactactgatgctgtcagtatagattcagctgcagacaaatcacagaaccaagattcaggccaagaaatgccatctccggatgcggccaacccacagtcagcagctccttctccaacagatggtgatagagaagaccaaagcgagccaccaagtaaagaggcatctgcagaagatatgagtggtgattcttgcaagggtcctgcggccaagtcggataaagaaatttcaagccgaacagaatctgtaaagggagtattcatggaacgtactgacaactacagcattccgcagatggagaggctttacactcgaatcatgaagggtgttcttgagactctggacaaagggcttcgtgatgatgataataatcctaagcattcaattttgagatttttgtcggaattcgcacagcatcaggcgaatttctga

SEQ ID NO: 1682 - DNA, 1806 bp, Arabidopsis thaliana
  Clone ID: AT_F28J7.C1.o10.tg
atgactgtgaggaacggtggtttcccaggagattataatcgtaacagttttgactctcccggcggctgtgatgatagccccaatgcttccaaggatgatgaaacttttggtgtcccgagaatagttttacccttgtctgacttgtcatcatcagaaaggagaaagtggattcatacgcttcgtcaggagctggaacaactacggtcctttcagaagagtgttggggaccttcttcctatatctaagattgttactagtacacctgcaagtaatgtgtctcgccccaagagttttggaatgtcacgatgctctactggccctggaaaaagggtgctccccttcacagcaaccaaaccagagccagtcaccacttccactatgcttcggatgaagcaatgtgagagcctccttaaacgattgatgtcgcagcagcattgttggctctttaatacccctgtggacgtcgtcaagctcaacattcctgattatttcaccattatcaaacatcctatggatttaggaactgttaaaagcaagttaacttccggcacgtattcaagcccttcagagttttctgctgatgtccgtcttactttccgcaatgctatgacttataacccgtcagataataatgtgtatcgcttcgctgatactctcagcaagttttttgaagtgagatggaaaactatcgagaagaagtcatccggaaccaaatctgaaccaagtaacttggctactcttgctcacaaagatattgcgatacctgagcctgtggctaagaagagaaagatgaatgctgtgaaacgtaacagcctcttagagcctgctaagcgggttatgacagatgaggatagagtaaagcttggcagagatttggggtccttgacagaattccctgtacagataataaatttcctgagagatcacagctccaaggaagagagatctggagatgatgagatagagattgacatcaatgatctcagtcatgatgccttgttccagttgcgggatctctttgatgagtttctgcgagaaaatcaaaagaaagattcaaacggtgaaccctggagtgaattggaggacgaggatgttgacattggtaattatgagcaccctatatctcacatctcaactgtcagaacagaaaaagcagattccgtcggtggattgaatcagatggaagatgcatccagagggaagctaagtcttattgagggggcagatggtcatcaagatggaaatagtgctccaaaagagaaggaactacctccagaaaagcgttacagggctgctctattgaaaaatcgatttgcggatataatcttgaaggctcaagagataactcttaatcagaatgagaaacgagacccagagacactgcaacgtgagaaggaagaactggaattgcaaaagaagaaagaaaaagcacggttacaagcagaagccaaggaagctgaagaagctcgtagaaaagctgaggcacaagaggctaagaggaaactggaacttgaaagagaagcagcccggcaggcattgcttgagatggagaagtcggttgaaataaatgagaacacaaggtttctcaaggacctagaactgctcaaaacggttaacacggaccagttacgaaatctaagagatgttggctctgagtctgatgggttggctgtatttgggtttggaggaagtaatcctctagagcagctggggctatttatgaaacatgaggaggatgaagatgaatccgacatgcttgcgtttccagatcccggcaatgaagtagaagagggtgaaatcgactga

SEQ ID NO: 1683 - DNA, 648 bp, Arabidopsis thaliana
  Clone ID: AT_F5G3.C1.o23.tg
atggcaacacaaaccaaccaagaccatttctctggggacttgcgaagatcttggcagaaaattggcaagttgacgtacggctcaaggcagtggatagtgatgatggcatcaagatcggcggttttgaagaagatgctagaatcagacgagttcaagacttcggctaagcaggtgggaacaatcactctcttagagatgaaacaagaagagctagaagcttttgttgagtttctatatagtgatggttctatgctttcttcgaaagtgaagcaacatgctcgggcactctatcgtgcggctgacaaatacgagattctccgactacgagagctatgcagatctgagcttatatcttctctgaattcgacgaattctcttaaccttcttgagctcgcacaaatcccttttgacaaagtcctcaacgatgcagcccttagttatattaaaacaaatgaacttatgtttcctagctttgatgagttcaagttgttcgttgataattacccaaatcttgccgtggaggtaatgatggcttctcttactcggactcctagtacaagctgttctaggtgtggtctcataacctatcataatcagactggtacaagctgttgtagttgtggttttgactatcctcgtcgcagctag

SEQ ID NO: 1684 - DNA, 1749 bp, Arabidopsis thaliana
  Clone ID: AT_F17O14.C1.o13.tg
atgggctcagacagcactttgtctctcccttcttcatctcctccttgtaacaatcgctcctctgttcctccaactttcaccactcgcatattctctgatgttgcgggtgacatcattgttgttgtcgatggagaatcatttctacttcacaagtttccgttagtagctaggagtggaaagatgaggaagatggtgagagatctcaaggactcttcttctatgattgagcttagagatttccctggtggaccttcgacgtttgaactcaccatgaaattttgctacggcattaatttcgatatcactgcctttaacgtggtctctctccgttgcgctgctggttatcttgagatgactgaggactacaaagaacagaacttgatctttcgagccgagaattacctcgaccagatcgtttttcgcagttttcatgaatctgtcctagtactttgctcctgcgagacgcaagagattgctgaaacatatgaaattcctgaccggtgcgtggaggccatcgccatgaatgcttgcagaaagcagttagtatcaggtttatcagaggagctcaaggggagagattgtctcgagatgtggactgaagaactctctgctctcgggattgattactacgtccaagttgtatctgcgatggcgaggttaagcgtgcggtcagagagtatcgtcgcttctctggtgcattacgctaaaacatcattaaagggtatcatcgatcgaaactgccaggaacagaggaaaatcgttgaagccatggttaaccttttgccgaatgacgaaaaaggatcttactctttatcaattattcctctcggtttcctctttggaatgctcaaggtcggaactataatagatatagagatctcttgcaggctcgagcttgaacgtagaatcgggcatcagttagagaccgcgtctctcgatgatctgcttataccttctgtccaaaacgaagattcaatgtacgatgtggataccgtccacaggatactcacattctttcttgagaggattgaagaggaagatgatgaatgtggttacgattcggattccactggacaacacagttcgttgctgaaagtgggacggatcatggatgcttacttggttgagatcgcaccggatccatacctgagtctacacaagtttacggctattatagagacactacccgaacactcacgtatcgttgacgatgggatctacagagccattgatatgtatctcaaggctcatccattattgacagaagaagaacgcaagaagctatgcaacttcattgactgcaagaaactttcacaagaagcaagcaaccacgtggcacaaaacgatcggctgcctgtacaaatggtggttagagtgctttacacagaacagttgcgactgaagaaagctctgtcgggagattcagaagaagggtcgtgggttttgccttctggagtacaaagccgagcggtttcgccaagagacacgtatgcagcgttgaggagagaaaacagagagctgaagctggaaatatcaaggatgagagtgagagtgagcgagttagagaaagaacataatttgatgaaacatgagatgatggagaaatccggtaataatggtggaacgttcttgacgtcactgtccaaaggaattggaaggatcgcgacattcggtggagaaacccggcaaaaggtgaaccggaaatcaaggtcggtgtcggagagaaaatcaagtagaagcggtagataa

SEQ ID NO: 1685 - DNA, 1878 bp, Arabidopsis thaliana
  Clone ID: AT_MIF21.C1.o2.tg
atggaaactttcagcctcaaggattgttcgtccgtcgcctccagcccgatttcttctccaaatatcagtacccttttgaaaatcaaagttctttcttggagtaaagagaccggtctacccgcgtcagtacatgttcgagtttgcaacaagagttttaaccttcacaagagtctcttgtgtgcaaagagcggatattttaaggaaagagaggatcagctatcggagatcgagataccacaagagtttcctggtggagcagagacctttgagaagattatgcttttcatttatggctgtccaactttaatacatcctttcaacatcgctggactacgatgtgcagctcaatttcttgaaatgacagagcaacattcgacgggtaacctctgcgagagatttgacctttatctaaaccaagttgtcttgcaaaactgggatgacacgttagttgttctgaagaaatgtcaggatctagtgccttggtctgaagatctactcatcgtgagccggtgcattgagtctctggctttcacggcttgtatggagattctcgatcccgaaagacgaagagaaaagccagtcatcatgcttgaaggtatggtgaatcaaccatgggaatatacaaacatagagagaataataaaccaagatacttggatcaaagacctcacggatcttccattcgaattcttcaaaaagattattgggtcgcttagaagacaaggtatgaaagaaagatatgtaagtccattggtcgccctttacgccagtaaatctgtaatacctgaaggtcaaactaatactgatattctgcaaagagctctagatctgcttcttacaagagacaaggcatataggtttgttccagttgggttttattttgcgtgtcttgcacacaatttgaagcatgacactgtgttaaagctgcaagatcagattgtatctcttcttcacactgcccaacccgaaaactttatatacccgaaagccgggaacaggcaagttgctttcagtcaggagttgcttacaatggaaagcctgttttcagtatatgtatcaacagaatcggaacgccatcttacttcctcctcaagcaacgtgagagttggaaaactgtgggatatttttctctctcgtttaccgtatgatcaagagatgaaaactacaaggttcattgagctgattgagacagtcccaatgtcattcagagagagtcatgaccaactttaccttgcagtaaacgcatttcttcaggtacatacaaatatatctcaagaagaaaaaggatcaatctgcagttacctaaactgccaaaagctatcacaagaagcgtccctcgaactcgttaaaaacgagaaaatgccattacgtttggttgtccaagctctctttatccaacagctgaacacacaccaagcttttaaagactgttcggactcattcagattcacaaactctgcagacttctctggtagtgttgtcccaagctcaagacccttaacttcccaacaaagcccttgcactgatgatgaaacggggccaagaaacagaccgttatgcttcttgatgcagaaagatgcaacattggatgagtttgagtcaacgagcttcagaatccataacctcgaagagcaactagtttctttaaagaagagccttcactcccacgacaacctaaagaagccaaattgccttggaaaaagatcagcgagtagaaacaaaaacacctttggccaagtcacaacggcttgtattggctctgtaagctttacttcacagagaaaatatgcaaataggctactccagattctacgtagagttaacttgtttggaagtagaaaaactaatagatcgaaagcaggtgagagtgaaagatga

SEQ ID NO: 1686 - DNA, 1098 bp, Arabidopsis thaliana
  Clone ID: AT_MDC12.C1.o13.tg
atggctataaccgccactcaaaacgacggcgtttcactaaacgccaataagatttcgtatgatcttgtggaaactgatgttgagatcatcacctccggtcgtcgtagtattccggcacactccggcatcctcgcttcggtctcaccggtactgacgaacatcatcgagaagccgaggaagattcacggcggatcatcgaagaaagttattaagattctcggtgttccatgcgacgccgtttcagtcttcgtcagattcctctattctccgagtgtcacggagaatgagatggaaaaatacggaatccatctactggctttatcacacgtgtatatggtgactcagttaaagcaacggtgcactaaaggcgtcggtgagagagtaaccgccgaaaacgttgtcgatattctccagctggctcgtctctgcgacgcacctgacctctgtctcaagtgtatgcgattcattcactacaagttcaagaccgttgaacagacagaaggatggaagtttcttcaagaacacgatccttttcttgaacttgacattctccaattcatcgacgatgcagaatcgaggaagaaaagaagaaggagacacagacgagaacagaatctgtatttgcagctgagtgaagccatggaatgtatagaacacatatgcaccgaaggttgcacactggtcggaccatcgtctaacttagacaacaagtcaacatgtcaagcaaaacccggtccatgcagtgcgttttcgacttgttacggacttcaacttcttatacgtcactttgcagtatgcaagaaaagagtcgatggcaaaggttgtgtccgatgcaagagaatgattcaactccttagactccattcttcgatttgtgaccaatctgaatcttgccgtgtccctctttgcaggcaatataagaatagaggtgaaaaggacaagaaaatggttgaggacacgaagtggaaggttctggtgagaagagtagcgtctgctaaagccatgtcttcgttgtctcaatcaaagaagaaaaaaagtgaagtgttatttaaagaagaagcagaagatttgatcagaatccggaacaagttaatgtga

SEQ ID NO: 1687 - DNA, 1776 bp, Arabidopsis thaliana
  Clone ID: AT_MSH12.C1.o6.tg
atggctagcttgaaactgggttccaaatctgaagtctttcatcttagtggtcacacatggctttgcaagactggtcttaagcccgatgttatgatccaagtcgtagacgaaagcttccatctccataagtttcctttgttgtcaagaagtggatatctagaaactctgttcagcaaagcctctgagacaacttgtgttgctcagcttcatgacattcccggtggtcctgaaacattcttgcttgtagctaagttttgttacggtgtaagaattgaggtcacacctgaaaacgctgtgagtctcagatgtgcagcagagtatctccaaatgagtgaaaactatggagatgcaaatctcatctatctcactgagagtttcctcaacgatcacgtattcgtaaactgggaagattccatcaaggccctggagaaatcatgcgaaccaaaagtgttgcctctcgctgaagagcttcacattgtttctaggtgcattggttctttagccatgaaggcttgtgcagaggacaacacaagttttttcaactggccaatctcactacctgaaggaaccactactactactatatattggaacggaatacaaacaaaggccacgagcgaaaactggtggttcaacgatgtatcatcgttcctagatttaccaatgtacaaaaggttcatcaaaactgttgaatccagaggcgtaaatgcgggtatcatagcagcatctgtcacacattacgccaaacggaatcttcctttacttggttgttctaggaaatctggttctccttcagaggaagggactaactatggagatgacatgtactattcacatgaagaacaacgaagtctccttgaggaaatcgtggaacttctcccgggcaaaaagtgcgttacatcgacaaaattcttgctcaggcttcttaggacatcaatggttctgcacgcgagtcaggtcactcaggagactctggagaagagaattggaatgcagctagacgaagctgctctagaggatttactaataccaaacatgaaatactcaggtgaaacactctatgatactgactctgtccagaggattcttgatcacttcatgttgacgtttgattcaagtattgttgaggagaagcaaatgatgggagattctcatcctcttaagtccatcacaaaggttgctagtctgatagacggctacttagcagaggtggcgtccgatgagaacttgaaactatcgaaatttcaagcacttggtgctctaatcccggaagacgtgagaccaatggatgacggtatctaccgtgcaatagatatatacataaaggctcatccatggctaacagagtcagagagagaacagttgtgcctgcttatgaattgtcagaaactgtcattggaggcatgcacacacgcagcacaaaacgagcgtctaccattgcgggtcatagtacaagtcctgttctttgaacagatgcggcttcggacatctatagcaggatggttattcggctcggaggaaaacaatgacacaagcggcgcgttagaaggaaacaagaacacaaacgcaaatatggtgatgcatgggatgagagaacgcgtattcgagcttgaaaaagaatgtatgagcatgaagcaagatcttgataagcttgtcaagacaaaagaaggacgcaacttcttctctaagatattcggatcaagatctaagactaagacttcaccatgcggtaaaggaggtgaggacgctctagtgattcctgaaaccaaaaattga

SEQ ID NO: 1688 - DNA, 1794 bp, Arabidopsis thaliana
  Clone ID: AT_K1F13.C1.o23.tg
atggcgtcagagaaatctacctccaagggccaagcatggttttgtacgactgggttacctagtgacattgaaatcgaagttgatgacatgacattccatctccataagtttccactcatgtcaaagagcaggaaacttcacaggttgattacagagcaagagactaaaaatggttatcctcacatcaaactcgaggattttcccggtagttcagagagctttgagatggtggcgaagttctgctacggcgtcaagatggacctctctgcttccaccgttgttccacttcgttgcgccgccgaacacctcgaaatgacggaagagtattcaccagataacctaatttccaagactgagaggtttctctctcattccgtctacaagagcttgcgtgaatccattaaagctctcaaagcttgtgagtcagtctctcctttagccggatcgcttggtataacggaacagtgcatcgactctatagtctccagagcttcctcagctgatccttcactcttcggttggccagtaaacgatggcggcggaagaggaaacatctccgccaccgatctgcaacttatacccggcggcgcggcgaaatctcgaaagaaaccgagtagagattcgaacatggagctgtggtttgaagatctgacgcaactgagtcttccgatcttcaaaactgtgatcctatcaatgagatcaggagatctgagctccgatatcatagagagctgtttgatttgttacgctaagaagcacattcccgggattctacgttctaaccggaaaccgccatcgtcatcttcaaccgcagtttcagagaatgaacagagagaactactggaaacaataacctctaatcttccattagataaaagctccatctcctcaacaacgagattcctcttcggcttattacgaaccgcaatcatcctcaacgccgccgagatttgccgtgatctgctggagagaaagatcggatcgcagctagagagagccacgctcgacgatttgctcgtccctagctactcatacctcaacgagactttatacgatgttgatttggtagagagaatcttaggccactttctcgacaccttggaacaatccaacaccgccatagtcgaagttgacggaaaatctccgtcgctgatgctcgtcgggaaattaatcgacggatttctcgcggagatcgcatcggacgctaatctcaaatcggataagttctacaatctagccatctcactcccagatcaagctcgtctctatgatgacggactttacagagccgtcgacgtatatctcaaggcgcatccatgggtatcggaagcagagagagagaaaatatgcggcgtgatggattgtcagaaactgacgttggaagcgtgcacacacgccgcgcaaaacgagcggcttccgctacgagccgtcgtacaagttctcttcttcgagcagttacaactccggcacgcgatcgccgggacgttattagctgctcaatcgccgtctaaaagacaggtggacgctgggaaatggaagaagacggttagagagaatcaggtgcttcgcttggatatggatacgatgaggacgcgtgttcatcggttagagagagagtgctcgaacatgaagaaagtgatcgcgaagattgataaggaaggttcatcaccggcgacgacgactgatcggccgagaagttggtcgattaccaaaaaattcggatgtaaattcaagacacaggtctgcgattcacacgaagcaacgatggttgatcatagatcacgacggtcttga

SEQ ID NO: 1689 - DNA, 1446 bp, Arabidopsis thaliana
  Clone ID: AT_F21P24.C1.o11.tg
atgaagtttatgaaacttggaaccaaacctgattcatttctgtctaaaggagacaatgttaggtatgtaacaaatgagttagaaacagagatcatcatcatcatcggcaatgtcaagttctatctgcataagttcccattgctgtcgaaaagcggattcttgcagaaacacatagcaacatcaaaaaatgaagaggagaagaagaaccaaattgatgagattgacatatcagagattcctggtggttctgttgcttttgagatttgtgtcaagttctgttacggcatcacggttactttaaacgcttacaatgtggttgcggttcgttgcgcggctgagttcttggagatgaatgaaacgtttgagaaaagcaatctcgtttacaagattgatgttttcttgaactcaaccatcttccgtagttggaaagattctatcattgttcttcagaccacaaaagatctcttgtctgatgactcagaggagctcgtgaagcgttgtctcggctctattgcttctactgcttcgatagacacctcgaaagtcaaatggtcttatacttacaacaggaagaagaagcttgagaaagtgagaaaaccagaagatggtgttccaaaagactggtgggtggaagatttatgcgagcttcacatcgatttgtataaacaagccatcaaagcaatcaagaaccgaggtaaagtcccgagtaacgttattggagaagcattacatgcttatgcaataagaagaatagctggttttagcaaagagtccatgcaactcattgatagatctttgattaatacaatcatagagcttctcccggatgagaaaggaaacatttcctctagcttcttgaccaagctacatcgagcatcgatctttcttggatgtgaagaaaccgtgaaagaaaagttaaagaaaagagtcagcgagcagcttgaagagacaacagtgaatgatatcttaatgtatgatttggatatggtgcagagcctagtgaaggagtttatgaaccgtgatccgaaaactcactcgaaagtatccgtggcaaagctcattgatggatacttagctgagaaatcaagagatcctaatctccctcttcagaacttcctctctctcgctgagacactctctagcttcccaagacactctcacgacgtgttatatcgcgcaattgacatgtttctaaaggaacattcggggattagcaagagcgagaagaagagagtatgcgggctaatggattgtaggaaactatccgcggaagcgtgtgaacatgcggtacagaacgaacgtttgccaatgcgggtgattgtgcaagttctcttctttgaacagattagagccaatggttcatcaacaggatatagcactcctgagcttaccactactactctaaacactgaggatgatgaatgggaccatgagaaagagttttga

SEQ ID NO: 1690 - DNA, 1986 bp, Arabidopsis thaliana
  Clone ID: AT_F28D10.C1.o10.tg
atgtcacctgttgctaaagtctctgagtttcacagagaagggaacgattggtacaaacctctctctctttctcactatttgcatctcagagaccttaaagtttgcagctttattcaattcttcacttgccaagtcatttcaaagattctccttaaagagactggaattggaattttcaggttttgcaagacaggactgtcaagtgatatcactgttgttgttgatgatgtgaagttccatcttcataagtttccattggtttcaaaatgtggaaagctagcaaggatgtatgaagattctaaaagcactgataagcaatctctctggacaacagtccttgaagagttccctggtggtgcagacaatttcttgatagttgcgagattctgttacggggctcgagtagatatcacctcgaaaaacttagtttccatacactgtgcagctgagtaccttgaaatgacaaatgaatatggggaagataacttgatttcccaagttgaaacttttttgcacaagcacgtgcttcgcaattggaaagactgtatcttggcgttacaaagctctagtccggtgttgaagagtgcagaaaagcttcagatgataccaaaactcatgaacgctgtgtccacaatggtgtgtactgacccgagtttatttggatggccaatgatgatgtatggtacattgcagagtccaggtggaagcattttatggaatggaataaacacgggggcgcgaatgagaagctcaggttcggattggtggtatgaagatatctcttatcttagtgtagatttgtttaaaagactcatcaagacaatggaaacaaaaggtatacgtgctgaaagtttagccggcgctatgatgtactatgcgagaaagtacttaccgggtttaggacggtggcagagtggaacaagtgacagtagcaaaagcagaagaagagtagtgagttttaatttggcaaaagcttcttcaccatcctctatgcctcctcttgatcagattgctttgcttgagaccattttaagtcttttacctgaaaagagaggaagatctttttgtaagttcttgttaggtctccttcgtgttgctttcattttaggagttgatgggaactgtgtaaagaagttggagaaaagaataggaatgcagttggagctagcaacgctcgataatcttctgattttgaactattctgattcagagacgttgtacaatgtagattgtgtagaacgaatagtccgccatttttggcgattagtagatagctacatggcagaagtcgcttctgatgtgaatctgaaaccggataaaatgcggtctcttgcagcagctcttccagaatcttcaagaccgttgtatgatggtttatacagagcgtttgatatttatttcaaggagcatccatggctatcagatagagacaaggaacaactatgcaacatcatggactatcaaagactctctatagacgcttgcgctcatgcttcccataacgataggttaccgcttagagttgttctccaagtactcttctttgaacaaatgcatctcagaaccgctcttgcaggtggtctaaatgttgcaaacaccgaaacagctcatgcagtgacgatccctggtggaagaacaggacaggagatagttcagagagatggttgggtgactgttgtgcgccaaaaccaggttttgaaagttgatatgcagaaaatgaggtcaagggttggagaactagaagaggagtttcagagtattaagcaggagatgaagaagagagttagtaagtcctctagctcaatgagctcgcctcgtctggtcaagctcggctgtaagtttcttcttccacgagcttctgatgctaagaatgatacagtccagaactcagtgtccagcactcctagatcagctaccgctgaccatacactccctcgttcctcccgccattccaaacaccgtaaaagcttctctttcttcggataa

SEQ ID NO: 1691 - DNA, 2550 bp, Arabidopsis thaliana
  Clone ID: AT_F19P19.C1.o16.tg
atggcgtcgtcaaagggaggaaacaccactgcccacatcaatactcttcaccaccgtctttatcacgctctcaatcttggcttcagggtttgtgatgagaaagagaagaagtggaagtgtactgatattgagatacagagacatgtcgtgaagtcgatttcagctttccttgattgtttttctcgtgcaacagctaacaatcgtcttatcaaggattcaatttctgatatagccggggctttggtgtttattctagggagtaaaaacagagcagtggttggtttggcagccaatgtagttattaggttgattcgtattgttcctccttctatcttgcattcatattctttggatctcgtggagtctttatcacctctgttatgttgtcaacaattcgatgtttcgcttccctgtgccgttgctttgaacgctattcttgtgaacgtgagagaaactaaggaaaaagaagtgtggaagattttagaggatgagaaaactgtggtttctgttgttggtaatttgcagatcttttctgaggggagtatgtcagtggaatggtttcaagagatggctttgcttctgagtacaattatgttgaagtggcctcagtctaggtattctgtttggaacaaccctgccttgatgggtgtattggagagtgttagtcagaagcctgatatgggtttgacagttgcaactttgaagctctattcttctctagctctttgtggccatggtgccaatgagcttttagacaatgggaagcctatgttagatatgatgattagctgcatggaggagtcaagctctcaaaatgctcgaattgaagggttaaagctagcacaaaggcttgcggctaccgttcggaccatgggtaagtggttcttgagctcaggaaagcttgaacttgaccagatgtctttgcttgtggaggcttgtaaactggctctaatcactcgttgggaaggacaacatcatatttatttctggaagtatcggatctctgaagcgcttcttagtcttgttgtggagaactttcatagtcaatccttggatggttatgtatctctggaagaagaagttttagttgctgagaagcgagtcagcatcaagagcagtgctaatgatgatatgttctccctccaaatacatatcatcgagggcccgagttaccctgtcatttatcctagaagaaggtgctggtatcaaaggaattgggaaaatattggagcatcaagttttgctccttcttcccagagcatcactgaaaagaggatatgctgctgggtatgtacggaagactgggacaacaaagatgcctttcttctatacgctctcttggctttggccgagttggtaaatcattcattctttggacagaatcacgctgaagaactttcaatgaagagcggaaatttgaaagatcggttatgcaccacacttaaggaaatccgcgatggaacatatggctctggtccaaggtggtatgctgcacacatcctaagctattttggatactacggcttcgaacataagttggggaaaaggctcatgtgtgcttatgaagatgaggaatatagtgatatgcgactcctttttgctagtggaaatagtgcgagtgtaaacaaagttattatcgcggtcaggtgtccaatgctactgcctcccaaggaaggagctcacagtagctcaactatatcaactgagaaatctcagagaaccgttcaagaaatccgcatgtctgccaatgtggatattttggcacttgttaaattattggaatttgcttactctggttatgtggaagtagaaagcacgacactgaaaaagctgaaacctttggcgaaacattgtaaggcaaaggttctgctgcagatgctctgcagaagaagacccaagtggggatcttcaatacccgaaattgatataccccttgccctcactcctaaactcatccacttctcggatgtgatattagtacctaaagaaacaaacgtggcttgcttcaactgccgtatgtgttccttaacatctcctcatgcccactctcaccgagttatactgtcgtcaggctgtgaatacctacgtgccttgtttcggtccgggatgcaggagagccatttggatagactaaacgttcctgtgagctggctggggttaacaaaacttgtgagttggttctactctgatgagttgccaaagcctccatcgggttgcaagtggaacaacatggacactgaggcaaagctggatgagcttcaagcttatgtggagatatactcgctttctgaatggtggattatggaagaacttcaaaacgattgcgctcatgtgattctctcttgcttggaatccgctagagagttatctatcaaaacaatcgaattagctgcgagtttctcgatgtggaaactggtggaagctgctgctaatcatgcagctcctatttatcatcagcttcgtgactcaggtgagctcgatgagctagacgacgagctggtaaacttgatccgaaccgccgctgttcagttttctcaacagggtggttaa

SEQ ID NO: 1692 - DNA, 1998 bp, Arabidopsis thaliana
  Clone ID: AT_F26G16.C1.o7.tg
atggcttgcatgaagctgggatccaaatctgatgctttccagagacaaggccaggcttggttttgcacaactggacttcctagtgatattgtcgttgaagttggggagatgtcttttcatctccacaagtttcccttgctctctagaagtggagtcatggaaagaaggattgcagaagcatcaaaagaaggcgatgataaatgtctcattgaaatctctgatcttcctggtggagacaaaacgtttgaactagtcgctaagttctgctatggtgtgaagcttgaactcactgcttctaacgttgtatatctcagatgcgctgctgagcatctcgaaatgactgaagaacatggggaaggaaatcttatttctcaaactgaaacatttttcaatcaagtagtcctcaaaagctggaaagattcaataaaagcgcttcatagctgcgatgaggtcctcgagtatgctgatgaattgaacattaccaagaaatgcattgagtcactagccatgagagcatcgacagacccaaacttgtttggatggccagttgtggagcatggtgggcccatgcagagtccaggtggcagtgttttatggaatgggataagcaccggggctagacctaaacatactagttcagactggtggtacgaggatgcatcgatgctaagttttcccctttttaagagacttatcacggtgatggagtcccgcggcattagagaagacatcatcgctggctccctaacctattacacacgaaaacacttgcctggcttaaaaagacgacgtggtggacctgaatctagtggtcgtttcagcacacctttgggctcagggaatgtactgtccgaggaagagcagaagaacttgcttgaagagatccaggagcttcttcgtatgcaaaaaggtttagttccaaccaagtttttcgttgacatgcttcgaatcgccaagattttaaaagcaagtccggattgcatagccaatttggagaagaggatagggatgcagcttgaccaggctgcgttggaagatcttgtaatgcctagcttttctcatactatggagaccctatacgatgttgactctgtgcaaaggatcttggaccattttcttgggacagatcagattatgcctggtggggttggctctccttgttcttcagtagatgacgggaatttaatcggatccccacagtcaataacaccaatgacagcggttgcaaagctgattgatgggtatcttgctgaagttgctcctgatgtcaatcttaagcttccaaagttccaagctttagctgcttctattcctgaatacgccagactcttagatgacggactctatcgtgcaatagacatttatctaaagcatcatccatggttggcggaaacagaaagagagaatctgtgccggttgttagattgtcagaaactctctttagaagcttgtacacatgcggcgcagaacgagagattaccgctaagaataatcgtccaagtgctcttctttgagcagctacagctcagaacctctgtagctggatgcttcctggtctcagacaacctcgatggcggatcaagacagttaagaagcggaggatatgtaggaggaccaaacgaaggaggcggaggaggaggaggatgggcaaccgcggtaagagagaatcaagtcctgaaagttggaatggacagtatgagaatgcgagtttgtgagttagagaaagaatgttccaacatgagacaagagattgagaaactcggtaagacgacaaaaggtggtggttctgcaagcaatggagtcggtagcaagacttgggaaaacgtttctaagaaactcgggttcggttttaagctgaagtcgcatcaaatgtgcagtgctcaggaaggttctgtgtctaagtctaacaacgagaatgtgaagatagagaagctaaaggatgttaaagagcgtcgtgggaagcataagaaagcttcgagcattagttctgagaggtga

SEQ ID NO: 1693 - DNA, 1704 bp, Arabidopsis thaliana
  Clone ID: AT_F18B3.C1.o120.tg
atggtgaagaagaacaaaacactcatttttttcaatagcttaccaagtgacatagaaatcgaagttgatgatataacatttcatcttcataagtttcctctaatgtcaaaaagcaaaaaacttcaccaactaataacagagcaagaacagagtaaagtttattctcacatcaagctcgagaattttccaggaggttcagagattttcgagatggtgataaagataagctacggtttcaaagtcgacatctctgtttccacagctgttccactccgttgcgccgccgagtatctagaaatgacggaagagtactcaccggagaatctcatttcaaaaacagagaagtttctttcagagttcgtcttcactaacgtacaagaatccatcaaagcgttgaaagcttgtgaatcagtctcgtctttagctgaatcactctgtataacggaacagtgtatagactccatcgtcttccaagcttcctcaaccgatccgtcgtcgttttacggttggccaataaacaacggaggtatattcaccgttgaccggaagaaacagagcaaagattcgaaaacagagctttggttcgaagatctaacggagttgagttttccaatcttcagacgtgtgatcttatccatgaagtcgagtgtcctgagtcctgagattgtagagagatctctacttacttacgcgaagaaacacattccaggaatctcgcgttcatcgtcagcatcttcatcttcttcttcttcttccaccaccatagcttccgagaatcaacaaagagaattattagagacgataacttcagatcttccattaactgcgacgactacgagatctctcttcggtttgttacgagccgcgatcattctcaacgcctccgagaattgcaggaagtttctagagaaaaaaatcggatcgaatcttgagaaagctacgcttgatgatcttctcattccaagttactcgtatctcaacgaaacgttatacgatattgatttggtggagagactcttacgtcgttttctcgaaaacgtcgccgtgtcgtcgtcgtcattgacggtggttgggagattgatcgacggagttctcggtgaaattgcatcggacgctaatcttaaaccggaacagttttataatctggcggttttgcttccggttcaagcacgggtttacgatgatggactatacagagccgtcgatatatatttcaagactcattcatggatattggaggaagagaaggagaagatttgtagcgtgatggattgtagaaaactgactgttgaaggatgcacacacgcggcacaaaacgagcgtttaccactacgagccgtcgtacaagttctgtttttggagcagctacagctccggcaagtaatcactgggactttactgacggaggaagacggtgataaaacggtggtggacttgggtagatggaaggaagcggtgaaggagaatcaggtgcttcgtttggatatggatacgatgaggacacgagtgaaccagctagagaaagaatgcttgtacttgaagaaagtgatcgcgaagatcgacaaagaaagtttgttgaaggcgaagcatggggcggggaaatggtcaatcgggaagaagttcggatgcaaattttcggctcaagtttgtgattcacaggaggcaacgatggtcgatagaagatcacgacgttttcttagttag

SEQ ID NO: 1694 - DNA, 1839 bp, Arabidopsis thaliana
  Clone ID: AT_F17O14.C1.o4.tg
atgcaatcacgtatagatttcttacttatccgatgcataaaggattcgtttttaccatatataaattgcagcatattctcagatgttgcgggagacatcacaattgttgttgatggagagtcctttttactccacaagtttcctttagtggctcggtgtggaaagattaggaaaatggtggcagagatgaaagaatcatcttcaaatctctcgcatacagagctccgagactttccaggtgggtctaagacgtttgaactcgccatgaagttctgctacggcatcaacttcgagatcactatctccaacgtggttgctatccgttgcgcagctggttatcttgagatgacagaggacttcaaagaagagaatttgattgcgcggaccgagacttacctcgagcaagtcgcgtttcgcagtcttgagaagtctgtggaagtcctctgttcctgtgagacgctttatcctcaagacattgctgaaactgctcacattcctgatagatgtgtggaggctatcgctgtgaatgcttgcagagaacagttagtgttagggctgtcacggctgaaccgaggcaccgagtcaggggaactcaagcgaggagatagtcctgagtggtggattgaagacctctctgctctgaggattgactattacgcacgagttgtctctgcgatggctagaacaggcttgcggtcagagagtatcataacgtctttgatgcattacgctcaagaatcgttgaaaggtattcgaaactgcaaggagcgaaccaagctcgattcgggtacttttgagaatgaacagaggaacgtccttgaagccattgttagtcttttcccaaatgacaatgtccctctgagtttcctctttggaatgttgagggtcgggattaccataaacgtagccatctcttgcaggctcgagctcgagcggagaatcgctcagcagctggaaacagtctccctcgatgatctactcatacctgttgtccgagacggagattccatgtacgatgtagacactgtccatagaatactcgtctgctttctgaagaaaatagaggaggaagaagaatatgatgaagattgctgttacgagaacgagaccgagaatcttactggttctatgtgccacagttcattgctgaaagtgggtcggatcatggatgcatacttggcagagattgcaccagacccgtgtctgagtcttcacaagttcatggctttgatagagatattgcctgattacgcacgtgtcatggatgatgggctatacagagccattgatatgtttctaaaggggcatccgtcgctgaacgaacaagaatgtaagagtctctgcaaattcatagacactcagaaactttcacaagaagcatgcaaccatgtggctcagaacgatcggctgccgatgcagatggtggtccgagtcctctactcagaacagctgcgtatgaagaatgtaatgtccggagagtcaggggaagggctattgctgtcttctcagaaacatagtagcgagaacccgagccgagctgtgtctccgagagacacttatgcctcactgaggagggagaatagagagctgaagctggagatttcaagggtgagagtgaggctgactgagttggagaaggagcagattttgatgaaacaggggatgatggagaagtcaggtcatggtggaacattgctgacctcactttccaaagggattgggaggatttcgatatttggtggaggacctacagaagggaagctgcggaatgctaaccgcaaatccaagtcaaggttggagagaaaaaccgttaggagccgaccagagtctatgttttag

SEQ ID NO: 1695 - DNA, 2778 bp, Arabidopsis thaliana
  Clone ID: AT_mqj2.C1.o140.tg
atgcgcaatctcaaactctttgagagatttaaaagcactcaagtccacgcctttactacacaagactctccctctacaagcagcaatggtagccctcgaatgatgaagttccttgggcatcccaaatccaaatctcgttcacttctccctcatggctttcccaccacagacctcctcgagcctcccttggactcttacctcaaacctatcgatttggtggagtcattatcaaatctatatcggagaatcgagtccagttcggaatccgaggcatcgatgctctaccttgagcagtacgctgttctccgcagtctcggtgatgccaagctcttgcgtaggtgccttctcaacgctaggaggcacgccattgatgtcccttgtaaggttgttttctctgcttggttgagattttttaggagagaacatgaacttgtgggagttgaatctatggattgtaatgggcttgcttctgaatgtccgaagactagtttgactcatggttgtgatttgaatgtagacgacgagggttgtgaatgttctacggtatgtgaggatgaatttggtagtgatgacgttaaaatctctaaggctgatgagttttcgggtctagatgaggttagcgatatttccttctgcgtaggttcagagaaggctaagtgtgttaggtcgagaatcgcagcgctttcgcgtccttttgaggccatgttgtatggttctttcgtggaatcaacaacttctgagattgatttctcggaaaatggcatctctattgaggcaatgttggcactcaacatatatagtagaatcaaaagagttgatctgtttcgtgtggaaactgtatttgagctgcttcaattagccagcaaattctgttgcgatgatctgaagtctgaatgtgaggctcgcttggctgcttctgtcactgaccttgataaagctttaacctttgtagagtacgcgttggaggaacgcacaacgcttctcttatctgcttgcttgcaggtgtttctgagagagcttcctcagtctcttcacaatcccaaagtgatgagattcttctgcagttccgaagcaaaagagcaattagcttttctgggttcagagtgtgtgttcctgttgtactacttcctcagccaagtaggcatggaagagaaactcacgacggacactatgctgatattgctagagagaactcgagagtttgctcgtacaaactggcaaaaggctttgtctttgcatcaaatgggatgtgttctgtttgagagaaaggattacaaagcagcccagtttcatttcagattagcttcaagcttagggcatgtctactctttggctggggtatcaagaactgaatataaacaagggaagaggtattcggcgtacaggctcatgaactttctcatctctaatcacaagccacatggatggatgtaccaggagaggtctctgtacaatgttggagttgagaaactaaaagatttagcaaccgccactgaacttgacccgacactgtcttttccgtacaagtacagagccgtaatgaaattcgaacagaagcagattaaagaagccttccaagagattgatagattaattcagttcaagcttagtccagaatgtctcgagctgagggcttggctgtatttagccactggtgaccgggagagttgtttgagagatcttagagcagtgctgtctttagagcccaattatgttgtgtttggtgggaaaatgagagatgatttggtggaggctctgaccgcgcaatgtattgaagtagagagtgaagcggattgttgggtgaggcttttcgatagatggtcagctgtggatgatgttgcgtcgttggctgttgttcatcagatgcttcagaatgatcccagcaaaaactttctgaggtttagacaatctcttcttctcttaagattgaattgtcaaggagccgcgatgaggtgtttgcgaatggcatggaacttggctacttctgaggcagaaaggttggtctacgaagggtggcttttatacgacatgggttatgtggaagaaactcttactaaagctgaggaggcaatctctattcagcgatcctttgaagcatttttcctcaaagcatatgctctagctgacaagaatctcgatgcagacgagatctcttgtgtggttcaggttctagaggaagccctcaagtgtccttcagatgggctacgcaaaggacaggctctgaacaaccttgggagcatctacatcaatttggggatgctagatcaagctgaaaccgcatataagaacgctatagagatcaaacacattcgtgcacgccaagggctggcgcgagtttattttttgaagaaccaacgtaaagaagcttgtgaggagatgacaaagctgatcgagaagtcgtgtagcaaagcagcagcctacgagaaacggtctgagtactgtgaacgtgaaaaagccaaagaagatcttgacatggccacaacactcgaccctctgcgaacttatccctacagataccgagctgccgtgctgatggatgatcagagagagacagaagcagtggaagagctgtcaaaggcgatagctttcagaccagaactgcaaacgctgcatctcagagcagcatttcacgaggccactgggaatctgtcattggccactcaagactgtgaagctgctctctgtttggaccctaaccacaccgagacgctccatctctacagcagatccaaggatcaagcttcttccattgacaacaccatttttggcttagattaa

SEQ ID NO: 1696 - DNA, 1845 bp, Arabidopsis thaliana
  Clone ID: AT_K24G6.C1.o13.tg
atggacaagcatcatcatcaacatcttttattacagcatcatcaacatcttcaccatcatcagaagctctctcttgccaaatcatccagacaaagctgtagtgaatggatctttcgagatgttccaagtgatataaccatagaagtaaacggtggaaactttgctctgcataagttccctttagtctctagaagtggaagaatccgaagaatagttgcagaacatagagattcagatatctccaaagtggagcttcttaatctcccaggaggagcagagacattcgaactagcagcaaaattctgctatgggattaacttcgagatcacttcttcgaacgttgcacagctcttttgtgtctctgattacctcgagatgacggaagagtactccaaagataacttggcttcaagaacagaggagtatcttgagagcatcgtatgcaagaatcttgagatgtgtgttcaagtcttgaaacaatccgagattcttctccctcttgcagatgaactgaatatcataggtagatgtatcgatgccattgcctcgaaggcttgcgctgagcagatcgcttcaagcttttcgaggttggagtatagtagctcagggaggcttcatatgagcagacaagtgaaaagcagtggtgatggaggagattggtggatcgaagatctttcggttctgaggattgatttgtatcagagagttatgaatgcaatgaagtgtcgtggtgtacgtccagaaagtataggagcttctttggttagttacgctgagagagagctaacaaagagatctgaacatgaacaaaccattgttgagacaattgttacgcttttgccagtcgaaaacctcgtggttccgatcagtttcctattcgggttactgagaagagcagtgattcttgatacttcagtttcctgcaggcttgatcttgagaggaggttaggttctcagctcgatatggcgactcttgacgatctcttgatcccgtcttttcgtcatgcaggagacactttgttcgacattgacacggttcacagaatcttagtgaatttctcacagcaaggaggagatgatagtgaggatgaagagtctgtgtttgaatgcgatagtccacattcgccttcacaaaccgccatgtttaaagttgcaaagcttgtagacagttatcttgctgagatagctcccgatgctaaccttgacctttctaagttcttgcttatcgcagaagccttaccgcctcatgctcgcacccttcacgatggtttataccgcgccattgatctctatcttaaggcacatcaagggttatcagattcagacaagaagaaactatcaaaacttattgacttccagaaactctcacaagaagctggagcacacgctgcacaaaacgagcggcttcctctgcaatccatagttcaagttctctactttgagcaactcaagcttcgaagctccttgtgctcttcttactcagacgaagagccaaagccaaagcagcaacaacagcagtcatggagaatcaatagcggagctctcagtgcaacaatgtcccccaaagacaactatgcgtctctgaggagagaaaaccgagaactgaagctcgagttagctaggttgagaatgagactcaacgacctagagaaagaacatatatgtatgaagagagatatgcagaggtctcattcgcgcaaattcatgagcagtttctcaaagaaaatggggaaacttagcttctttgggcatagctcttcaagaggatcaagctctccatcaaagcagtctttcagaacagattcaaaggtactgatggagagaacttgcgcaagcacagattag

SEQ ID NO: 1697 - DNA, 1740 bp, Arabidopsis thaliana
  Clone ID: AT_K8K14.C1.o18.tg
atgaagtttatgaaacttggatccaaacctgattcgtttcagtctgatgaagattgcgtaagatatgtagcaacggagttagcgactgatgtagttgtaattgttggagacgtgaaatttcatcttcataagtttcctcttctttccaaaagcgctcgtcttcagaagttgatagccacaaccacgaccgatgagcaatcagatgatgatgaaatccgcattcccgatatcccgggagggccaccagcgtttgagatatgcgcgaaattctgttacggaatggctgtgactctcaacgcatacaatgttgtagctgtgcgttgcgctgctgagtatctcgagatgtatgaatcgattgaaaacgggaatcttgtttacaagatggaggttttcttgaactctagtgttttgagaagctggaaagactccattatagttctccagacgacgagatcattttatccgtggtctgaagatgtgaaactcgatgtacggtgtttggagtcaatcgctttgaaagctgctatggatcctgcaagagttgattggtcttatacttataaccgaagaaagcttcttccccccgagatgaacaacaatagcgtaccgagagattggtgggtcgaggatctcgctgagctcagcattgatttatttaaaagagtggtttcgactattagacgaaaaggcggtgttttgcctgaggttatcggagaagctcttgaggtatatgcagcaaagagaatccctggtttcatgattcaaaacgatgataatgatgatgaagaagatgtgatggaacaaagatctttgttggagacattggtttcgatgttgcctagtgagaaacagagtgtttcttgtggattcttgatcaagctgttgaaatcctctgtttctttcgaatgtggagaagaagagaggaaagagttaagtagaagaatcggagagaagctagaggaagcaaatgtgggtgatctcttgatcagagctccagagggaggtgaaacagtctatgacattgacattgttgaaaccttaatcgatgagtttgttacacaaacagagaaaagagacgagcttgactgttcagacgacatcaacgacagttcaaaagcaaatgtcgccaagttaatcgatggatacttagctgaaatctccagaatcgaaaccaatttgtctactacaaagttcattacaattgcagaaaaggtttcaactttcccaagacaatcacacgatggtgtgtatcgtgccattgacatgttcttgaagcaacatccaggaataacaaagagtgagaagaaatcatcaagcaaattaatggattgccggaaattatcgccggaggcttgtgctcacgccgtgcaaaacgagaggttaccattacgagtcgttgtacaaatcctcttcttcgagcaagttcgtgccaccacgaaaccttctcttccaccgagcggctcgcacgggagctcaagaacgacaacagaagaagagtgtgagtcagtcacagccacggaggagacgacaactacgacgagagacaagacgagtagttctgagaagacgaaagcaaaaggagttgtaatgtctcggattttctcgaagctttggacaggtaaagataaagatggcgttggagatgttagtagctcagatacatctgaaagtcctggctcagttactaccgtcggtgataaatcgacgccgtcgactcgccggagaaggtcatcgtcttga

SEQ ID NO: 1698 - DNA, 1779 bp, Arabidopsis thaliana
  Clone ID: AT_F15A17.C1.o280.tg
atggcgtttatgagacttggctccaaatccgaagctttccatcgtgaaggccaaacctggctttgcactacaggactcgtgagtgatgttaccattgaagttggagacatgaagtttcatctccacaagtttccgttactatctagaagtgggcttcttgagaggttaatcgaagagtcttcaactgatgatggatcaggctgtgtgttgagcttagatgagataccgggaggcggcaaaacgtttgagcttgttaccaaattctgctacggtgtgaaaattgagcttactgctttcaatgttgttagccttagatgtgcagctgagtaccttgagatgactgataactatggagaagggaatcttgttggtatgactgagactttcctcaacgaggtgtttgggaactggactgactcgatcaaagctcttcagacatgtgaggaagtgattgattacgctgaagatcttcacattatctccaggtgtgttgattcgttagctgtcaaagcgtgcgctgatccaagccttttcaattggcccgtgggaggaggaaagaacgcaacgagcgggcagaacactgaagatgaatcgcatttgtggaatggaatctctgcctctggaaagatgctgcaacatactggtgaagattggtggtttgatgacgcttcttttcttagcttgcctctctttaaaagactcattaccgctattgaagcacgtggcatgaagctcgagaatatagcgatggcggttatgtactatacaaggaaacatgttcctctgatgaatagacaagtaaacatggatgagcaagtgattgagacaccaaatccttctgaagaagaccaaaaaacttgtcttgaagagattgtcgggttgcttccaagcaagaaaggtgtaaacccgaccaagtttcttctcaggctgcttcaaactgcaatggtgcttcacgcaagccaatcctcgagggagaatctggagagacgaattggaaatcagttagaccaagctgctctagttgatcttcttataccaaacatgggatactctgaaacgctttacgatgttgaatgcgtcttgagaatgatcgaacagtttgtttcgtcaacggaacaagcaggcattgtcccttctccttgcatcatcgaagaaggacatttggtgaaggatggagctgatttgctaactccaacaacgttagtggcaactcttgttgacggttatcttgctgaggtggcacccgatgtgaacctgaagctggcgaagttcgaagccattgctgctgcaatccctgactatgcaaggccactagatgatggagtttatcacgcaattgacgtgtacctgaaggcgcatccgtggattactgattcagagagagagcacatatgcagactcatgaattgccagaagctctcattggaagctagcacgcacgcggctcagaacgagaggctgcctcttagggtgattgttcaggttctcttcttcgaacagcttaggctcaggacatctgtatcaggctggttctttgtctctgagaatctagataaccccgataaccaacatggcgctaatggcggtttacttaaacccagaggtgagaacgtaagagaacgggtttctgagctggaaaaggagtgtatgaacatgaaacaagagctgcataagctggtgaggacgaagagaagctggaagaatttcaccaggaagcttaacttcaagaagaaatcagaatgctgcaagccaaaggatcaagcaacaccagcaatttga

SEQ ID NO: 1699 - DNA, 2667 bp, Arabidopsis thaliana
  Clone ID: AT_T10P11.C1.o24.tg
atgaggactttttacccttctgattcttgtaaagaatcacaactcgattccttgaatccacagtcatggcttcaagttgagagagggaagctatcttcctctgcttcttcatctgctccactgtgtagagaatcatttatcaaagttcccgagcctcagatactgccgcattataagcctctcgactatgtagaagttctagctcagattcatgaagaactcgacacttgccctttgcaggagagatcgattctgtatttgttgcagtatcaagtgtttagaggtcttggagagaccaaacttagacggagaagccttcaatcagcttggcaagaggctactactgtccatgagaaagttgtgtttggatcttggttgaggtatgagaaacaaggagaagaagttatcacagatttgctttcctcttgtggtaaatattctgaagaatttgtgccactagatattgcatcctatttcccagctactactgcttcttcccctgaggcagcatctgtgaagacgaaccgcagtgtatctaaaaatgttgtgtttaagataggagaagagaagatagcttgccaaaggcggaaaattgcgagtctttcagctccatttcatgctatgctttatggtaatttcacggaatcgcttcttgatgagatagatatgtcagaaaaccatgtatcctcatcagctatgcgggttgttagagatttcagcgttgttggtgtactaatcggagtttccaagaaccttcttttggaagttttagttttcgcaaacaagttttgctgcgagcgacttaaagatgcatgcgatagagaattggcatctttgatttcttctatggaatgtgccattgagcttatggactttgcacttgaagagaattcccccatcctagcttcatcgtgtctgcaagtttttctttatgagatgcctgatagtttgaatgatgagcgtgttgttgaggttttgactcgagttaatagatctcaagtctcaaccatggcaggaaaagctccattctccttatattcttgtttaagtgaagtctcgatgtgtatagatcctcggtctgacagaacactcggtttcttggagaaattagttgactttgcagaaaatgaccggcaacaagtattggggttccatcggttaggttgtatgaggctattgaggaaagaataccgggaggctgaagaagcttttgaaacagcttttaacttaggccatgtgtattccgctactggtttagcaagactaggatacatccaagggcatcggctttgggcttatgagaagctaagctcggtaatctcctctgtttcgccgcctctcgggtggatgtatcaggaaaggtctttctattgtgagggtgacaagaaattggaagatctcgagaaggcaaccgaattggatccgactttgacatatccttacatgtatagagctgtcacacgaatgtcgaaacaaaatgctaaggctgctcttgaagaaatcaatcggatcttggggtttaaacttgctttagaatgcttagaaattcggttttgtctttatcttggtatggatgactatgaagcggctcttcgtgatattcaggctgctcttacgctgtgtcctgattatagaatgttcgatgggaaagtagctgggaggcagctccagacgcttgtgtatgagcatgtcgagaattggacaaccgcagattgttggatgcagctatatgagaaatggtctaatgttgatgatataggttctctttctgtaatctatcagatgctcgaatccgatgcttgcaaaggtgttctctacttcaggcaatctttgcttctcctaaggttgaattgtccagaagcagcgatgcgcagtttacagttagcccgcgagcatgcctcaagtgaccacgagcgtctagtttacgaaggatggatcttgtatgatacaggtcactgcgaagaagggcttcaaaaggctaaggaatccattggaataaagagatcatttgaagcttatttcctccaagcttatgccttagcagaatctagccttgatccatcgagttcttctactgttgtttcacttcttgaagatgctcttaaatgcccctctgataggttgcgcaaaggtcaggctctgaacaatctcgggagtgtctatgtcgattgcgagaagctagatttagctgcggattgctatataaacgctctcaaggtaagacacacgcgtgcacaccaaggtctagctcgtgtccatttccttagaaacgacaaagctgcagcctacgaagaaatgaccagactaatcgaaaaggctcaaaacaatgcatccgcctacgagaaaagatctgagtattgtgatcgtgaactcgccaaatctgatcttgaaatggtcacccggttagaccctctccgggtttatccttaccgatatcgcgccgcagtgttgatggatagtcggaaagagagagaggctatcacagagttatcccgagctatcgcctttaaagcagatcttcatcttcttcacttacgagcggctttccacgagcatatcggtgatgtcacgagtgcgttgcgggactgtcgtgcagcgctctcggtcgaccccaaccatcaggagatgctcgaactccatagccgtgttaatagccatgaaccttga

SEQ ID NO: 1700 - DNA, 264 bp, Arabidopsis thaliana
  Clone ID: AT_MOD1.C1.o18.tg
atggcatcacaaaccaacaaagagcttttcgtgggtggacttgcaaggattttgaaagaacagcgacaagtcgatgtccggctgaaggcaggggacagcgatcagaagggtgtatctatatctgctcataagcttgttctgtctgcaagatctgaggtgtttaagatgatattggaaacagaagagatcaaggctacaactacgctagacacaatcactctctcagagctaaaacacacagagttagtggctttggttgagtga

SEQ ID NO: 1701 - DNA, 1767 bp, Arabidopsis thaliana
  Clone ID: AT_F20C19.C1.o23.tg
atgaagttcatggaattagggtttcgacctgacacattctacactgtggaatcagtaaggtctgtgtcttctgatttattgaatgatcttgtaatccaagtcaaatccacaaaataccttcttcacaagtttccgatgttatccaaatgcttacgtttaaagaacttagtctcttcacaagaaacagaaacctctcaagaacagcaagtcattcaacttgttgattttcccggtgaaacagaagcttttgagctttgtgctaagttctgttacggcatcacaatcactctctgtgctcacaatgtagtcgcggtacgttgcgcagcagagtatctagggatgacggaagaagtggagctcggagagacggagaatcttgttcagagacttgaacttttcttgactacttgtgtgttcaagagttggagagattcttatgttactcttcagactacaaaggttttgcctttatggtctgaagatcttgggatcacaaaccgatgcatcgaggcgattgctaacggtgtaactgtatcccccggagaggatttttcgacacaattggagacgggtttgttgagaaaccgatcaaggataagaagagatgaaatcttgtgtaatggtggaggaggaagtaaggcagagagtttgaggtggtggggtgaagatttagctgaattgggtttagatctttaccggagaacaatggtggcgataaaatcatcacaccggaagatatctccgcggttaatcggaaatgctcttaggatatatgcatctaaatggctaccaagcatccaagaaagctctgcggattcaaatcttgttttggaatcggttatttcacttctaccagaggaaaaatcctctgttccttgcagtttcttgcttcagctactgaaaatggctaatgttatgaacgtttcgcattcttcgaagatggaactcgcgataaaagccgggaatcaactggataaggcaaccgttagcgagctgttgatacccttatcggataagtctggtatgttatacgatgtggatgttgtgaagatgatggtgaagcagtttttgtcacatattagtcctgagataaggccaacaagaacaagaacagaacatagaaggtctcgttctgaagaaaacatcaatttggaagagatacaggaggttagaggatctttgtctacttcttcttctcctcctccattgttgagtaaagtagcaaagcttgttgattcttatcttcaagaaattgctagagatgtgaacttaacagtgtcgaagtttgttgaattggctgaaacaataccggacacttcaaggatttgtcacgacgatttatacaacgcgattgatgtctatcttcaggtacataagaagattgaaaagtgtgagagaaagaggttgtgcagaatcttggactgcaagaaactatcagtagaggcaagcaagaaagctgcacaaaacgagctgcttccattgagagtgatcgtgcaaatcctcttcgttgagcaagcacgggccacactagctacaacaagaaacaatatcaccactaatgaaacagcagttttgaagagaagctttacaacgagaagagaggaaggaggacaagaagaagaagaaagagatgaaactaaaccaagtggagggtttcttcagagcacaccttcgaggtttatggcgttgtgtgcgatcccgagacagcctaaaaagctgctgtgcaagttgttgtcgatcagtaggagtttaagtcaacgaatttaa

SEQ ID NO: 1702 - DNA, 579 bp, Arabidopsis thaliana
  Clone ID: AT_T24H24.C1.o21.tg
atggggacacaaacaaacaaagggtttttctatgatgaatttctgaaggttctgaaagaacaacaagtcgatgtaaggctaatggcacgggacagtgagaaggatgcagctatctctgctcataagcgtattctgtctgcaagatcagaagtgtttgaggagatgtttgaatcagataaatacaaagcttcgtccaagctggagacaatcactctctcagagatgaaacacgaagtgttggaggctttcgttgacttcacctacagcgacggctctatgctttcagagaaagctaagcaacacgctatgtcactctatagcgcagccaaagattatgaaattccgcgtttatggtgcttatgcagaaaggagcttatagcatctcttaacatgtcgaatgctcttcgagttcttcagctcgcccaaattccatatgacgaatccctcagtgtcgcggcattcaccactatcaaaaacagcaaacttaagctttctagctctactaaggtcaaggttttcgtcgtcaatcacccgaatggtccccttgagataacgagggctatttttcctcgtaattga

SEQ ID NO: 1703 - DNA, 990 bp, Arabidopsis thaliana
  Clone ID: AT_F20N2.C1.o5.tg
atgactgattctgcttacagagtagacaccatttctagactcgcccaatggcgaatccacaatctttcttcctccacttaccgcaagtccgatcctttcaagatgggtctttggaattggcacttgtctgtggagaaaagcaagatgctattaaatgttaagttgtatccagaggtatcaaaccttaccagagaaaatccaccggttgcttcctttgctcttcgtgttgtctcttctactggtgagagaaaggctctatctcatccagaagtaatagataagcggattaagacaaacgaagattttatttggactattgaagttcccttaactgggaaaatcatcatcgacgtcgagtttcttgacttgaaggttttgtctcaagatagtggagaactttactctatctgggccaacggttcaactgagaatcaatcgcaagtaactgcggtaacatcccttggacgtatgttgacagaaagcatttacaccgacataacgatcaatgcctctgatggaagcattggagctcaccgagcagttctcgctgcccgttcacctgttttccgcagcatgtttttacacgacctgaaagagaaagaactatcagaaataaacgtactcgacatgccacttgatgcttgccaagcttttctcagttatatctacggcaatatccaaaacgaagactttcttatacacagattggcactcctccaagcagctgagaaatatgatattgctgatttaaaagaggcgtgccacttgagtcttctagacgatatcgacacaaagaatgtgcttgagaggctacagaatgcttatctctatcaattacctgaactgaaggctagctgcatgagatatcttgtgaagtttggcaaaatatttgagatccgagacgagttcaacatattcatgcaatgcgcagacagagatttgatttctgaaatcttccacgaagtcctcagtacctggaaaggattttag

SEQ ID NO: 1704 - DNA, 1236 bp, Arabidopsis thaliana
  Clone ID: AT_F23N14.C1.o80.tg
atgaccagaaccagcggatcatcaagccccaacacgattccagaccaaatcgaatcaccaacaagctcaagatcggtgacgcagacgacaaacggatcgcaccaattcgtgatacaaggatacagtttagctaaaggaattggtgtagggaaacacatagcaagtgataatttctccgtaggaggttatcaatggactatcttcgtctaccctgacggtaaaaatccagaggataactcttcttacgtctctgtgttcatcgttttggctagtgaatgtactgaagttagagcgctttttgagctttctcttgttgatcaaagtggtaaagggaagcataaggttcatagccattttaatcgttcacttgatggtggtccttatacgcttaagtacagaggaagtatgtggggatacaagcgtttcttcagacggtccttgcttgagacatctgactatcttaaagacgattgcttgaaaattaattgtacagttggagttgtcgtttcagaaatgcattgcccacggttactctcgattcatgtcccagactcagaacttggatcacattttggaaagttgctggatactttacaaggctcggatgtcacatttgacgttgccggtgagaagtttcaagctcataaattggttttggctgcacgatctcagtttttcagatcaatgttttacaatactctagcagagaacaacagcgacgtagtgatcagcgatttggaacctaaggttttcaaggccttgttacacttcatgtataaagattccctcccaggagatgtggaaccattaacggctcattcatttgacctattaaggccgtccgaaatagatgatacactgattgtaaagcttctggcagctgcggaaatgtacaatctgagtaggctcagattattgtgtgaatctcacatctgcaaaggcatatctatcagctccgtgtccaagatcttagctttatccgacaaatataatgcatccgaactaaaaagcgtttccttaaaattcactgcagaaaacctagcagctgttctgcagacaaaagcatatgaagatctgaaggatgactgtccaaacctccagtctgagctactaaaggcggtcgctggttatgacgacacaagtagcagcggaggaggaaagtctcagagtgtttgggctcaactctctaacggtggtgagaccagtagccgaagggtcaggcagcgaaccacttag

SEQ ID NO: 1705 - DNA, 849 bp, Arabidopsis thaliana
  Clone ID: AT_F18O21.C1.o190.tg
atggattgctcaatctgcaccacaatgccatctatattaagaccaccaagaaacacaatatgtggatcatgctacgaaggggctagaacaacaattgcgctgctcaagaaacttgagggctcgaaagaagatcgtcatgacaaatcgaaccataattccaccatcaataatggctcctctatttcttcgtctcctttgttttcttgtgagccgcaaccattagagaaggtgatcaaatggatgaaaaacatgaaagaaaccgaagaagaacagaagaaaagaatagtcttcttaagcagctttgtgtcgggtttcaaagaacagcttcatgctgatattcttctaaaaccgggcgatgatggccctccaattcctgcacatagagctttgctggcttcaaaatctgagatctttaagaacattctagactcagatggatgcaaaaccgctccagaatacgccataacgctccaagaactaaattccgagcaacttcaagctctcttggagtttctatacaccggtacattggcttcagataagttggagaaaaatgtctacgcgttgtttattgcagcagataagtacatgattcattacttgcaagagttgtgcgagcaatatatgttaagttccttggacatctctagtgttcttaacgttcttgatgtctcggatcttggttcgagcaagacgctgaaggaggcttgtgtagggttcgtggtgcggaacatggacgacgtcgttttctcggataagtacgaacctttctctcagaaaaaccaacatctatgtgtggagatcacaagggcgttcttgatggaaacgagaagcaagagacgtgactaa

SEQ ID NO: 1706 - DNA, 1641 bp, Arabidopsis thaliana
  Clone ID: AT_T3F17.C1.o9.tg
atggattccaatttctctcgccatggttcttcctccgaaggtgattttggtttcgctttcaatgacagtaacttctccgatcgtttgctccggatcgagatcttgggtgggccttcggattctaggtctgatgctgaaggatgtacgagtattgccgattgggctcgtcatcgcaagaggagaagagaggacaacaagaaggacaatggtgttgcgatttcagacattgtggcatgtgctgaagaacagattttaaccgataacaaccaacctgatatggatgatgctcctggtggtgataatcttgacgatgaaggagaggcaatggttgaagaggctttatcaggtgatgatgatgcatctagtgagccaaactggggtattgattgttctactgttgttagagttaaagaactgcatattagttctcctatcttggccgcaaaaagcccctttttctacaagctgttttctaatggaatgagggaatcagaacaaagacatgtaacccttagaattagtgcacaagaggaaggtgctttgatggagcttttaaactttatgtatagcaactctctaagtgtcacaacagcacccgctttattagatgttcttatggctgctgacaagtttgaggttgcttcctgtatgaggtattgtagtagactactgcgaaatatgcccatgacccctgattctgctttgctctatcttgagctgccctctagtgttttaatggctgaagcagtgcaacctctaaccgatgcagcaaagcagttccttgcctcgcgctacaaggatattaccaagtttcatgatgaggttatggccttaccattggctggaatagaggcgatactatcgagcgatgatctccaaattgcttctgaggatgctgtttatgattttgtcttgaaatgggcaaggggacagtatagttcattggaagatcgtagagagattctgggttcacgccttgcactctacatccgcttcccatacatgacgtgtcgaaagctgaaaaaggtactaacgtgcagtgattttgagcatgaagtagcatcaaagcaagtattagaagcgctcttcttcaaagcagaagccccacacaggcaacgcatcctcgcagctgaaggatcggactccatgaaccgccgtttcatagagagggcttacaaatacagacccgtaaaagtggtggagtttgagcttcctcgcccgcaatgtgtagtgtacctggacttgaagcgagaggaatgcgcaggactattcccttcaggaagagtctattctcaggctttccacttaggaggtcaaggtttcttcctctcagcacactgcaacatggaccagcaaagctcgttccactgctttgggctattcctcggaatgcaagagaaaggggctgtgagttttggtgtggactacgaatttgcggcaagagataaaagtacaaaggaagaatacgtaagcaaatacaaaggaaactacacattcacaggggggaaagcggttggttacagaaaccttttcgggattccatggacttcgttcatagccgaggacagtcaacatttcatcaatggcattctccatctcagagccgagctcaccattaaacgttcctcagacctgcactga

SEQ ID NO: 1707 - DNA, 1662 bp, Arabidopsis thaliana
  Clone ID: AT_F22D1.C1.o170.tg
atgtcagaatcagtgattcagggatcgaatccggatcgggttttatctccgacgagctcgaaatcagtgacgcagacggtgaacgggtcgcatcaattcgtgattcaaggatacagcttagcgaaagggatgggtatagggaagcacatagcgagtgataatttctccgtcggaggttatcagtgggggatcttcttctacccggacggtaagaatccggaggataattcgtcgtacgtctctgtttttatcgcattggccagtgaaggaaccgaagttagggcgcttttcgagctagctcttgttgaccaaagtggaaaggggaaacataaggttcatagccattttgagcggtcactcgatggtggcccttatacactcaaatacagaggaagcatgtgtttctctattgatgaatcctgggcttacttggaagtgacagccatagctgataggggatacaagcgtttcttcagacgttccattcttgagacatctgactacctgaaagacgattgcttgataatcaattgtacggttggagttgtggtttcagaaatactctgcccacagttacactctgttcacgtccctgattcagaacttggatcacattttggagttctactggatagcatggaaggttctgatataacttttaacattgctggcgagaagtttctagctcataaactagtactggctgctcgatctccatttttcaagtctaagtttttcagtgagtttgaagcaaacaatacagaggttactattaacgatttggaacctaaggtttttaaggctttgctacaattcatgtacaaagattctcttccggaagatgtggagcctgcaacagctcatacatttgagcgcttaaagctgtcagaaatatacgaaacattgattgtaaaagttttagcagcagccgacaagtacgacctgattaggctcaggttgttgtgtgaatcccacatctgcaaaggcgtatcagtcaaatccgtcgcgaagatcttagcgttggctgacagatataatgctaaggaactaaaaggcgtttgccttaagtttactgccgagaacctagcagctgtcctggagacagacgcttaccaacagatgaaggatgaatgtgtgaccctccagtccgagcttctgaaggcggtggctggtcacgaggaagccgacatgttagacaacgaaccacctagagcctcaaaatatgcatcatttcctcaggttaatagtagccatagagaggtccaacagcctccggctattatagaggaggttggttggcttttcactggcggtgttggctccctcagcaacgtcggccagttttctctccggcaacgatggctccgtagcaccgtttggctggctcctcttgtatgcggcatgttttcggctttctatgcgatggtgtccgcttttgtctctggtcattccaccgtcatctttccggtggttttggccagttatgtaccggtgttagatccgtttcgattactttataccggcgaaaaatcagaagaatctatgtcgattgttatcggttgtgattccttcttcaccggaatcggtgctcggacgacaaaggaagaagtcggttcacttttaggcttctcatctcacacgtataggtctttctcctattga

SEQ ID NO: 1708 - DNA, 1581 bp, Arabidopsis thaliana
  Clone ID: AT_F3A4.C1.o50.tg
atgttggagaaactttcgtttttactccacaagtttccacttgtttcaaaatgtgggtttataaagaaacttgcttctgaatcaagcaatgattccaacattatcagaatcccagattttcctggaggtgcagaaggatttgagctagtcatcaaattctgctacgacataagcttcgagataaacacagagaacattgcgatgctactatgtgcagcagagtatctagagatgacagaggaacactctgttgaaaacctagtggagacaatagaggtttacttaaacgaagtgatcctcaagagtttatcaaaatcagttaaagttctgcaaaaatctcaagatttgttgcctatagccgagagagtgagactcgtggaccggtgtatcgattcaatcgcttatgcaatatgccaggagagccagagcaatgaggatatagttgactggtgggctgacgatttagctgttctaaagattgatatgtttcgacgtgtcttggtcgcgatgatcgctagagggtttaagagatactcacttggtccagtacttaaactctatgccgaaaaagctcttagagggttggtgagattcttgaattttttaacagaacaatgtgacatttttgggaaagaggcaaagaagatggaggcagaacaagaacatgagaaaaggttgatccttgaaacaatagtgagtcttcttccgagggagagaaactcagtgtcagttagttttctttcgatacttttaagagctgcgatatacctcgaaaccacggtagcttgcaggcttgatttggagaagagaatgggattgcaattaagacaagctgttattgatgatctcttgattccttattattcattcaatggagacaacacaatgttagatgttgatactgttcaacgtatcctcatgaactatcttgagtttgaagttgaaggaaactctgctgattttgctagtgatattggtgaattaatggagacttatctggctgaaatcgcttctgatagaaacataaacttcgcgaagttcatcggttttgctgaatgtattccgaaacagtctaggatgtatcgagccattgacatcttcctcaagacacatccgaatataagtgaagtggagaagaagaaagtttgtagcttaatggactgtaaaaagctatcgcgagatgtgtatgctcacgcagctcaaaacgatcgtttccaagaaaatttaagcaattcagattctccagcaccagcaacagcagaaaaaactctttctcctcctgagctcagctcctacaagaatgaactctccaaactaaaccgggaaaaccaatacttgaagcttgagttgctcaaagtgaaaatgaagttcaaggagttggagaaggagaaagcttttgaagtcatgagtggttcggattgttcttcttcggtttcaactgcttcggtggctaagcctcgattacctagaaagtcatttataaactctgtttctcaaaaactcggaaagcttattaacccttttggcctcaaacaaggacaaaccaaacaacctaaaagcagaagacactctatatcttaa

SEQ ID NO: 1709 - DNA, 969 bp, Arabidopsis thaliana
  Clone ID: AT_F3F20.C1.o14.tg
atgtctagtagtaccaagaacattccaaaacctcctcctcttccttgtattacctaccagcgttttcaatctagtacaaggaaaccttcgagcttaatgcgccttgtgcctaaagaagcacttgaaacttgggataagcttttcaaggaaggatctggagcagatacatatgttgaaaccgataacaagtctcactttcctgcccattcaagtgtcctggctgcagcctcaccagttatagcgacacttctgaatcaatcgagggataagaatgggaatacatacctcaaaatccatggagttccttgtgaagcagtctacatgttcattaggtttctatactcttcctgctacgaggaggaagaaatgaagaagtttgtgctccatttattggttctgtcacattgctactcggtcccatctcttaaaagactttgtgtagagattctcgatcaaggatggattaacaaggagaatgtgatcgatgtgcttcaactagcgagaaactgtgacgtgacaaggatttgctttgtatgtctttccatggtcatcaaagacttcaaatctgtatcttcaacagagggatggaaagtgatgaaacgctctaatcctttgctcgaacaagagctcattgaggcagtcatcgaatccgacagtaggaaacaagaaagaagaagaaaactggaggagagagaagtgtatttgcagctctatgaagccatggaagctcttgtccacatatgtcgtgaaggttgtgggacaattggacctcgcgataaggcccttaaaggaagccataccgtgtgtaaattcccggcgtgtaaagggcttgaaggtgcgctcagacatttcttgggatgcaagtctagggcttcatgttctcattgcaaaaggatgtggcagcttcttcagcttcactcttgtatctgtgatgattctaattcttgcaaagtttctctctgctggtaa

SEQ ID NO: 1710 - DNA, 1227 bp, Arabidopsis thaliana
  Clone ID: AT_T5I7.C1.o6.tg
atgagtaccgtcggaggtatagagcagttgatacctgattccgtttcaacgtcgttcatcgaaacggtgaacggttcgcaccagttcacgattcaaggttactctctagccaaaggcatgagccctgggaagtttatacagagcgatatcttctccgttggtggatacgattgggcgatttacttctatcctgatgggaagaacccggaggaccagtcctcgtatatctctttgttcatcgctttagcgagtgattctaatgatattagggctttgtttgagcttacgcttatggatcagagtgggaaagggaaacataaggtgcatagtcactttgatcgggcgcttgaaggtggtccttatacacttaagtataaaggaagcatgtggggttacaaacgctttttcaaacgatcagctttagaaacctctgactacttaaaggatgattgtcttgtcatcaattgtactgttggcgttgttagagcccgactcgagggtccaaaacagtatggcattgtgctacccctgtcgaatatgggtcagggattgaaagacttgttagattctgaagttggttgtgacatagctttccaagtcggagatgaaacatacaaagctcacaaactgattctcgcggcacgctccccagtttttagagctcagttttttggaccaattgggaataacaatgtggatagaatagtgatagacgacatcgaaccttctatcttcaaggctatgcttagcttcatttacaccgatgtacttcctaatgtgcatgaaattaccgggtcaacttctgccagttcgtttacaaacatgatacaacatctcttggcagctgctgacctctatgaccttgcaaggttaaagatattatgtgaagttttgctatgcgaaaaacttgatgttgataatgtggcaacaacacttgcgttggctgaacagcaccaattcttacagctcaaagcgttctgcttagaatttgttgcatctccagcaaacttgggagctgtaatgaagtccgaagggttcaagcacttgaaacagagctgtcccactttgttatctgagttgctgaacactgttgcagcagcagataagagctcgacgagtggacaatcaaacaagaaaagaagtgcgagcagtgtattagggtgtgacactacaaatgtgaggcaattgaggaggagaacacgaaaagaagtgcgagcagtgtcttag

SEQ ID NO: 1711 - DNA, 1098 bp, Arabidopsis thaliana
  Clone ID: AT_F19F18.C1.o100.tg
atggacgatttctcaccggagaatgttttagcaccaccaccaccacctcctccaatgaagaagtcaacggatctgtttatgcaaagaagcaatagctttgtttctaaagctacgagagattcatgggatcgtatgttcgacgaagctcatggagctgatgttttgattcatactgatgataatggtttgatttacgcacattctaatgtcatcggaatggcttcagatgtaatcagaggaatgatgaagcaacataagagaaaatctcatcgtaaatcgatttcaatcctcggtgttcctcaccacgctcttcgagttttcattcgattcttatactcttcttgctatgagaaacaagatatggaggattttgcaatacatctacttgtgttatcacatgtctacgttgtaccgcatttgaagcgagtctgcgaatcagaattcgaaagtagtttgctcaacaaagagaatgtgattgatgtgtttcagctagctcttctatgtgatgctcctcgtctcggtcttctctgtcatagaatgattctaaacaactttgaagaagtttctacttctgaaggatggcaagcaatgaaagagagccatcctagacttcaaaaagagcttttacgctctgtcgcttacgagcttaatagcttgaagcaaagaaacaggaaacagaaggagatacagacttatacacagctctatgaagcaatggaggcttttgttcatatatgtagagatggatgcagagaaataggtccaacaaagaccgaaaccccgcatatgtcatgcggatttcaagcgtgtaatggtttagagcagctattgaaacatttggcgggatgcaaactaagatcaatccctggtggttgtagccgttgcaagagaatgtggcagcttcttgagcttcattcgcgcatttgcgtagactcggaacaatgcaaagtccctctttgcagtagtttgaaagagaggatgaagacacagagcaggaaagatgagaaaagatggaaacttttggtgaggaatgttttgagcaccaagagaattggaggatctccattctttttgcaagcaattgatgttactttatga

SEQ ID NO: 1712 - DNA, 2121 bp, Arabidopsis thaliana
  Clone ID: AT_T19L5.C1.o20.tg
atggagaaccatcccaagcgccagcgaacaacacgcctcgccgccagaaacttgaagcgaaaactcagtcacaacacagatggagcgccaatcgtcacacaacttattgatattgacgacgaacccatagatctcgtcgtcgcgattcgccgtcacgtcgaggttcttaactccagcttctcagatcctgattttgatcacgaagctgtcaaagaagctgctgctgatatcgccgatttggctaaaatcgatgaaaatgttgaaatcatcgtggaaaatggagcgatccctgctttggtgagatatctggaatcccctttggtagtttgtggcaatgttcccaaatcttgcgagcacaagctagagaaagattgtgctcttgctcttggacttattgctgcgattcagcctggttaccagcagcttattgtggatgctggagccatagttcccaccgtgaagttgttgaagagacgtggggaatgtggtgaatgcatgtttgctaatgctgttattaggagagccgctgatataattactaacattgctcatgacaatccaaggattaaaacaaatataagggttgaaggtggcattgcaccacttgttgagcttctcaattttccggatgttaaagtacagagggctgcggcaggggccttgcgaacagtttcatttagaaacgacgagaacaagagtcaattgaatgctttacccacacttgtattgatgcttcaatcacaagattctaccgttcacggggaagcgattggggcaattggaaatcttgtccactcatctcctgacatcaagaaagaggttatccgtgctggtgccttacaaccagtaattggtctacttagctccacttgtttggaaacacagagagaagcagcattattaataggtcaatttgctgcgcctgattcagattgcaaggtgcacattgcccagagaggtgccattacaccactgattaagatgcttgaatcatcagatgagcaggtcgtggaaatgtcagcttttgctcttggtcgtttggctcaggacgcacacaatcaagctggcattgcacatagaggaggcatcatctcactactaaatcttcttgatgtgaaaacggggtctgtgcaacacaatgctgcctttgctttgtatggccttgcagataacgaggaaaacgtagcagatttcataaaggctggaggtattcaaaagcttcaagatgacaactttactgtccaaccgactagagattgtgtggttcggacattgaagaggctgcagaacaagattcacggacctgtactaaaccaattattgtacctaatgagaaccgctgagaagacagtacaaatacgaattgctctggctcttgcacatctttgtgaccctaaagatggaaaattaatctttattgataacaatggagtagagtttttgttggaacttctctatttctcaagcaataagcagcagagatatagttcaagtgctttatacgagttagctaaaaaagctacatcctttgcaccagaggattcagctccttgttcacccacacaacaggtgtttctgggtgaaaaattcgtgaacaaccccactatgtccgatgtcacattcctaattgatggtaaacaattctatgcacacaagattggcttggtagcttcctctgatatatttcgtgcaatgtttgatggtctttacaaggaacgcaatgctcaaaatgtggagataccaaatataagatgggaagtgtttgagcttatgatgaagttcatttactcaggaagaattaacatcgccaaacatttggcaaaagatctgcttgtagcagctgatcaatatcttctcgaaggtctcaaacgtcaatgtgaatacaccattgcacaggaaatctgtctggataacataccagagatgtatgagttagcagatacattcaatgcttcagccttaagaagagcttgcacgctctttgttcttgagcatttcactaagctcagctctcaattatggtttgcaaagtttgtcaagcaaattatacctgaaattcggagttacatgactgatattctcacacggccggtcgaagctagtcccccaaccgtcgtataa

SEQ ID NO: 1713 - DNA, 1911 bp, Arabidopsis thaliana
  Clone ID: AT_F7K24.C1.o80.tg
atggaccaacaaccggagaggcgagaaggccggagttttccggagcgtaaaggacagaagcggaagctagaggaaggagccgccgccgtagaagatcgagagatctctgccgtcagcaccgacggaggccaagcgcttcttagcgaggttgctgctcaagtctcggtactaaactctgccttctcttggcaagagtccgatcgcgctgctgccaagcgagccactcaagttctggctgagctagccaaaaacgcagaggatttagtgaacgtgattgtcgacggaggtgctgttccagctcttatgacgcatctacaggcgccaccatacaacgacggggacttggctgagaagccgtacgaacacgaagttgagaagggaagcgcttttgcgcttggtcttcttgctattaagccagagtatcagaaactgatagtagacaaaggtgccttacctcatttagtgaatttgttgaagagaaacaaagatggttctagctctcgagctgtgaatagtgttatcagaagagcggctgatgccatcaccaatcttgctcatgagaacagcagtatcaagacccgtgttagggtagaaggcggtattccacctctcgtggagttgcttgaattttctgattcaaaggtccagagagcagcagcaggggcattgagaacccttgcatttaaaaatgatgataacaagaatcagatagttgaatgcaatgctcttcccacacttattctaatgctaggatcagaggatgctgctatacattatgaagcggttggagttataggcaatctagtacactcgtctccacacattaaaaaagaggttcttactgccggggcgttgcaacctgtcattggtcttcttagctcctgttgccctgagagtcaaagagaggcggctttattacttgggcagtttgcctcaactgattctgattgtaaggtgcacattgtgcaaaggggtgctgtccgtcctttaattgagatgcttcagtccccggatgtccagttgaaggaaatgtcggcctttgcactgggtagattggcacaggatgcccacaatcaagctggtattgcccatagtggtggtttaggacctttattgaagcttctcgattcaagaaatggatcattgcaacacaatgctgcatttgctctttatggccttgccgataatgaggataatgtgtcagattttatcagggtgggaggtatccaaaagctacaggatggagagtttattgttcaagttctgagacatctgttgtacctaatgcgcatttcagagaagtctatccaaagacgagttgctcttgcccttgctcatctctggttggagttgctactcggtcttcttggttctttaaacactaagcagcaacttgacggtgcagcagcgttgtacaaattagcaaataaatctatggcactttctccagttgatgctgctcctccttctccaacacaaagggtttatctcggagagcaatatgtaaataatgctacgctgtctgatgtaacctttctagtcgaagatgcatttcgtgcaatgtttgatggtggttacagagaaaaagacgctagagatattgagattccaaatatcaaatgggaggtgtttgagttaatgatgaggtttatatacactggatctgtcgacataacaaatgagatatcaaaagatcttctaagagcagcggatcagtatctcttggagggcctgaaacgactctgtgaatacacaattgctcagtacttaacgaaatctgacacggttactttgaatatgaaaggatattacgttggaaagtataggagacatgtacgagctatcagaagcattccatgcgatgtcgctgaggcaagcttgtatcatgttcatcctggagcatttcgataa

SEQ ID NO: 1714 - DNA, 1584 bp, Arabidopsis thaliana
  Clone ID: AT_F2N1.C1.o11.tg
atggatctctcactctccggtggtgattttaggtttgctttcaacaacgttaatttttctgatcgtcttcttcggatcgagatcacccaaagcagcggtgagggtgaggttatctgttctagtatcgtcgattgggctagagatcgcaaacgcagaagagaagatgtcactaatcataccaatgatgctacatgtcacgtggagtctgatttaaacaaaaattcgtgtgagatagttaatgagaacagcaacaacaaaacacaagtattggtaactgcggctgaacaagaaccaaaatcaggtggtgaagatgagaatgagaggctcactaataataatacttcagttctaagtgttcaagagttacatataagctctgcaattttggcagccaaaagtccatttttctacaagctattctctaatggaatgcttgagtcggagcaaaaacaaatgaccttgaaaatagatgcctctgaggaaactgctgtaatggagctcttgaaattcatgtatagcaattcactatcagtcactgcgtcctctgctttactcgatgtgttaatggtggccgacaagtttgaggttgcttcatgtatgaagtattgcagccaattgttgctcaaaatgcctatgacattagaatcttcattgcttcttcttgatcttccttcaagtttgctaatggctgattcagtgaagcctttaaccaatgctgcaaggcaattcatagcctctcgttacaagaatatgtccaagattacaatggaggagttgatggctttaccgttagtaggtatcgaggcgatactagcgagtgacggtctagagatccaatctgaagacgttgtatatgaagttgtcttgaaatgggtcaagtcacattactcagttctagaagcacgccaagaagtactaggctctcatctcgctcgctatatacgtttccctcacatgacaactgacagactcaagaaaatattgacctcaaacgactttagaccttctgtggcatcaaaacttgttgttgaagctctcttcttcaaaacagaatcgttggctcaccaacacgttctactagcccatgaacaacctgcctcaaccagccgccggtttgctaaacgagcctatgtacacagacccatcaaaattgtggaatttgcggttcctcggccccaatgcatcatatatttggacttaaaacgcaaagaatgtgaaagcatctatccatcaagcaggatatcatctcaacagtttaccttaggaggacaagggttctttctttcagctcaatgcaacatggaccatctttgtttaatccattgtttcggattgtttattgggatgcaagaaaacgggtcagcgagtgcgagcgtgactgtggactacgatttttcagtgaggtcgaagccaacgatggaatttgtgggaaaattcaaaggaatctatacgttcactagaggtaaagctgttggatgcagaaacttgttaggtataccatgggatattttcacagccaagaattgtccctacttcatcaatgatgttcttcatctccgggctgatctctccatccgcctttag

SEQ ID NO: 1715 - DNA, 1638 bp, Arabidopsis thaliana
  Clone ID: AT_F2A19.C1.o200.tg
atggatcctgacttcactcgtcatggttcttcctccgacggcgattttggattcgcttttaacgacagtaacttctctgatcgtttgcttcggatcgagatcatgggtggaccttcggattctcggtctgaagttgaagggtgtacgagtatcgctgattgggctcgtcatcgcaagagaagaagagaagatatcaagaaggaatctggtgtcacgatttcagacattgtggcatgtcctgaggagcagattttaactgatgaacaacctgacatggatggatgtcctggtggtgagaatcctgatgatgaaggaggagaggcaatggttgaagaagctttatcaggtgatgaagaggaaacgtctagtgagccaaactggggaatggattgttctacagttgttagggttaaagaacttcatattagttctcctattttagctgccaaaagccctttcttttacaagttgttctccaatggaatgagggaatctgagcaaaggcatgtcacccttaggattaatgcatcagaggaagctgctttgatggagcttttaaactttatgtatagcaatgcggtatctgtcaccacagcacctgccttattagatgtgttgatggctgctgataagtttgaagttgcctcttgtatgaggtactgcagtagacttctccgtaatatgcctatgactccagagtctgccctgctctatctcgagcttccctctagtgttctaatggccaaagctgttcagcctttaactgatgctgcaaaacagttccttgcagcccgctacaaggatattaccaagtttcatgaggaggtaatgtctctacctttggctggaattgaggcaattctatcaagcgatgaactccaaattgcatcagaggatgcagtttatgattttatcttgaagtgggcaagggcgcaatacccttgtttggaagagcgaagagagattctcgggtcacgccttgcactctccatccgcttcccattcatgacatgccgaaagctgaagaaagtgctgacttgcagtgactttgagcatgaaatagcatcaaagcttgttctagaagctcttttcttcaaagcagaagccccacacagacaacgtagcctagcctccgaagaatctgcatccctgaaccgccgcctgatagagagggcttacaaatacagacccgtcaaagtggtcgagtttgagcttcctagaccgcagtgtgtagtctacctagacttgaaaagagaagaatgtgggggactgttcccgtcgggtagagtgtattcgcaggcctttcacttgggaggtcaagggtttttcctgtcagctcactgcaacatggaccaacagagctcgttccactgtttcgggctgttcctagggatgcaggagaaagggtcggtgagtttcggagtggactatgaattctcggcaaggtcaaagcccgcagaggatttcataagcaaatacaaagggaactacacattcacaggagggaaagcagtaggttacagaaacctgtttggggtcccatggacgtcttttatagcggaagatagtcaatacttcatcaatggcattctccatctcagagcagagcttaccatcaaaaggtctacagatccttag

SEQ ID NO: 1716 - DNA, 675 bp, Arabidopsis thaliana
  Clone ID: AT_MJE7.C1.o15.tg
atggcaactccaaccaacaaagagcatttctcgggtggacttgcaaaggttttggcagaaaaatggcaagttgacgtaatgctcaaggcaaagaatagtgatgagggttcagctatctctgcccacaaacttattctggcatcaagatcggaggtttttaagaatatgttcgaattagacgagttcaagacttcgactaaacatgtggaaacaattactctttcagagatgaaacatgaagagttagaagcttttgttgagtttatatgcagtgatggctcaatgctttctgccaacgtgaaacaacatgctcgctcactctatcttgcggctgataagtatgagattctgcatctacgagacctatgcagaaccgagcttatatcttctctgagtttgttgaattctcttgacctccttgtgctcgctcaaatcccttttgacaaagtcctcaacgatgaaagtttcagttatataaaaaataatataagtacgattgctagctctgatgagttcaagttgttcgtcgccggtaacccaaatcttgccgtggagataatgaaggtttctctcattactcttactttacgctgttcctcctgtggttcaaaccatagtcttcaaggtatgtactgttgtaattgttgtcgctacggtactcttcgtttgatctag

SEQ ID NO: 1717 - DNA, 624 bp, Arabidopsis thaliana
  Clone ID: AT_T1N6.C1.o2.tg
atgacagaagcagagcaaaaggcggctttcctcggtggtcttgttgtctcattcaaggagcaaatgcatactgatgttctcgttaaacctggtgaagaagctccacccatacctacccacaaagccgttctggcggcaagatcaaaggtcttcaggaacatgttagattctgatgaatgcaagacctcccccgaggaatcaatcactctccctgatttgtcccacgacgaactcaaatctcttctcgagttcctctacagcggtaacctaaaagctccatacaatcaataccgatccctatatctggctgcagataagtacgacatttcatatctgcaagacgtatgccgtaaccatttcatcgcatctctgagctctaggaacgtcctagacatcttagagctcgccagtataccttgtgacacaatcttgaaagacgcggctatcaatcatattgtcaaacatatggaagaagtggttgttcccatgaaatatgagacgtttgtgcagaggaacccggatctaagcgtggagatcactcgggcttatctgagagagaccaaagccaaagccaaagatcatggagctcctctaaatggtaatactcgcccacgcatctggtga

SEQ ID NO: 1718 - DNA, 1119 bp, Arabidopsis thaliana
  Clone ID: AT_K9I9.C1.o4.tg
atggtgacaggttgtgttgatcttcatcaatctttcaaatctgcagattcatcttctgtgccaattcctcctcctcttccatcaaaatctgatggactcaagaaaaaacttgggcatagcagcgtttcgacagccacaagagatatgtgggatcgtcttttcaatgacggatacaaagctgatgtagtcatctatacagataatggcagtatcatctatgctcatgccaacatccttggaactgcttccactgtgatcaaaggcatgttgaagcaagccaagagacatggcaagtggcatacaatatcaatccgaggtgtccctcatgatgctgtgcgagtttttatccgtttcctctactcttcttgctatgagaaagaagaaatgaacgagtttatcatgcatttgctacttctgtcacacgcgtacgtggttcctcagctgaaacgggtctgtgaatggcatctagaacatggtttgcttaccactgagaatgtggttgatgtgttccagcttgcgctgctgtgtgatttccctcggcttagcctcatatctcaccgtatgatcatgaaacactttaacgaactctctgcgacagaagcatggacagctatgaagaaaagccatccctttcttgagaaagaagttagagactcagtaatcatcgaagcaaatacgcggaaagagaggatgagaaaacgcaatgatcagaggatatattcgcagctatacgaagcaatggaagcacttgttcatatatgcagagatggatgtaaaacaatagggccacacgataaagatttcaaaccgaaccatgcaacgtgtaactatgaagcttgcaagggattagaatcactgatccggcatttcgcaggctgtaagctaagagttccaggaggttgcgtgcattgcaagagaatgtggcaactccttgaactgcattcacgtgtttgcgcaggttctgatcaatgtcgagtccctctatgcagaaaccttaaggagaagatggagaaacagagcaagaaagatgagtcgagatggaaacttctggtgaagaatgtattggggagtaagaaaatcggaggctctcctttctttttaccggtgacaaactgttaa

SEQ ID NO: 1719 - DNA, 981 bp, Arabidopsis thaliana
  Clone ID: AT_F8K7.C1.o22.tg
atgggggacacgaaggtagagacaatctcgaggttagctcaatggagaattgaaaattttggtccttgttctttcaaaaagtccgatcctttcaaagtcggaatttggaattggcatctgtctatagagaggaatcgctatctatcagtgaggctattcccagaactttctcgagtatctaaagagcaacctcctgttgccaaatttgttcttcgtgtctccaacgttggccccaatcgtagattctacatctctcctgtttatgagaagctgctgcgtacaactgatgattgtgtgtggcatgttgactccagtttccacggtcgattcaccattgatgttgagtttcttgatctcaaaatctgccctgtgaatggtggtgaagcttctcctgtttggccaaccgatgcaacaatgcaatcaatctctactcaaaccactctcaaatgcttatcccggatgctagaggaaagcatactaaccgatgtaatcatccacacagccgatggaacactctctgctcacaaagctatcctctcagctagctcaactgttttcaaaagcatgttccaccacgacctcatggaaaaggaatcatccacaatccacatagacgacatgtcgagagaatcttgcatggctctactaagttacctctacggaaacataacccaagaagagttctggaaacacaggctcgccctcctcggcgctgcaaacaagtacgacataacggatttgaaagcagcctgcgaggagagcctaatggaagatataaactcgagtaatgtgctcgagaggctacaagaagcttggctttatcagctggagaaactgaagaaagggtgtttgatgtatttgtttgatttcggaaagatttatgatgtcagagaagaaatcagcagtttcttcaggcaagctgatcgagaactgatgctggagatgtttcaagaggttttgtctgtgtggaaaccggtctaa

SEQ ID NO: 1720 - DNA, 1221 bp, Arabidopsis thaliana
  Clone ID: AT_F28L1.C1.o13.tg
atggacacaattagggtttccaaggaggttcctggatcttcgaaatcgaccgcacagtcgctcacggagtcgacctctcgcacggaaaccatcaatggctcccacgaattcaagatcagcggctactctttggtcaaaggcatggggattggcaaatacgttgcctcggatactttcatggtcggtggatactcctgggccatctacttctacccagatggaaagagtccagaggataattctgtctacgtgtctctcttcatagcccttgcgagtgaaggagccgatgttagggctttgtttgagcttaccctcgtggatcagagcggtaacgaaaggcacaaagttcatagccattttggtagaactctcgaaagcggaccctatactcttaaatatcgagggagtatgtggggatacaaacgatttttcaagaggtctcttttggagtcatcggactatctgaaggacaatggtctcttggtccggtgttgtgttggagtggtgaagtcacgcacagaaggaccgaggtgttacaatatcccggtgccggtttctggcttgggtcagcagtttggaaagcttttggaaagtgggaaaggagctgacgttactttcgaagttgatggagaaacatttcctgctcacaaattggttcttgcagcacgttctgcagttttcagggcacagctttttggcccgttgagaagtgaaaataccaattgtataatcatagaagacgtacaagcccctattttcaagatgttgcttcattttatctactgggatgaaatgcctgatatgcaagacttaatcggcacagacttgaaatgggcatcaactcttgtggctcagcatctgcttgcagctgcagaccgttatgctcttgagcggcttagaacaatatgcgagtcaaaactctgtgaaggaatcagcataaatacggtagcaaccaccttggctcttgcagagcagcatcattgtttccagctgaaagccgcctgcctcaaatttatagctttgccagaaaacctgaaagctgtgatggaaacggatgggtttgattatctgaaggaaagctgcccgtccctactaagtgagctattggagtatgtggctaggctgagtgagcactctttaacatcatcagggcatcgaaaggagttatttgctgatggttgtgacttaaatgggagacgtgtgaagcaacggttacattag

SEQ ID NO: 1721 - DNA, 1104 bp, Arabidopsis thaliana
  Clone ID: AT_T29H11.C1.o120.tg
atggaagctgttcttgtcgcaatgtccgtccccgccacaacggaagacgacggattttcgttaatcaccgataaactttcatataatctaacgccgacgtcggacgttgagatcgttacctccgataaccgtcggattccggcacactccggcgttctggcttcagcttcaccggtactgatgaacatcatgaagaaaccgatgagacgttacagaggctgtggatctaaaagagtcatcaagattcttggcgttccatgcgacgccgtttcggtttttatcaaattcctctactcttctaggttggtttgtttgacggaggatgagatggagagatatggaatccatcttttagcgttgtctcacgtctacatggtcacccagctgaagcaacggtgctcaaaaggcgttgtacaacgtttaactacagagaacgtagtcgacgtcctccagctagctcggctctgcgacgcacccgatgtttgccttcgatctatgcgtctgatccattcgcagtttaagaccgttgagcagactgaaggatggaagtttattcaagaacatgatcctttcctcgagctcgacattctccagttcatcgatgacgccgaatcgaggaagaaaagaaggcgacgacatagaaaggagcaggatctttacatgcaactaagcgaggcaatggagtgcatagagcacatatgcacacaaggttgtacattggtcggtccatcaaacgtagtagataacaacaaaaagtcaatgactgcggaaaagtcagagccttgtaaggcgttttccacgtgttatggtcttcagcttttgatacgtcactttgccgtatgcaagaggaggaataacgataagggttgtcttcgttgcaagcggatgcttcaactctttagactccattctttgatttgtgatcaacccgattcttgtcgcgtccctctctgcaggcaatttaggaaacggggagaacaagacaagaaaatgggtgaagacaccaagtggaagcttctggtgacaagggttgtgtctgcaaaagctatgacgtcgttgtgtcagtcaaagaagaacaaatgtgaacaagcacaaggggtttaa

SEQ ID NO: 1722 - DNA, 630 bp, Arabidopsis thaliana
  Clone ID: AT_T2P4.C1.o20.tg
atggctacacaaagcaacaaagaggctttcttaggtggatttaagaaactcttgaatgaacaatggcaagccgatgtacgtctcaaggcaggagacagtgatgagactacatctattttcgcccacaagcttgtcttggtggcaagatcagaggtgtttaagaagatattggaatcagacgagttcaaggcttcatctaaacagatggagacagtcaccctctcggagatgaaacacgaagaattggaggcttttgtggagttcatctatagggttgatggctccatttgttctgctagtctcaagaaacatgctcgttcactctttcatgcagccgacaaatatgagattccgcatctaagagacctatgcagaaacgagcttatatcatctttgaattcgtcgaatgctcttagcatccttgagctcgcccaaatcccttttgacaaagccctcaatgatcccgccttcactactatcataaccaatataagtacgattgctagtggtgatgagttcaagctgtttgtcgccaatcacccaaatcttgccgtggatataatgaaggcttctataactagactaagtactagcagaaaaatctgtggttactgtaatcgctactactaa

SEQ ID NO: 1723 - DNA, 585 bp, Arabidopsis thaliana
  Clone ID: AT_T2P4.C1.o21.tg
atggcaacagaaaccaacaaagagcttttcgtgggtggatttgcaaagattttgaaagaacaacgtcaagtcgatgtacggcttaaggcaggggacagtggtgatgagggtgcttctacttctgcccataagcttgttctgtctgcaagatcagaggtgtttaagaagatgttggagtcagacgagatcaaggcttcggctcaactagagacaatcactctctgtgagatgaaacacgaagaattagaggctttcattgaattcatatacagcgacggctctatgctttctgcaaaagagaagcaacacaaaatggcaaacaagattgaattcattgattcatttgcgaaatactggaaagagaaagttggagtcgatgtactgcttaaagcaggggaccaaacagatcctatccctgctcacaaaatcatcttggctgcatcatcggaggtgcttaagcagatgattgattcaacttcatcagcaagtgatccaatcactttttcagagatgactcacgatgagctatatatacctttactgagttcatgtacaaaggttacctttcggattcaaaactgttga

SEQ ID NO: 1724 - DNA, 558 bp, Arabidopsis thaliana
  Clone ID: AT_T6B20.C1.o13.tg
atggcaacagaaggaaaaaaccccatcaacatgaactctatgtcttcaagtcttgcaagaaccggtcaatgggttttttctcaagatattccgaccgatgttgttgttgaagtcggagaagccaatttctctcttcataagttcatgttagtggctaagagtaactacataaggaagctaataatggaatccaaagatagcgacgtgacaagaatcaatctctcggatatacccggaggtcctgagatatttgagaaagctgccaagttctgttacggtgttaacttcgagatcaccgttcagaacgtggcggctcttcattgcgcagccgagtttcttcagatgaccgataagtactgcgacaacaaccttgctggtcggacacaagacttcctttctcaagtagctctctctagcctctctggagctatcgttgtcctcaagtcttgcgagattctccttcctatttctcgtgatcttggtattgtccgccgttgtgtcgacgtcgtcggtgctaaggtattattttactcagaactcattctcacttctttgtaa

SEQ ID NO: 1725 - DNA, 1761 bp, Arabidopsis thaliana
  Clone ID: AT_T6B20.C1.o5.tg
atggttgcggcgaaagagaacaagtttctgacagtggcaccttttgagtgtgcttggagtgatgatctgaagttccgggaagcgggaagaggttgtgttgcgtttgatgcgtttgctcacaatgatgtcacggtggtgtttagagagaatgtggggactcaacattaccattataagaaagataatagtcctcactacattgttatcattggtagcaataggaatcgtaggttgaagattcaggtagatggaaaatctgtggtcgatgaggaagcttctgatctttgtcgttgttctttggagtttcagagttactggattagtatctatgatgggttgattagcattggtaaaggtcggtatccgtttcagaacctggtatttaagtggcaagaccccaagcccaattgtaatgttcagtatgttggtctgagcagctgggataaacatgttggatatagaaacgtgagtgtgtttcctgtgacacataatcatatcttgctgtggaagcaagtggattgccgtgaagttagaggagatgagtctggtgacgagaaggttgtggaggaagggactggttatgattatgaacaatggggacttgggaatttcttggagagttggcaattatctgacacagtcttccttgttggtgaagaggaaatggatgtccctgctcacaaggttatattacaagcatcaggtaattttcctttgagatcatctgatggggatgtcattcaacttcgtggagtgtcgtacccgattcttcatgctcttcttcaatatatctatactggacgaactcagattttggaatcagaacttgctccattgcgggatttaagttctaagtttgaagtgatgtcattggtgagacagtgtgaagaaagtatagaccattttaaattgagcaaaacagcatttgactcctgcagaaaagtcaaactcttgtgtcctatttctcacccgttatctggctttatgttcccaagtgctttccctgttgatgttgggaagctggtaaagttgtactcaaccggcgaatatagtgacataaaaatctacctcagtgaccatagtctcactttccaatcccacaaagtcattctaagtctttggagtgttgcatttgcaaagatgtttacaaatgggatgagtgaaagccattcatcaacgatttacctaaccgatgtatcaccagaagcattcaaggctatgatgaatttcatgtatagtggagagttgaacatggaagacactgtgaattttggcaccgagttgattcatcttctctttctagctgaccggtttggagttgttccacttcatcaagaatgctgcaaaatgctcttggagtgcctctcagaggattctgtatgctcagttctccaagtggtttcgtctatctcatcatgtaaactcattgaggagatgtgcaagaggaagttctccatgcacttcgactattgtaccactgcaagtttggactttgtcttgttagatcagaccaccttcagtgatattcttgagtctgcagatctgacggtgacatctgaagaaaagattctgaatgctgttctcatgtggtgcatgaaagctgaggagtcgcacagttggggagtaatagatgagatgatgaactatgctgaccccaaaagtttgttcaaagaaaggcttcagtcacttgatgacctgttacctcatgtacgcttctctttgttgccatatgagttacttaaaagggtaagtggatcctga

SEQ ID NO: 1726 - DNA, 1329 bp, Arabidopsis thaliana
  Clone ID: AT_T16G12.C1.o40.tg
atgggcacaactagggtctgctcggaggtttcttctggatcttcgaaatcgcttagccaatctctcacggtatcgacctctaccacagaaacagtcaatggtttccatgaattcaagatctgtgggtactctctcgctaaaggtgttggtgtcggcaaatacgtcgcttccgatacgtttatggtcggtggttactcgtgggcaatctacttttatccagatgggaagagtccggaggataactcgtcttacgtttctttgttcatagctcttgctagcgaaggagctgatgttagggctttgtttgagctcacgcttgtggatcagagtggtaatgggaagcataaggttcatagccattttggtagagctctcgatagcggtccctatactctcaagtatcgtggaagcatgtggggatacaagcggtttttcaggaggtccagtctagaatcgtcggattatttgaaggagaatagtctcttggttaggtgccgtgtgggtgtggtgaagtcagttacggagggaccgaggtattacaatatccctgtgccagtttctaacttgggacaacagttgggaaatttattggagagtgggaaaggctgtgatgttgttttccaagttgatggagaaaccttcaacgcacacaaattggttcttgcaacgcgttccccggttttcaacgcacagctttttggccctttaggagaccgaaataccaaatgcataacgatagaagacatggaagcacccattttcaaggtcctccctttaactctcttgctgattgtctattcacggatgtaccatccgggatcttctcctggggcgctactcctattctcgagtttactcacccgggataaggtattgctccattttatctactgggacgaattgcctgatatgcaagagttaataggaacagactctacattggcgtctactcttgtggctcagcatctactagcagcggcagaccgttatgctcttgagcggcttaaagcaatctgtgagtcaaaactctgtgaaggggttgccataaacacggttgcaactactttggccctagcagagcagcatcattgtttgcagctaaaagcagtgtgtctcaaattcgtggcactgccagagaacctgaaagctgtgatgcaaacagatgggtttgattatctgaaagagagttgcccatctttactaacggagctattgcagtatgtggcgaggctaagtgaacactctgttatagtatctggacatcgaaaagaaatatttgccgatggttgtgacgcgagtggaagacgagtgaagccccggttgcactga

SEQ ID NO: 1727 - DNA, 1398 bp, Arabidopsis thaliana
  Clone ID: AT_F20H23.C1.o23.tg
atgaaatctgtcattttcacagaggaaaaaaacttacaaagacaaaatccattgcaaaagagcgagcaacaacgacgaaatttcgaaatgccatcgccaccgacgacgacttctctctcggtgacacagaccataaacggatcacacagcttcacaatcaaaggctattctttggctaaaggaatcgggatcggaaaacacatcgccagcgatactttcaccgtcgggggttatcaatgggctatctatttctatcctgatggcaagaatcctgaggataattcggcttatgtctccgttttcattgctttagctagcgatggtaccgatgttagggctctttttgagctttctttgcttgatcagagtggtaaagggaagcataaggttcatagccacttcgatcgtgctcttgagagcggtccttatactctcaagtatcgtggcagcatgtggggctacaagcgcttttttcgaagacttatgctggaaacatctgattttctgaaggatgattgtctgaaaattaattgcaccgtgggagttgtggtctcagaaatagattgcccacggttacattctattcatgtccctgcatctgatattggatctcatttcgggatgcttctagagaacgaggacggttcagatataacttttaacgtctctggtgaaaagttccgtgctcacaggttagtattggctgctcgatctcctgtctttgaaagcgagttcctcgatgttacgggagaagaagatcgtgatatcgaagttactgacatggagcctaaggttttcaaggctttgctccactacatatacaaggatgctctcattgaagatgcagagtcatcatcatcttccggttcatctgttggtccatctgcctcagacacattagctgcaaagctactaggagccgctgataaatacaagttgcctagattaagtctaatgtgcgagtcagtgctctgcaaggatatatcagtagattccgttgcaaatattttggcgcttgctgaccgttacaatgcttccgccttgaaatccgtttgtctgaaattcgcagcagaaaatctcatcgctgttatgaggtcagatgggtttgattatctaagggaacactgcccgtcacttcagtctgagcttctgaaaacagttgcgggttgcgaagaggagttaagcggaggaggagggaagacgagaagcgtatggggccaattctcagacggtggagctgagacaaacggaagacaagcacagacttggggagatatcaatggaggagcagagagaagccagagtgtttgggtcgaagttgtgaacgctaatggaagcggtagaaacaataatgacaacaataacagtgatgacccaatggcagaactagaagattga

SEQ ID NO: 1728 - DNA, 993 bp, Arabidopsis thaliana
  Clone ID: AT_F28J15.C1.o112.tg
atggctgataccagttcaaggactgatgtctcaactgatggtgacacagatcatagagatctggggtctgatagagggcatatgcatgctgctgcctctgattccagtgatcgatcaaaggataagttggatcaaaagacccttcgtaggcttgctcaaaatcgtgaggcagcaagaaaaagcagattgaggaagaaggcgtatgttcagcagctggagaatagtcgattaaagctgactcaacttgagcaggagctgcaaagagcaagacagcagggagttttcatctcaagttcaggagaccaagctcattctactggtggcaatggggctttggcatttgatgcagaacactcacgatggcttgaagaaaagaacaggcaaatgaacgagctgagatctgccctgaatgctcatgcaggtgatactgagctccggataattgtggatggagtgatggctcactatgaggagcttttcaggattaagagcaatgcagctaagaatgatgtcttccacttgttatctggaatgtggaaaacaccagctgagcgatgtttcttgtggcttggcgggttccgctcatccgaacttctcaagcttcttgcgaatcagctagagcccatgacagaacgacaggtaatgggcatcaatagcttgcagcagacgtcgcagcaggcagaagatgctttatctcaagggatggagagtttacagcaatccctagctgatactttatccagtggaactcttggttccagttcatcggataatgtcgcgagctacatgggtcagatggccatggcaatggggcagttaggcaccctcgaaggattcatacgccaggctgataacttgaggctgcaaacactacaacagatgcttcgagtattaacaacacgtcagtcagctcgtgctcttcttgctatacacgattattcatctcgattacgtgctcttagttccttgtggcttgcccggccaagagagtga

SEQ ID NO: 1729 - DNA, 903 bp, Arabidopsis thaliana
  Clone ID: AT_MHK10.C1.o10.tg
atgacacaacattggcctgatttctcttcccaaaagctctctcctttctctaccccaaccgcaaccgctgtcgccaccgctacaaccaccgtacaaaacccctcatgggtcgacgaattcctcgacttctcagcgtctcgccgtggcaaccaccgtcgttccatcagcgactctatcgcattcctcgaagctccaacagtcagcatcgaagaccaccaattcgacaggttcgatgacgaacagttcatgtcgatgttcaccgacgacgacaaccttcatagcaatccttcccatatcaacaacaaaaataacaatgtggggcccacgggatcttcctcgaacacatccacgccgtccaatagcttcaacgacgataacaaagaattaccaccgtccgatcataacatgaacaataatatcaacaacaactataacgatgaagtccaaagccaatgcaagatggagccagaagatggtacggcgtcgaataacaattccggtgatagctccggcaaccggattctcgatcccaaaagggttaagagaatattagcaaatcggcaatcagcacagagatcaagggtgaggaaactgcaatacatatcagagctcgaactgttatcgccaagagttgcattcttggatcatcaacgtttgcttcttaacgttgacaacagcgctctcaagcaacgaatcgctgctttatctcaagacaagcttttcaaagacgcacatcaagaagcattgaagagagaaatagagagacttcgacaagtgtataatcaacaaagcctcacgaatgtggaaaatgcaaatcatttatcggcgaccggagccggtgctactccggccgtcgacatcaagtcgtccgttgaaacagagcagctcctcaatgtctcataa

SEQ ID NO: 1730 - DNA, 822 bp, Arabidopsis thaliana
  Clone ID: AT_F12A4.C1.o11.tg
atggaaaataacatttctcctcctaataatatgcaccaccatagtgcttctttagatgatcttttcacagaagaccaaccagcttggctcgatgagctcctaagtgagccagcatcacctaagattaacaaaggtcatagacgttcagctagtgacacagctgcttacttgaactcagctttaatgccttcgaaggaaaatcatgttgctggttcgtcttggcagttccagaactatgatttgtggcagtccaactcttatgaacaacacaataaattaggatgggatttctctacagcaaatggaactaatatccaaagaaatatgtcatgcggagctttaaatatgtcgtcgaaacccattgagaaacatgtaagcaaaatgaaagaaggaacttctacaaaaccagatggtcctagatcaaagactgactcaaaacgtatcaaacatcaaaatgctcatcgagcgcgtttgagaaggcttgagtacatatcagaccttgaaaggaccatccaagtgctacaagttgaaggatgtgaaatgtcatctgccattcactacttggatcagcagttactcatgcttagcatggaaaatagagctttaaaacaacgtatggatagtttagcagaaatccaaaagcttaaacatgtggagcagcaattgcttgagagagagataggaaacctacagtttcgacgacaccaacaacaaccacagcaaaaccaaaaacaagtccaagcaatacaaaatcgatacaacaaatatcaaccacctgttacacaagaacccgatgcccaatttgcagccttggcaatatga

SEQ ID NO: 1731 - DNA, 2511 bp, Arabidopsis thaliana
  Clone ID: AT_F5F19.C1.o21.tg
atggcaatgtcttgcaaggatggtaagttgggatgtttggataatgggaagtatgtgaggtatacacctgaacaagttgaagcacttgagaggctttatcatgactgtcctaaaccgagttctattcgccgtcagcagttgatcagagagtgtcctattctctctaacattgagcctaaacagatcaaagtgtggtttcagaaccgaagatgtagagagaaacaaaggaaagaggcttcacggcttcaagctgtgaatcggaagttgacggcaatgaacaagctcttgatggaggagaatgacaggttgcagaagcaagtgtcacagctggtccatgaaaacagctacttccgtcaacatactccaaatccttcactcccagctaaagacacaagctgtgaatcggtggtgacgagtggtcagcaccaattggcatctcaaaatcctcagagagatgctagtcctgcaggacttttgtccattgcagaagaaactttagcagagtttctttcaaaggcaactggaaccgctgttgagtgggttcagatgcctggaatgaagcctggtccggattccattggaatcatcgctatttctcatggttgcactggtgtggcagcacgcgcctgtggcctagtgggtcttgagcctacaagggttgcagagattgtcaaggatcgtccttcgtggttccgcgaatgtcgagctgttgaagttatgaacgtgttgccaactgccaatggtggaaccgttgagctgctttatatgcagctctatgcaccaactacattggccccaccacgcgatttctggctgttacgttacacctctgttttagaagatggcagccttgtggtgtgcgagagatctcttaagagcactcaaaatggtcctagtatgccactggttcagaattttgtgagagcagagatgctttccagtgggtacttgatacggccttgtgatggtggtggctcaatcatacacatagtggatcatatggatttggaggcttgtagcgtgcctgaggtcttgcgcccgctctatgagtcacccaaagtacttgcacagaagacaacaatggcggcactgcgtcagctcaagcaaatagctcaggaggttactcagactaatagtagtgttaatgggtggggacggcgtcctgctgccttaagagctctcagccagaggctaagcagaggcttcaatgaagctgtaaatggtttcactgatgaaggatggtcagtgataggagatagcatggatgatgtcacaatcactgtaaactcttctccagacaagctaatgggtctaaatcttacatttgccaatggctttgctcctgtaagcaatgttgttttatgcgcaaaagcatcaatgcttttacagaatgttcctccggcgatcctgcttcggtttctgagggagcataggtcagaatgggctgacaacaacattgatgcgtatctagcagcagcagttaaagtagggccttgtagtgcccgagttggaggatttggagggcaggttatacttccacttgctcatactattgagcatgaagagtttatggaagtcatcaaattggaaggtcttggtcattcccctgaagatgcaatcgttccaagagatatcttccttcttcaactttgtagcggaatggatgaaaatgctgtaggaacctgtgcggaacttatatttgctccaatcgatgcttcgtttgcggatgatgcacctctgcttccttctggttttcgtattatccctcttgattccgcaaaggaagtatctagcccaaaccgaaccttggatcttgcttcggcactggaaattggttcagctggaacaaaagcctcaactgatcaatcaggaaactccacatgtgcaagatctgtgatgacaatagcatttgagtttggtatcgagagccatatgcaagaacatgtagcatccatggctaggcagtatgttcgaggtatcatatcatcggtgcagagagtagcattggctctttctccttctcatatcagctcacaagttggtctacgcactcctttgggtactcctgaagcccaaacacttgctcgttggatttgccagagttacaggggctacatgggtgttgagctacttaaatcaaacagtgacggcaatgaatctattcttaagaatctttggcatcacactgatgctataatctgctgctcaatgaaggccttgcccgtcttcacatttgcaaaccaggcgggacttgacatgctggagactacattagttgctcttcaagacatctctttagagaagatatttgatgacaatggaagaaagactctttgctctgagttcccacagatcatgcaacagggcttcgcgtgccttcaaggcgggatatgtctctcaagcatggggagaccagtttcgtatgagagagcagttgcttggaaagtactcaatgaagaagaaaatgctcattgcatctgctttgtgttcatcaattggtcctttgtgtga

SEQ ID NO: 1732 - DNA, 2529 bp, Arabidopsis thaliana
  Clone ID: AT_mup24.C1.o100.tg
atggagatggcggtggctaaccaccgtgagagaagcagtgacagtatgaatagacatttagatagtagcggtaagtacgttaggtacacagctgagcaagtcgaggctcttgagcgtgtctacgctgagtgtcctaagcctagctctctccgtcgacaacaattgatccgtgaatgttccattttggccaatattgagcctaagcagatcaaagtctggtttcagaaccgcaggtgtcgagataagcagaggaaagaggcgtcgaggctccagagcgtaaaccggaagctctctgcgatgaataaactgttgatggaggagaatgataggttgcagaagcaggtttctcagcttgtctgcgaaaatggatatatgaaacagcagctaactactgttgttaacgatccaagctgtgaatctgtggtcacaactcctcagcattcgcttagagatgcgaatagtcctgctggattgctctcaatcgcagaggagactttggcagagttcctatccaaggctacaggaactgctgttgattgggttcagatgcctgggatgaagcctggtccggattcggttggcatctttgccatttcgcaaagatgcaatggagtggcagctcgagcctgtggtcttgttagcttagaacctatgaagattgcagagatcctcaaagatcggccatcttggttccgtgactgtaggagccttgaagttttcactatgttcccggctggtaatggtggcacaatcgagcttgtttatatgcagacgtatgcaccaacgactctggctcctgcccgcgatttctggaccctgagatacacaacgagcctcgacaatgggagttttgtggtttgtgagaggtcgctatctggctctggagctgggcctaatgctgcttcagcttctcagtttgtgagagcagaaatgctttctagtgggtatttaataaggccttgtgatggtggtggttctattattcacattgtcgatcaccttaatcttgaggcttggagtgttccggatgtgcttcgacccctttatgagtcatccaaagtcgttgcacaaaaaatgaccatttccgcgttgcggtatatcaggcaattagcccaagagtctaatggtgaagtagtgtatggattaggaaggcagcctgctgttcttagaacctttagccaaagattaagcaggggcttcaatgatgcggttaatgggtttggtgacgacgggtggtctacgatgcattgtgatggagcggaagatattatcgttgctattaactctacaaagcatttgaataatatttctaattctctttcgttccttggaggcgtgctctgtgccaaggcttcaatgcttctccaaaatgttcctcctgcggttttgatccggttccttagagagcatcgatctgagtgggctgatttcaatgttgatgcatattccgctgctacacttaaagctggtagctttgcttatccgggaatgagaccaacaagattcactgggagtcagatcataatgccactaggacatacaattgaacacgaagaaatgctagaagttgttagactggaaggtcattctcttgctcaagaagatgcatttatgtcacgggatgtccatctccttcagatttgtaccgggattgacgagaatgccgttggagcttgttctgaactgatatttgctccgattaatgagatgttcccggatgatgctccacttgttccctctggattccgagtcatacccgttgatgctaaaacgggagatgtacaagatctgttaaccgctaatcaccgtacactagacttaacttctagccttgaagtcggtccatcacctgagaatgcttctggaaactctttttctagctcaagctcgagatgtattctcactatcgcgtttcaattcccttttgaaaacaacttgcaagaaaatgttgctggtatggcttgtcagtatgtgaggagcgtgatctcatcagttcaacgtgttgcaatggcgatctcaccgtctgggataagcccgagtctgggctccaaattgtccccaggatctcctgaagctgttactcttgctcagtggatctctcaaagttacagtcatcacttaggctcggagttgctgacgattgattcacttggaagcgacgactcggtactaaaacttctatgggatcaccaagatgccatcctgtgttgctcattaaagccacagccagtgttcatgtttgcgaaccaagctggtctagacatgctagagacaacacttgtagccttacaagatataacactcgaaaagatattcgatgaatcgggtcgtaaggctatctgttcggacttcgccaagctaatgcaacagggatttgcttgcttgccttcaggaatctgtgtgtcaacgatgggaagacatgtgagttatgaacaagctgttgcttggaaagtgtttgctgcatctgaagaaaacaacaacaatctgcattgtcttgccttctcctttgtaaactggtcttttgtgtga

SEQ ID NO: 1733 - DNA, 1029 bp, Arabidopsis thaliana
  Clone ID: AT_MUK11.C1.o16.tg
atgtcaaggcctgctccgcttccacctcgttgcccgattccaaagaaactttctttgagtccagttgcagatacattctactcttcttcctcacccattgaatcatacattggtcaatacaagtcttctactcaagattccaggctcgaagatcaacctgcttggcttgatgagttgctctgtgacaaaactgatgggttgctcactagaggaggtcctctgcgccgctcagctagcgactcagttgtgcttttgggagacatttctgctactttttctggttttgatcaaagtgaggatgaagaaagtttgagttctgaagcttgtggggacttggagtctgcttgtgtatatggtcccaactcgccaagagcaaagaacaactctagcttctctaacaaccctattgcttctgccttttcggattatggttctcagacaccgcctcagaacttggatgatacggtgaaagggatcaaccgttcacctgttgctgaaaatgcgtgtggttcaatgggcataccaaatgcaaaaagatcaagatacatcggtttctggtttttggtggggattcttatgactactaaattggcagaaatatgtgtctgtgtccacaagagtgctcttagaatgccaattcggaacccgggacagcgttcaagggttcgtaagctccagtacattgctgaacttgagagaacagtaggcatgttgcagacggtggaagcagatttatcagtgagagtggcttcacttcttcagacacgagcaacactgtccctggagaatagccagttgaagcagcagatggcgatactaaagcaggacaagctcataagggaaggtgagtatcagttactgaagaaggaagctcagagattgaaatctggattgggatacttagggagcactaacaacagtaacaggctggtgaggtcatattctgctggttcaaatgtagctccaaggacagcttcgtcccacttggactggaatttgctagatctgaccaaactcaatctcaactaa

SEQ ID NO: 1734 - DNA, 888 bp, Arabidopsis thaliana
  Clone ID: AT_F13A11.C1.o5.tg
atggcggaggaatttggaagcatagatttactcggagatgaagatttcttcttcgatttcgatccttcaatcgtaattgattctcttccggcggaggattttcttcagtcttcaccggattcatggatcggagaaatcgagaatcaattgatgaacgatgagaatcatcaagaggagagttttgtggaattggatcagcaatcggtttcagatttcatagcggatctactcgttgattatccaactagcgattctggctccgttgatttggcggctgataaagttctaaccgtcgattctcccgccgccgctgatgattccgggaaggagaattcggatttggttgttgagaagaagtctaatgattctggtagcgagattcatgatgatgatgacgaagaaggagacgatgatgctgtggctaaaaaacgaagaaggagagtaagaaatagagatgcggcggttagatcgagagagaggaagaaggaatatgtacaagatttagagaagaagagtaagtatctcgaaagagaatgcttgagactaggacgtatgcttgagtgcttcgttgctgaaaaccagtctctacgttactgtttgcaaaagggtaatggcaataatactaccatgatgtcgaagcaggagtctgctgtgctcttgttggaatccctgctgttgggttccctgctttggcttctgggagtaaacttcatttgcctattcccttatatgtcccacacaaagtgttgcctcctacgtccagaaccagaaaagctggttctaaacgggctcgggagtagtagcaaaccgtcttataccggcgttagtcggagatgtaagggttcgaggcctaggatgaaataccaaatcttaacccttgcggcgtga

SEQ ID NO: 1735 - DNA, 1272 bp, Arabidopsis thaliana
  Clone ID: AT_T21E18.C1.o21.tg
atggataaggagaaatctcctgcaccaccacctagtggaggtcttcctccaccatcgggtcgttactctgcgttttcacctaatggaagtagctttgcaatgaaagctgaatcatcttttcctcctttgactccaagtggaagcaatagctcagatgctaaccgattcagccatgatattagccgaatgccggataatccacctaagaacctaggccatcgccgagctcattcagagattcttactcttcctgatgacttaagctttgatagtgatcttggtgtggttggtgctgctgatggaccttctttctctgatgatactgacgaggacttactctatatgtatcttgatatggaaaaattcaattcttctgctacatcgacttctcaaatgggtgagccatcagaaccgacttggaggaatgaattagcctcgacttctaaccttcagagtacacccggtagctctagtgaaagaccgagaattagacaccaacacagccaatcgatggatggttcaacaactatcaagcctgagatgcttatgtcagggaatgaagatgtgtctggagttgactctaagaaagccatctctgctgctaaactttctgagcttgctctcattgatccaaaacgcgccaagaggatatgggcaaacaggcagtctgctgcgaggtcaaaagaaaggaagatgagatacattgcagagctcgagagaaaagtacagactttacaaacagaggccacatctctctcagcccagttgactctcttacagagagatacaaatggcctgggtgttgaaaacaatgagcttaaactgcgagtacaaactatggagcaacaggtccacctacaggatgctttaaatgatgcactaaaggaggaagtccagcatcttaaggtattgacggggcaaggtccatcaaatggtacatcaatgaactacggttcttttggatcaaaccagcaattctatcccaataatcagtcgatgcacactatcttagccgcacaacagttacagcagctccagatccagtcacagaaacagcaacaacaacaacagcaacaccagcaacaacaacagcagcagcagcagcaatttcactttcaacagcagcaactgtaccagcttcagcagcagcaacggcttcaacaacaggaacaacaaagcggggcttcagagctaagaagacccatgccttctcctggtcagaaagagagtgtgacatcgcctgatcgtgaaactcccttgacaaaagactga

SEQ ID NO: 1736 - DNA, 837 bp, Arabidopsis thaliana
  Clone ID: AT_M4E13.C1.o100.tg
atggaagacggtgagcttgatttctccaatcaggaagtgttttcgagttcggagatgggtgaattaccacctagcaattgttcgatggatagtttctttgatgggcttttaatggatactaatgctgcttgtacccacactcacacctgtaaccccactggaccagagaacactcatactcacacgtgcttccatgtccacaccaagattctcccggatgagagcgatgaaaaagtttctactgatgatacagctgagtcttgtgggaagaagggtgaaaagagacctttgggaaaccgggaagcggttagaaagtatagagagaagaagaaggctaaagctgcttctttggaggatgaggttgcaaggcttagggcggtgaatcagcagctggtgaagaggttgcaaaatcaggctaccttggaagctgaggtttcgaggcttaagtgtttgcttgtggatttgagaggaagaatagatggagagattggatcttttccttatcagaaacctatggctgcaaatattccttctttctcgcacatgatgaatccttgtaatgtacaatgtgatgatgaagtttattgccctcagaatgtgtttggagtgaatagccaagaaggtgcctcgatcaatgaccaagggttaagtggttgtgattttgatcagctacaatgcatggctaatcagaacttaaatggaaatggaaacggatcattcagcaacgtcaatacatctgtctcgaataagagaaaaggtgacacttttattctgtaccttagagttttctctgtaaatcgttctggtttagaaccggaggttgtttactcactctga

SEQ ID NO: 1737 - DNA, 990 bp, Arabidopsis thaliana
  Clone ID: AT_F9D24.C1.o30.tg
atggcacaacttcctccgaaaatcccaaccatgacgacgccaaattggcctgacttctcctcccagaaactcccttccatagccgcaacggcggcagccgcagcaaccgctggacctcaacaacaaaacccttcatggatggatgagtttctcgacttctcagcgactcgccgtgggactcaccgtcgttctataagcgactccattgctttccttgaaccaccttcctccggcgtcggaaaccaccacttcgataggtttgacgacgagcaattcatgtccatgttcaacgacgacgtacacaacaataaccacaatcatcatcatcatcacagcatcaacggcaatgtgggtcccacgcgttcatcctccaacacctccacgccgtccgatcataatagccttagcgacgacgacaacaacaaagaagcaccaccgtccgatcatgatcatcacatggacaataatgtagccaatcaaaacaacgccgccggtaacaattacaacgaatcagacgaggtccaaagccagtgcaagacggagccacaagatggtccgtcggcgaatcaaaactccggtggaagctccggtaatcgtattcacgaccctaaaagggtaaaaagaattttagcaaataggcaatcagcacagagatcaagggtgaggaaattgcaatacatatcagagcttgaaaggagcgttacttcattgcagactgaagtgtcagtgttatcgccaagagttgcgtttttggatcatcagcgattgcttctcaacgtcgacaatagtgctatcaagcaacgaatcgcagctttagcacaagataagattttcaaagacgctcatcaagaagcattgaagagagaaatagagagacttcgacaagtatatcatcaacaaagcctcaagaagatggagaataatgtctccgatcaatctccggccgatatcaaaccgtccgttgagaaggaacagctcctcaatgtctaa

SEQ ID NO: 1738 - DNA, 894 bp, Arabidopsis thaliana
  Clone ID: AT_T8M16.C1.o180.tg
atggattctcagaggggtattgttgaacaagctaaatctcagtccttgaataggcaaagctctctttacagcttaacacttgatgaggttcaaaatcacttggggagttctggtaaagctctgggaagcatgaaccttgatgagcttttgaagagtgtctgttctgttgaagctaatcagccatcgtctatggctgtcaatggtggagcagctgctcaggagggtctttctcgccaggggagtttgactttgcctcgggatctcagcaaaaagactgttgatgaggtttggaaagacattcagcagaataagaatggaggtagtgctcatgagaggagggataagcagcctacacttggggaaatgacgcttgaagacctgttgttgaaagcaggagtggtcactgagactatccctggttcgaaccatgatggtcctgttggtggtggtagtgctggttcaggtgctggtttagggcaaaacattactcaagttggcccatggattcaatatcatcagctcccatcaatgccacagcctcaagcatttatgccctatccggtttcagatatgcaagcaatggtgtctcagtcttctttgatgggtggtttgtcagatacacaaactcctggaaggaagagggtagcttcaggagaagttgtagagaagactgtagagaggaggcagaagagaatgataaagaacagagagtctgctgctcgttcccgagctaggaaacaggcttacactcatgagctagagatcaaagtttcacggttagaagaagaaaacgaaagactcaggaagcaaaaggaggtggaaaaaatcctcccaagtgtaccaccgcctgatcccaagcggcagctccgacggacaagctcggctcctttctga

SEQ ID NO: 1739 - DNA, 1236 bp, Arabidopsis thaliana
  Clone ID: AT_T10P11.C1.o9.tg
atgaacagtatcttctccattgacgatttctccgatcctttctgggaaactcctccgattcctctcaatcccgactcttctaagcctgttacggcggatgaagttagccagagtcaaccggaatggactttcgagatgtttctcgaagagatttcttcgtcggcggtgagctctgagccacttggtaacaacaacaacgcgatcgtcggtgtttcttcggcgcaatctcttccttctgtttccggacagaatgatttcgaggatgatagtcgatttcgtgatcgcgattcgggaaatttggattgtgctgctcccatgacgacgaagacggtgattgttgattccgatgattatcgtcgtgttcttaagaacaagcttgagactgagtgcgctactgttgtttctcttcgggttgggtctgtgaagcctgaagattcgactagttctccagaaactcaacttcaaccagttcaatccagtcctcttactcaaggagaacttggtgttacttcttccttaccagctgaggtgaaaaaaactggtgtatcaatgaagcaggttactagtggatcgtcgagagaatattctgatgacgaggaccttgatgaagagaatgaaaccaccggttccttgaagccagaggacgttaaaaaatctagaaggatgctgtcaaatcgtgagtcagctaggcgatctagaaggagaaagcaggagcaaacaagtgacctcgaaacacaggttaatgatctaaaaggtgagcattcatcacttcttaaacaactgagcaacatgaatcacaagtatgacgaggctgctgttggcaatagaatactaaaggctgacattgagacattaagagctaaggtgaaaatggcggaagaaaccgtgaagagagtaacaggaatgaatccgatgcttctcggaagatcaagtggacataacaacaacaacagaatgccaataactggtaacaacaggatggattcttctagcattattccagcttatcaaccacactcaaacctaaaccatatgtcaaaccaaaacatcgggatcccaaccattctacctccaagactcggaaacaatttcgctgctcctccatcccaaaccagctctcccttgcagagaattagaaatgggcaaaatcaccatgttactccaagcgccaacccgtatggctggaataccgaacctcagaacgattcagcatggccgaaaaaatgcgtggactga

SEQ ID NO: 1740 - DNA, 1302 bp, Arabidopsis thaliana
  Clone ID: AT_MLD14.C1.o1.tg
atgggaactcacatcaatttcaacaacttaggaggtggtggtcatcctggaggggaagggagtagtaaccagatgaagccaacgggtagtgtcatgcccttggctaggcagtcctcggtctactcccttacctttgatgagttacagaacacactaggtggaccgggaaaagatttcgggtcgatgaacatggatgaactcctgaagagcatatggactgctgaggaagctcaggccatggccatgacttctgcgccagctgctacagcggtagcgcaacctggtgctggtatcccacccccaggtgggaatctccagaggcaaggttcgttgacgttgcctagaacaattagtcagaagactgttgatgaggtgtggaaatgtttgatcaccaaggatggtaatatggaaggtagcagcggaggcggtggtgagtcgaatgtgcctcctggaaggcaacagactttaggggaaatgacacttgaagaatttctgttccgtgctggggttgtaagagaagataactgtgttcaacagatgggtcaggtcaacggaaacaataacaatgggttttatggtaacagcactgctgctggcggcttaggttttggatttggtcagccaaatcaaaacagcataacattcaatggtactaatgattctatgatcttgaatcagccacctggtttagggctcaaaatgggtggaacaatgcagcagcaacaacaacaacagcagttgcttcagcagcaacaacagcagatgcagcagctgaatcagcctcatccacagcagcggctgcctcaaaccatttttcctaaacaagcaaacgtagcattttctgcgcctgtgaatataaccaacaagggttttgctggggctgcaaataattctatcaacaataataatggattagctagttacggaggaaccggggtcactgttgcagcaacttctccaggaacaagcagcgcagaaaataattctttatcaccagttccgtatgtgcttaatcgaggacgaagaagcaatacaggtctagagaaggttatcgagaggaggcaaaggagaatgatcaagaatcgggaatcagctgctagatcaagagctcgaaagcaggcttatacattggaactggaagccgaaattgaaaagctcaagaaaacgaatcaagaactgcagaaaaaacaggctgaaatggtggaaatgcagaagaatgagcaaaaggcaatgcttgagaaggacattaaccggaccatggtgaaggatgaagcaacaagaacggatgaaccagactcctag

SEQ ID NO: 1741 - DNA, 1374 bp, Arabidopsis thaliana
  Clone ID: AT_MKP6.C1.o16.tg
atgtctctccaacgacccaatgggaactcgagttcgtcttcttcccacaagaagcacaaaactgaggaaagtgatgaggagttgttgatggttcctgacatggaagcagctggatcaacatgtgttctaagcagcagcgccgacgatggagtcaacaatccggagcttgaccagactcaaaatggagtctctacagctaaacgccgccgtggaagaaaccctgttgataaagaatatagaagcctcaagagattattgaggaacagagtatcagcgcaacaagcaagagagaggaagaaagtgtatgtgagtgatttggaatcaagagctaatgagttacagaacaacaatgaccagctcgaagagaagatttctactttgacgaacgagaacacaatgcttcgcggaatgttgccgttgctggctctaagcgccgtcgcggagtactatagactaccgtggaaaccaccggtgacggcgagtctcctggccgcgaacactctcgtttatctcaggccggcgtttatcgatcccgttattcctcacatcagtgaggtctggttcaatcctcacctcatcttcaagcataaggacttgaagcgtttatttctatcagcgttctaccatgttaacgagcctcacttagtctataacatgatgtcacttctctggaaaggtatcaagcttgagacatcaatgggaagcagtgagtttgcttcaatggtctttactcttattggtatgtctcaaggagtcacattgttgttagccaaatcgcttcttctcttgtttgactatgacagagcttactacaacgagtatgcggttgggttctcgggtgttctctttgctatgaaagttgttcttaattctcaagctgaggattactcaagtgtgtatggtatcttggttccaacaaagtatgctgcttgggcagaattgattctagtgcagatgtttgtacctaacgcttcgtttcttgggcatttgggtggaatccttgctggtattatctatttgaagctgaaaggttcttactcaggctcagatccagtcactatggcggttagaggtgtatctcgattggtgacgtggcccttgaggtttctgaatggtatggttaggtctcggagaaggaggattacggggagaggaagagtgggaagaggtcagactgggatagcaggacctggtatttggagatgtcagtcgtgtacatatgacaattctggttggttaagtgcttgcgagatgtgtggctcgggacgggctagaggaaatggatggtcactgaatcagggaccagcactttcttcttctaatgatctccctttagatgagctgcgccgtcgaagagtagagaggtttagttga

SEQ ID NO: 1742 - DNA, 621 bp, Arabidopsis thaliana
  Clone ID: AT_mae1.C1.o80.tg
atggagtcgtctagtgtccatcgctctcattgtttcgatattcttgatggagtcccactacacgacgatcatttcaactcggcattcctaccaaacactgactttaatgttcatttgcagtcaaacgtatcgacccgcatcaacaatcagtctcacttagacccaaatgcagaaaacattttccataacgaaggtcttgctccagaagaaagaagagcaagaagaatggtctctaaccgggaatctgcaaggaggtcacgtatgcgcaaaaagaagcagatcgaagagctgcaacaacaagttgaacaactcatgatgttgaatcatcacttgtctgagaaagtcatcaacttgttggaaagcaaccatcagatcctacaagagaactcacagctgaaagagaaagtctcttcctttcacttgctcatggcagatgtgctattacccatgagaaatgcagagagcaacatcaatgaccgcaatgtgaattatctaagaggagaaccatcaaaccgtcccaccaacagtccctttgccagtagtactatgattgatgccatgtatgcgactagtgactactacagtagcaattacttacttgcatttgtatgtagatactag

SEQ ID NO: 1743 - DNA, 1113 bp, Arabidopsis thaliana
  Clone ID: AT_MBD2.C1.o11.tg
atggatagttactggagacttaaaaacttggtgaatgatttgccagttagtacttctttaagccgacaaggatcaatatactcatggacagtagatcagtttcagaccagcttagggttagattgtggatcaatgaacatggatgagttggttaagcatatatcaagtgctgaagaaacacaagaggggtcgcagaggcaaggctcaactactctgcctccaacacttagcaaacaaaatgttggtgaagtttggaaatctatcacagaggaaaaacacaccaataacaatggaggagtaacaaacattactcatcttcagggacaacaaaccttaggggaaatcactcttgaagagtttttcatccgtgctggagcaagaggaggtaataccaatggtggctccattcatgactcatcgtcatcgatttccggtaatccacacactagtttgggtgttcagattcagccaaaagccatggtttctgattttatgaacaatatggttccaaggagtcatgattcttatttgcatcaaaatgtgaatggatctatgtcaacatatcaaccacaacaatctatcatgtctatgccaaatggttattcttatggaaaacaaatccgattctcaaatggttccttgggatctggtaaccaaagtctccaagatacgaagagaagcttggtcccaagtgttgcgacaattccaagtgaagccataacatgttcaccggttaccccatttccaacattaaatgggaaacaaaagattaacggtgagtcttcattactctcaccatctccatacattagtaatggtagtactagtacaagaggtgggaagattaatagtgaaattaccgcggaaaaacaattcgttgacaaaaagcttaggagaaagattaagaaccgagaatccgcagcgagatcacgggctcgaaagcaagctcaaactatggaggttgaagttgaacttgaaaacttaaagaaagattatgaagagctactaaaacaacatgtagagttgcggaaaagacaaatggaaccaggaatgattagccttcatgaacgaccggagagaaagctgaggagaacgaaatcggacatcaagtga

SEQ ID NO: 1744 - DNA, 684 bp, Arabidopsis thaliana
  Clone ID: AT_T20K9.C1.o6.tg
atgatgtctactgtaccggcctttacctttactgaaccgggtttggttaaccaattatcggatttccagaccggattcactccttgggaattgaactgctccgatctcttctctacaatccatctcgaaccggtcgtaccgagtccttgttctggtgaatccgatgccggttctgtcaaaattaacaccgattttaacggttttgacgaatcgtgtatcggttccatcaaaactaactccggttctgatgattccaaccttttccacggcgtaccgagtcctcaatccgacgaattggactcaaaaaacacgaaaatccgaagtaacgccacgaatcataaccggaacaaattgaaccggtcggttttgcaggtgactgacgaccgtaaacgcaaacggatggaatcaaaccgagaatcagcgaagcggtcgaggatgcgtaaacaaagacacattgataatttaaaagacgaagcaaatcgtctcggtttagaaaaccgggaactcgcaaaccggcttcgaattgttttgtacaacatcgcattaatgtgtacggacaacaatcagcttttgtcggaacaagagattctcagacggagattcttggagatgaggcagattttgattttcagacagcttcagctgaatccatcattgatcatcaatcatcatcatatgatttga

SEQ ID NO: 1745 - DNA, 474 bp, Arabidopsis thaliana
  Clone ID: AT_F4F15.C1.o70.tg
atgaatgaggaagaagataaagatcaagatcgagtaacgagaggatgtagtcacactcatagctgtaaccctccaggcccagaggatgcttctcactcccacacatgcttccacgctcacactcatctcatcatctctcaggatcagcaagagaatgatcattctgacagtagcaacaagaaacggttatgtggtaatagagaggcagtgaggaagtacagggagaagaagaaggctcgcactgcataccttgaagatgaagtgatgagattgcaatctctgaatgagcaattccttagaaaacttcagagccaagaaatggtggaaactgaattgatcagactccgggctcttctggtagagatgcaggggaaaattgaagttgaactttgtagtttctcgtttcagaaacaatgcaacggttctggttttgtgttcaaagaaggtgatttctcctactatttggtttactag

SEQ ID NO: 1746 - DNA, 432 bp, Arabidopsis thaliana
  Clone ID: AT_T30E16.C1.o6.tg
atggagacggttcataactgcttcaatgatgctacgataaccggtgatgaaatcattgatatattggcgtttcttcaatcagacgagtcggacaatccaagcggtataaacgaggtagtaccggtggatgataagaagagaagacggacgatatcaaaccgggaatcggccaagagatcgaggatgaaaaagaagaaacgttttgaagagttaactgaagaggtgaaccggttaaacataagaaatcaggagctgaaaaaccggttagctaatgttgttagttgtggtaattttatatctagggagaataaccggttgaaaaccgaatcggtttgccttgagataaggcttttagagttgtaccgttttttagtggccatgcaatcgccaatctcaacgagtgtaaattacatcacaacgctcgagatttaa

SEQ ID NO: 1747 - DNA, 834 bp, Arabidopsis thaliana
  Clone ID: AT_F6A4.C1.o10.tg
atggataatcacacagctaaagacattggtatgaagagaagtgcttctgagctggctctacaagagtatctcactacaagccctctagacccttgtttcgacctcatgaaccgggattacacttgtgagttaagagatagtcttttgtggtctgagggattgtttccggctggaccttttcgcgatgcacagtcctcaatctgcgagaatctgtcagctgatagtccagtgtcagccaataaacctgaggtaagaggaggagttaggagaaccacaagtggatcttctcatgttaactctgatgacgaagatgccgagacagaagcagggcaatctgaaatgactaatgatcccaatgatctgaaacgtattagaaggatgaactcaaacagggaatcagcaaagaggtcgaggagaaggaagcaagagtacttggtagatcttgagactcaggttgattctttgaaaggcgataactcaacactgtacaagcagctcatagacgcaacacaacagtttcgtagcgctggaacaaataacagagttctcaaatcagatgttgaaactctgagagtcaaggtgaaactagcagaagatttggtagcgagagggtcactcactagcagcttgaatcaacttctacaaactcatctaagtccaccatcacactccatcagcagtctgcactacacgggaaatacctcgcccgccattacagtccacagtgaccaatctttgttccctggaatgacactttctggacagaactcaagccctggacttggtaatgtatccagtgaagctgttagctgcgtctcagacatctggccatga

SEQ ID NO: 1748 - DNA, 1149 bp, Arabidopsis thaliana
  Clone ID: AT_F14J22.C1.o17.tg
atgggtactcacattgatatcaacaacttaggcggcgatacttctagagggaatgagtcaaagccattggcgaggcagtcttcgttatattccttaacgtttgatgagcttcagagcacattaggtgagccggggaaagattttgggtctatgaatatggatgagttactcaagaacatatggactgctgaggatactcaagcctttatgactactacatcttcggttgcagccccgggacctagtggttttgttccgggaggaaatggtttacagaggcaaggctccttgaccttgcctagaacgcttagtcagaagactgtcgatgaagtctggaaatacctgaattcgaaagaaggtagtaatgggaatactggaacggatgcgcttgagaggcaacagactttaggggaaatgactctggaagatttcttactccgtgctggcgttgttaaagaagataatactcagcagaacgaaaacagtagtagcgggttttatgctaacaacggtgctgctggtttggagtttggatttggtcagccgaatcaaaacagcatatcgttcaacgggaacaatagttctatgatcatgaatcaagcacctggtttaggcctcaaagttggtggaaccatgcagcagcagcagcagccacatcagcagcagttgcagcagccacatcagagactgcctccaactatctttccaaaacaagcgaatgtaacatttgcggcgcctgtaaatatggtcaacaggggtttatttgagactagcgcagatggtccagccaacagtaatatgggaggagcagggggtactgttacagctacttctcctgggacgagcagtgcagaaaacaatacttggtcatcaccagttccttacgtgtttggtcggggaagaagaagcaatacgggcctggagaaggttgttgagagaaggcaaaagagaatgatcaagaatcgggaatccgctgctagatcaagggctcgaaaacaggcttataccttggaactggaagctgagattgaaagtctcaagctagtgaatcaagatttgcagaagaaacaggctgaaataatgaaaacccataatagtgagctctattgtcattttgatgacacacagttcactgatactagtacttga

SEQ ID NO: 1749 - DNA, 786 bp, Arabidopsis thaliana
  Clone ID: AT_F2J6.C1.o5.tg
atgtccgttgattcggaagaaacctcatcgaacggtgttgttcctcctaattctcttcctccaaaacccgaagctagattcggtcgccatgttcgtagcttctcggttgattccgatttcttcgatgatttgggtgttactgaggagaagtttatagctacaagttcaggagagaagaagaaagggaatcatcatcatagcaggagtaattctatggatggagagatgagttcggcgtcgtttaatatcgaatcgattttagcttctgtgagtggtaaagatagtgggaagaagaatatgggtatgggtggtgatagacttgctgagcttgctttgcttgatcctaaaagagctaaaaggattttagcgaatagacaatctgcggcgaggtcgaaagagaggaagattaggtatactggtgagttagagaggaaggttcagacacttcagaatgaagctactacattgtctgctcaagtcactatgttacagagaggaacatcagagctgaacactgaaaataaacacctcaaaatgcggcttcaagctttagagcaacaagctgaacttagggatgctttgaatgaagcgctgcgggatgaactgaaccgacttaaggtggtagctggagaaattcctcaggggaatggaaattcttacaaccgtgctcaattctcatctcagcaatcggcaatgaatcagtttgggaacaaaacgaaccaacagatgagtacaaacgggcagccatcgctcccaagctacatggatttcaccaagagaggctga

SEQ ID NO: 1750 - DNA, 522 bp, Arabidopsis thaliana
  Clone ID: AT_MQP15.C1.o3.tg
atgcagccgcaaacagacgttttcagcctccataactacctaaactcatcgatactgcagtctccgtatccttctaatttcccgatatctacgccatttccaaccaacggtcaaaacccgtacctcctctacggattccaaagccctacaaacaatccacaatccatgagcctaagcagcaacaactcaacatcagatgaagcagaagagcagcagacgaacaacaatataatcaacgagcggaagcagagaaggatgatttcaaaccgagaatccgcaaggagatcgcgtatgaggaagcaaagacaccttgacgagctttggtcacaagtgatgtggttaaggatcgagaatcatcagttgcttgataagcttaacaatctctctgagtctcacgacaaggttcttcaagagaatgctcagcttaaagaagaaacatttgagcttaagcaagtgatcagcgatatgcaaattcaaagccctttctcttgctttagagacgatataatccccattgaataa

SEQ ID NO: 1751 - DNA, 1863 bp, Arabidopsis thaliana
  Clone ID: AT_T5P19.C1.o310.tg
atggcggaaccagttttggaggacacttatcttactttctcttccgatttcgattacatcgcgatcgctccttctccctttgataatttctgcaattctaactctgatcaagttcggaactcgatctctgatctgaggtttttgattgacgacgacgacagtttcgacgatctctacttcccttctgagaacgaatcgttctgcattcctcctgacgctacgaaacgagaaatgtctggtgactttacgccggcgtcgggaatttcaggcgattgtgttaacgaagacacggagaagaatacgaatggcgtgttaatatctacttcaagctgctacaatagagaatcacctacggattctgatttctccggtactagtcagagcttgagtttttcggggcaagattctgccaagaggaaaacagagattgaagaagattcaagcgacgaatccaggagattgggtaaagatggttttgcaagtgttataaaagttggtggtgaagaagatgatgagaagaagaagaacgtgagactagttagaaaccgtgaaagtgctcacctttcaagacagaggaagaagcattacgtggaggagcttgaagataaagttaagaatatgcattccactatatcggaattgagcagtaagatgtcttatttcgtggctgagaatgtcactttgaggcaacagatgggcacaaggttctcaagtggaccaccgatggttccaattgtttatccatggatgcagtatccggcttatatggttaaaccacaaggttctcaagtggctttgcttcctattcctcggttgaaaccaaaacattctgttgctaaggtgaagaagttcaagaaggttgctagttttagtgtttttggttttctgttttgtatgtttttgtttggtgcattggtgaacattagctatggggagtataagtctaactatgttactgacggggtttatgatcagtctagaggaagagttttggttgttgatagtagtagagtacattgtgggggagattctgatcaaggagtgggaagaaacgtatctgaaacagagaatttggggcctcctcgaaatagtagtgaacctctagttgcatcgctatttgttccgaggaatgaaaagcttgtcaagatcgatggaaatttgattattcattctgttttggcgagcgagaaagccagggattctgaaacaaagaacgaagaagggaaaagtgttctagcaactacaactaaaactttatctcctgcattgcctttacctgactccacaagcccaaggaccagggatgtgtctaagcacctctatagcgaaacggggaaaggcctgtcatcttctggttctgatgatgcttcgaacgaccaactcaaatcaacaatagccaatggtaaaatgcagcaatggtttcgtgaaggtgttgcagggccaatgttcagttcggggatgtgcactgaagtgtttcagtttgatgtctcctcaaactcaggagccatcattcctgcttctccacatactcaacagtgtaagaacaccagtgatacacaaaaggggaaaaagaacagaagaatcctcagtggtggtcttccggtatctgactttaatcttaccaaagaagatcataacagctctagcaaagacaagttccgggaaaccaagccaggcccatcaatggtagtgtctgtgcttgttgatcccagagaaggcggtaatggagacatcgatgggatgatgggaggaacaaaaccacagtcccgagttttcatagtcgtgcttgtggacggtgtgaagtatataacatactcttgcgttcttccacgaccagatgtccctcatctcatgaccagttga

SEQ ID NO: 1752 - DNA, 1662 bp, Arabidopsis thaliana
  Clone ID: AT_T9A14.C1.o180.tg
atgggtgatacagagaagtgtaacagtgatatgatccagagacttcattcatctttcggcactacttcttcttccattcccaaaaatcccatttctcagctcgatttaaaccctaatttcatccgctcatcagctcctcaattctccaagcctttcagtgacagtggcaaacgaatcggtgttcctccgtcgcaccccaacttaatcccaccgacttctccgttttctcagatcccgaccacccgacaacccggttcgcataattttaacccgggaggagctaatcattcacggtcaatgtcacagcccaactctttcttctcttttgactccttacctccgttaagcccttctccgtttcgagatcacgatgtttcaatggaggatagagattccggcgtgtttaacagcaaccattcgttgcctccatcgccgttcacgaggtgtaattcgacctcttctagctccttgagagtcggtgagagtttacctccgagaaagtctcatagacgctccaacagtgatatccccagtgggtttaattcgatgcctttgatccctccgagaccattggagaggtctttttctggtggggagtgtgctgattggtcaaagtctaatccttttgtgaagaaggaatcgagctgcgaaagggaaggtgtcggagagagagaagctatggatgatctcttctcagcatatatgaatcttgaaaacattgatgtgttgaactcctctgaagctgatgatagcaagaacggtaatgagaatagggatgatatggagagcagcagagcaagcgggaccaagactaacggtagtgatacggaaggagagagcagcagtgtcaatgagagtgccaataataatatgaattcttctggtgaaaagagagagagcgtgaagagaagagcggctggaggagatattgctcctaccaccagacattacaggagtgtttcagtggacagttgtttcatggagaagttgtcttttggtgatgaatctctaaagccgcctccttctcctggatctatgtcaaggaaagtttcccctaccaattcggttgatgggaactcgggtgctgcttttagcatcgagttcaataacggtgagtttactgcagcggaaatgaagaagatcatggcaaatgataaactagcagagatggccatgtctgaccctaaacgtgtcaaaaggaatgatcctcttttcagaatcttagcgaaccgtcaatccgcagcacggtcaaaggagaggaagatgcggtacatagtagaattggaacacaaagtgcagactcttcagaccgaggctaccacattgtctgctcagctcacacttttgcagcgcgatatgatggggttgacaaatcagaacaatgagcttaagttccggcttcaagcaatggagcaacaagcgcgtcttcgcgatgctctgaacgaagcactgaatggagaagtccagcgactgaaactggcaatcggtgagagcagtcagaacgaatcagagagatcaaagatgcaatcactcaacgctgagatgttccagcaactcaacatcagccagttaagacagcagccacaacagatgcagcaacagtctcatcagcagaaccaccagaatggaaccatggcaacaaaatctgaatcaaatgaatag

SEQ ID NO: 1753 - DNA, 1416 bp, Arabidopsis thaliana
  Clone ID: AT_F18O14.C1.o33.tg
atggagttggagcctatatcatcgagttgttgctcgtcgtcttcttcttcttctggggaggagaatactgcggcggcgaacatgacggagatggaggcggcagaagcattggcggatttagcgcagcttgcgataatgcgagagcaggttttcgaatctgcagcgagttggggaagtaaagggaaacgggtgaggaagcgagtcaagactgagtctcctccttctgactcgcttttgaaaccacctgactctgatacgttacctactccggatctagctgaggaacgattagtgaaagaagaagaggaagaagaagaagttgaaccaataactaaagaactaactaaagctccggttaaatctgaaatcaatggtgaaacacctaaaccaattcttgcttcgactctaataaggtgtagtagatcaaatggttgtggccgatcaagacagaatttaagtgaggctgaaagagaagaacgtagaatcagaaggatattagctaatagagaatctgcgaggcagacaattcggcgaagacaggcaatgtgtgaggagttgagtaaaaaagcagctgatctgacatatgagaatgagaatttgaggagggaaaaggattgggctttgaaagagtttcagtctttggagacgattaacaagcatttaaaggaacaggtattgaagtcagtaaaacccgatacaaaagagcctgaagaatcacccaagccatcacaagttgagatgtctacatcatctactccgttttacttctacaaccagaatccatatcagcttttctgctggcctcatgttactcaatcatcaaatccaatgatatcgccacttgaattccctacttcgggaggagcttctgctaaaactattaccacgcaggagcatgaaaatgctgcagatgataatgggcaaaaaactcacttttacgttgtaccttgcccttggtttctccctcctcctgatcacagcaatggtgttcctttcgggcttcaagatacacaaagaggtactttttcaaacgggcaccatatcgatgattcttctgcaagaccgatggatgtcacagaaactccgcggtcccatctaccaactagaatcaaagaagaggactctggttcacccgaaaccagacctttatatgatctcaacgaatctgctactgaagtcctctcagaaggaggagatggatttcctgtaacgcagcaagcttatagtttaaagcatgaagatgtttctgagacaactaatggagttacactgatgccgcctggtcatcatgttttgatttctctaccggagaaaaagcatggatcgttggctgcagcggaagctagaaagagacggaaagaactcacaaggctcaagaacctccatggccgtcaatgtcggatgcaggtcggataa

SEQ ID NO: 1754 - DNA, 1593 bp, Arabidopsis thaliana
  Clone ID: AT_T22D6.C1.o80.tg
atggatgatctgttacaccagcgagtcgagcagtctcaggtaactcctcctcatgacgattctaatatccatggtgattttgataacgaggctacggatgaatcgcgatccgaaacttgttctgttgtgatagagggaaactgcgacatggtgattgaattaggattggaatctggaagtgttatcgttgagaatttaggtgatagtgatattgatgttagcaatgattttgatgaacctgatgacgacgatttctttgtggggaggactgattttgggctcgagttccgcgatattgcatcttcggggaatgatatcaggttgattacggtggaatcgggttcagatgatgatgatggtgttgagaatgagagggaattatgggggattgatctgaatgaagaagatgtatatgtgaatgatgatgatgaatatgaagatgatgatgttagtgtgactatccctctttgttgggattcactccaattagaagatcgtgaggtaactgctgatgaatttgattgggaagaagttggtggtggtggtggtggcggcgtggatgatgagagagagatacgaagtggctttgcacaaattgatatgaatgacgaaagtttgatttctgcttcgccaattatctctttagagggtttagtgacaagggaaagagcagagggttcgggaaatctagggtgggaagttttactgaatcacactctagagatcaactttgatgtggataacagagagctgtacattggtggtgatcatgacgattatgttcaagactatgatatgttgtttgaacagtttgccgatgctgaggtatccgttattggtttacctccgacttccaaatcttttctcaacaatctcccagtggttctactagaaggtgagaacgatgatgatggtggtttggtttgtgcagtttgtaaagatgagatgaatatcggaaacaaagcggttcaactgccatgtaatcataagtaccatagcgaatgcattgtaccgtggctcaaagtaaggaacacatgtcctgtttgtcgttatgagttgcctacagatgatgcagagtatgagcagaggaagactcagagaacaacaaatacttttggcatgcctcataatttcaatcttttagaagggactccatcgcgtaacaataatttcaactcaatgttccaacaaaacttacatgatgaagacgacgtccatgttcaagaccatgtctacaatcatgaccagtaccatcatcaacaaccgaatgttgtgacggatgaagagaagaggttaaggagaatggcgtctaatcgagaatcagcaagaagaacgcggatgcgtgagcggatgatgaaagaggggttgcaaatgcaagtaaaacaactcatggcgtacaatcaattcttgtataacaaatatattagcttgttggagtacaatcaccagatcttgcaagagaattcacagctcaaagagacagtttcatcctttcatgatcaatatactatatcttatggaaaccatgaaggtatacttggaaacaccaatgatttcgatttaaaccaactatcttcgtatcaaccatcttaa

SEQ ID NO: 1755 - DNA, 768 bp, Arabidopsis thaliana
  Clone ID: AT_T24I21.C1.o18.tg
atggacgacggtgagcttgagttttcgaattcaaacatgggtggtgaattacctagctgttcgatggattcgttcttcgatgagcttttgagagattctcatgcttgtactcatactcacacttgtaatcctccgggaccagagaacacacatactcacacatgtctccatgtgcacaccaagattcttcctgacaaagtttctactgatgatacatcggaatcttcagggaagaagagacctttagggaatagagaagcggttagaaagtatagggagaagaagaaggctaaagcggcttcgttggaggatgaggttatgaggcttaaggcggttaataatcagctgttgaagaggttgcaaggtcaagctgcattggaagctgaggttactaggctcaagtgtttgcttgttgatataagaggaagaattgatggagagattggtgcgtttccttatcagaaacctgcggttacaaacgtgccttactcatacatgatgcatccttgcaatatgcaatgtgatgttgataacttgtactgccttcaaaatgggaataatggagaaggtgcatcgatgaatgagcaagggctaaatggttgtgagtttgatcagctagaatgcttggctaatcagaatttagctggcaaggagatccctgtttgtagtaatggaattggaacattcactgtcaatggatccggcgttaataagagaaaaggtgacattctagttcctttggatctctttcctagaggctgtccttaa

SEQ ID NO: 1756 - DNA, 936 bp, Arabidopsis thaliana
  Clone ID: AT_T32B20.C1.o60.tg
atggaaaaagttttctccgacgaagaaatctccggtaaccatcactggtcggttaatggaatgacgtcgttgaatcgcagtgcttccgaatgggcattcaatcgtttcatacaagaatcctccgccgctgcagacgacggagaatctacgacggcgtgtggtgtttccgtctcctctcctcctaatgttcctgtagattcagaggaatacagagcatttctcaagagtaaacttaatcttgcttgtgctgctgtcgccatgaaaaggggaactttcatcaaacctcaggatacttctggtagatctgacaatggtggagccaatgaatcagaacaagcctctcttgcttcttccaaagctacaccaatgatgagcagtgctataacaagtggatctgagctctctggtgatgaagaagaagctgatggtgaaactaatatgaaccctactaatgttaaacgcgttaaaaggatgctctctaatagagaatcagctagacggtccagaagaagaaagcaagcacacttgagtgagctagagacacaacttcgtgtagagaattcaaaactcatgaagggtctcactgatgtaactcaaacattcaatgatgcatctgtagaaaacagagttttaaaagccaatattgagacactacgagcaaaggtgaaaatggctgaagagacagtgaagagactcactggctttaacccaatgttccacaatatgcctcagattgtttcaactgtctctcttccttcagagacatcaaattctccagacactacaagcagccaagtgactacaccagagatcattagctcggggaacaaaggcaaggccttgatagggtgcaagatgaacagaacagcttcgatgcgtagagttgagagcttggaacatctgcagaaacgtattcgaagcgttggggatcagtag

SEQ ID NO: 1757 - DNA, 621 bp, Arabidopsis thaliana
  Clone ID: AT_T6D22.C1.o17.tg
atggtgtcgtcaaagaaacccaaggagaagaaggcgaggagcgatgtcgtcgtcaataaagcgagtggtcggagtaaacgcagctccggttccagaacgaagaagacgtcgaacaaggttaacattgtgaagaagaagccggagatttacgagatctcagaatcatcgagcagtgactctgtggaagaagcaataagaggcgatgaggcgaagaaaagtaacggcgtcgtgagcaagaggggtaacggaaagagtgtaggaattccgacgaagacgagtaaaaatcgagaagaggacgatggaggcgcggaagatgctaagatcaagtttccgatgaatcggattcggcggatcatgagaagcgataattctgctcctcagattatgcaggatgctgtatttcttgtcaacaaagccacggagatgttcattgagcggttttctgaagaagcttatgatagttccgtcaaggacaaaaagaaattcatccactacaaacacctctcatccgtagtgagtaacgaccagagatacgagttccttgcagatagtgttcccgagaaacttaaagcagaggccgcgttggaggaatgggaaagaggcatgacagatgcaggctga

SEQ ID NO: 1758 - DNA, 462 bp, Arabidopsis thaliana
  Clone ID: AT_T22P11.C1.o150.tg
atggattccggaaccaaagtgaagaaaggagccgctggaagaagaagtggtggaggtcctaagaagaaaccggtttcccgttcggttaaatccggtctacagtttcctgtcggtaggatcggtcggtatcttaagaaaggtcgttattcgaagcgtgtcggaaccggagctccggtctatctcgccgccgtcctcgagtatcttgctgctgaggttctcgagcttgctggtaacgctgcaagagataacaaaaagaaccgtattataccacgccatgttctattagcggtgaggaacgacgaggagctagggacactactcaaaggcgtaaccattgcacacggcggtgttttaccaaacataaacccaatactcctcccaaagaagtctgagaaagcagcttcaactacaaaaacacccaaatcaccatcaaaggcaaccaaatcccctaagaaatcttag

SEQ ID NO: 1759 - DNA, 429 bp, Arabidopsis thaliana
  Clone ID: AT_T22H22.C1.o12.tg
atgagttccggcgccggcagtggaacaactaaaggtggcagaggaaagccaaaagctacaaagtccgtctctcgatcttctaaagctggtcttcaatttcccgttggaagaatcgctagattccttaaagccggtaaatacgccgaacgtgttggtgccggtgctcccgtttatctctccgccgttctcgaatacctcgccgctgaggtattggagctagctggaaatgcagcaagagataacaagaagacacgtatcgtaccacggcacattcagcttgcagtgaggaacgatgaagagcttagtaaacttcttggaagtgtaacaattgctaatggaggagttttgcccaacattcatcagactcttctcccatcaaaggttggaaagaacaaaggcgatatcggatctgcttctcaagagttttaa

SEQ ID NO: 1760 - DNA, 894 bp, Arabidopsis thaliana
  Clone ID: AT_T2E22.C1.o121.tg
atggttgctgtttcttcatttgatgcatatattacaatttttcaggctcgtattaaaaagattatgcaagctgatgaggatgttggcaagatagctttggcagtgcctgtcttagtctcaaaatctttggagttgttcttgcaagacctttgtgatcgtacatatgaaattacccttgaaagaggtgccaagactgtgagctcattgcacctaaaacattgtgtggaaagatataacgtgtttgattttctgagggaagttgtgagtaaggtgcctgactatggccattcccaagggcaaggacatggtgatgttaccatggatgatcgcagcatctccaagagaaggaagcccatcagcgatgaagtgaatgacagtgacgaggaatataagaaaagcaaaacgcaagagatagggagtgctaagaccagtggcaggggtggtagaggaagagggcgaggaagaggtcgtggtggacgagctgcaaaagcagccgaaagagagggtctcaaccgcgagatggaagtagaagccgccaattctggacagccaccaccagaagacaatgtcaagatgcatgcgtcagagtcatcaccacaagaggatgagaagaaaggcatcgacggcacagcagcatcgaacgaagacaccaagcaacaccttcaaagtcccaaagaaggcattgactttgatctcaacgctgaatccctcgacctaaacgagaccaaactggcaccagccacaggcacaaccacaaccacaactgcagcaacagactctgaggagtattcgggctggcctatgatggacataagcaaaatggatccagcacagcttgctagtctgggtaagaggatagacgaggatgaggaagattatgacgaagaaggctaa

SEQ ID NO: 1761 - DNA, 456 bp, Arabidopsis thaliana
  Clone ID: AT_T11P11.C1.o3.tg
atggcaccaaaagccggaaagaaaccagcagagaaaaagcccgcagagaaagctccagcagaagaagagaaagtagccgaaaaagcaccagcagagaagaaaccaaaagccggaaaaaaactaccaaaagaagcagtcaccggaggagtcgagaagaagaagaaacgagtcaagaaaagcacagagacatacaagatctacatcttcaaggtgttgaaacaagttcatccagatattggaatctcaagtaaagctatggggattatgaacagttttatcaatgatatattcgagaaacttgcgcaagaagcttcaaaattagctaggtataataagaaacctacgattacttctagggagattcagacagctgttagactagtgttacctggtgaacttgctaagcatgctgtttctgaaggaactaaggctgttactaagtttactagctcttag

SEQ ID NO: 1762 - DNA, 732 bp, Arabidopsis thaliana
  Clone ID: AT_T23G18.C1.o3.tg
atggcgccgagaaaaccaaaggttgtttccgtgacgaagaagaagaaagtagtggaagagacaatcaaagtaaccgtcacggaagaaggagatccgtgtgtgatcaccgagacagcgaacgatcaagagacgcaagatctcactttctccattcccgtcggagaaaacgttactaccgttgagattccagtggaggttccagacgaacggtcacttcccgtcggagaaaacgttaccaccgttaagattccggtggatgatcgagatgaaagttcacctcagccgccggagactccggtggaggttcgagatgaaccttcacctcagccaccggaaactcccgcttccaagagtgaaggcactttgaagaaaacagataaggttgagaagaagcaggagaataagaagaagaagaaaaagaagaagagagacgatttggcgggagatgagtataggagatatgtgtataaggtgatgaagcaagtgcatccggatttaggtataacgtcgaaggcgatgacggtggtgaacatgttcatgggagatatgttcgagaggatagcgcaggaggcagcgaggttaagcgattatacaaagcggaggacgttgtcttcgagggagatcgaagcagcggttaggttggttctgcctggtgaacttagccgccacgctgtcgctgaaggctctaaagctgttagtaacttcgttggttatgatagtaggaaacgttag

SEQ ID NO: 1763 - DNA, 489 bp, Arabidopsis thaliana
  Clone ID: AT_T22D6.C1.o130.tg
atggatccgatggatatagttggaaaatcaaaggaagatgcttcgcttccgaaagctaccatgacgaaaattataaaggagatgttacccgcagatgttcgtgttgctagagatgctcaagatctattgattgagtgttgtgtagagttcataaatcttatatcgtcggagtcgaatgaagtgtgtaacaaagaggataaacgaacaatagcccctgagcacgtactcaaagctttacaggttcttggctttggggaatacgtagaagaagtttatgccgcgtatgagcaacataaatatgaaaccatggattcgcagagaagtgtgaagatgaatagcggagcagagatgacggaagaagaggcggcagcggaacaacagaggatgtttgcagaagctcgagcaagaatgaatggaggtgttacagttcctcaaccagagcaactagaagaaccccaacaacaacaacaaacaagtctacaaagctaa

SEQ ID NO: 1764 - DNA, 618 bp, Arabidopsis thaliana
  Clone ID: AT_MNJ7.C1.o26.tg
atggcagagggcagtatgcgtcctccagaattcaaccagcctaacaaaaccagtaatggtggtgaggaggagtgcacggtgagggagcaagacaggttcatgcctattgccaacgtgatacggatcatgcggaggatcttacctgctcacgccaagatctcagatgactccaaggagacgatccaagagtgtgtttcggagtacatcagcttcataacaggggaggctaatgagcggtgccagcgggaacagcgcaagaccatcactgctgaggacgtcttgtgggcaatgagcaagctcggttttgatgactacatcgaacccctcacgttgtacctccaccgctacagagagttggaaggtgaaagaggggttagctgcagtgctgggtccgttagtatgaccaacggcttggtggtcaagaggcctaatgggaccatgaccgagtatggagcctacgggcctgtgccagggattcacatggcgcagtaccattatcgtcatcagaacgggtttgttttcagtggtaacgaacctaattctaagatgagtggttcatcttcaggagcaagtggcgccagagttgaagtatttccgactcaacaacataagtactga

SEQ ID NO: 1765 - DNA, 564 bp, Arabidopsis thaliana
  Clone ID: AT_F14I23.C1.o70.tg
tatggagaacaacaacggcaacaaccagctgccaccgaaaggtaacgagcaactgaagagtttctggtcaaaagagatggaaggtaacttagatttcaaaaatcacgaccttcctataactcgtatcaagaagattatgaagtatgatccggatgtgactatgatagctagtgaggctccaatcctcctctcgaaagcatgtgagatgtttatcatggatctcacgatgcgttcgtggctccatgctcaggaaagcaaacgagtcacgctacagaaatctaatgtcgatgccgcagtggctcaaactgttatctttgatttcttgcttgatgatgacattgaggtaaagagagagtctgttgccgccgctgctgatcctgtggccatgccacctattgacgatggagagctgcctccaggaatggtaattggaactcctgtttgttgtagtcttggaatccaccaaccacaaccacaaatgcaggcatggcctggagcttggacctcggtgtctggtgaggaggaagaagcgcgtgggaaaaaaggaggtgacgacggaaacta

SEQ ID NO: 1766 - DNA, 561 bp, Arabidopsis thaliana
  Clone ID: AT_MBA10.C1.o4.tg
atggagaacaacaacaacaaccaccaacagccaccgaaagataacgagcaactaaagagtttctggtcaaaggggatggaaggtgacttgaatgtcaagaatcacgagttccccatctctcgtatcaagaggataatgaagtttgatccggatgtgagtatgatcgctgctgaggctccaaatctcttatctaaggcttgtgaaatgtttgtcatggacctcacgatgcgttcatggctccatgctcaagagagcaaccgactcacgatacggaaatctgatgttgatgccgtagtgtctcaaaccgtcatctttgatttcttgcgtgatgatgtccctaaggacgagggagagcccgttgtcgccgctgctgatcctgtggacgatgttgctgatcatgtggctgtgccagatcttaacaatgaagaactgccgccgggaacggtgataggaactccggtttgttacggtttaggaatacacgcgccacacccgcagatgcctggagcttggaccgaggaggatgcgactggggcaaatggaggaaacggtgggaattaa

SEQ ID NO: 1767 - DNA, 576 bp, Arabidopsis thaliana
  Clone ID: AT_MXA21.C1.o30.tg
atggaacctgttgcgcctcgttcacataacacgatgccaatgcttgatcaatttcgatctaatcatcctgaaacaagcaagatcgagggggtctcttcgttggacacagctctgaaggtgttttggaataatcaaagggagcagctaggaaactttgcaggccaaactcatttgccgctatctagggtcagaaagattttgaaatctgatcctgaagtcaagatatatgtgaattttcagaagataagctgtgatgttcctgctttgttttcgaaagcctgtgaatacttcattctagaggtaacattacgagcttggatgcatactcaatcatgcactcgtgagaccatccggcgttgtgatatcttccaggccgtaaagaactcaggaacttatgatttcctgattgatcgtgtcccttttggaccgcactgtgtcacccatcagggtgtgcaacctcctgctgaaatgattttgccggatatgaatgttccaatcgatatggaccagattgaggaggagaatatgatggaagagcgctctgtcgggtttgacctcaactgtgatctccagtga

SEQ ID NO: 1768 - DNA, 696 bp, Arabidopsis thaliana
  Clone ID: AT_F7G19.C1.o16.tg
atggatcaacaagaccatggacagtctggagctatgaactatggcacaaacccataccaaaccaacccgatgagcaccactgctgctactgtagcaggaggtgcggcacaaccaggccagctggcgttccaccagatccatcagcagcagcagcagcaacagctggcacagcagcttcaagcattttgggagaaccaattcaaagagattgagaagactaccgatttcaagaaccacagccttccccttgcgagaatcaagaaaatcatgaaagcggatgaagatgtccgtatgatctcggctgaggcgcctgtcgtgtttgcaagggcctgtgagatgttcatcctggagctgacactcaggtcgtggaaccacactgaggagaataagaggcggacgttgcagaagaacgatattgctgctgctgtgactagaaccgatatttttgatttccttgtggatattgttccccgggaggatctccgagatgaagtcttgggaagtattccgaggggcactgtcccggaagctgctgctgctggttacccgtatggatacttgcctgcaggaactgctccaataggaaatccgggaatggttatgggtaatcccggtggtgcgtatccacctaatccttatatgggtcaaccaatgtggcaacaacaggcacctgaccaacctgaccaggaaaattag

SEQ ID NO: 1769 - DNA, 639 bp, Arabidopsis thaliana
  Clone ID: AT_MBA10.C1.o2.tg
atggaagagaacaacggcaacaacaaccactacctgccgcaaccatcgtcttcccaactgccgccgccaccattgtattatcaatcaatgccgttgccgtcatattcactgccgctgccgtactcaccgcagatgcggaattattggattgcgcagatgggaaacgcaactgatgttaagcatcatgcgtttccactaaccaggataaagaaaatcatgaagtccaacccggaagtgaacatggtcactgcagaggctccggtccttatatcgaaggcctgtgagatgctcattcttgatctcacaatgcgatcgtggcttcataccgtggagggcggtcgccaaactctcaagagatccgatacgctcacgagatccgatatctccgccgcaacgactcgtagtttcaaatttaccttccttggcgacgttgtcccaagagacccttccgtcgttaccgatgatcccgtgctacatccggacggtgaagtacttcctccgggaacggtgataggatatccggtgtttgattgtaatggtgtgtacgcgtcaccgccacagatgcaggagtggccggcggtgcctggtgacggagaggaggcagctggggaaattggaggaagcagcggcggtaattga

SEQ ID NO: 1770 - DNA, 393 bp, Arabidopsis thaliana
  Clone ID: AT_MNL12.C1.o7.tg
atggaggaagaagaaggatcaatccgaccagagtttccaatcggaagagtaaagaagataatgaaactggacaaagacatcaacaaaatcaactcagaagctcttcacgtcatcacttactccaccgaactcttcctccacttcctcgccgagaaatctgctgttgttacggcggagaagaagcgtaagactgttaatctcgatcatttaagaatcgccgtgaaaagacaccaacctactagtgatttcctcttagactcgcttccgttgccggctcagcctgtcaaacataccaaatcggtttccgacaagaagattccggcgccgccaattgggactcgtcgtatcgatgatttcttcagtaaagggaaagcaaagactgattcagcctaa

SEQ ID NO: 1771 - DNA, 2331 bp, Arabidopsis thaliana
  Clone ID: AT_F24J8.C1.o5.tg
atggaactcttacttccacacccatcaaactcaactccactcaccgtcctcggcttcttagaccgagccgcttccgtctatggtgactgtccgtccatcctccacactgcaaacaccgttcatacttggtccgaaacacataaccgctgtctccgtatcgcatcggctctaacttcctcctctatcggaattaaacaaggccaagtcgtctctgtcgtgggtcccaacgtcccgtccgtctatgagcttcagtttgctgtcccaatgtccggagccatcttaaacaacatcaaccctcgcttagacgcacacgcactctctgtcctcctgcgtcacagcgaatccagactcgttttcgtcgaccaccgttctatatccttagtccttgaagcagtttcattattcacacaacacgagaaacctcacctcgtcctcctggacgatgaccaagagaacgattcttcatccgcatcagattttcttgacacgtacgaagaaattatggagagaggaaattcaagattcaagtggatccgtcctcaaaccgaatggcaaccaatggttcttaactatacttccggaacgacgtcgtctcccaagggagtggtacttagccacagagcgattttcatgctcactgttagctccttgcttgattggtcagtaccaaaccggccagtttacttgtggactctaccgatgtttcacgccaatggttggggttacacttggggcaccgcagcggttggagccaccaacatctgcacgcgtagagtcgacgcaccgactatttacaacttgatcgataagcacaatgtgacccacatgtgtgctgcacctatggttctcaacatgctaattaactatccattaagtacgccgctcaagaacccggttcaggtacatgaagagaaaaccggttcactgccggttatgacctctggagctcccccaccagcaaccattatctcccgagcggagtcacttggtttcaacgtcagccactcatacggtttaacagagactagcggtccggttgtgtcatgtgcttggaagcctaagtgggaccatcttgatccattggagagagctaggctgaagtcaaggcaaggagtaagaacactcggattcacggaagtcgatgtaagggatcgaaaaacaggaaagagtgtgaaacacgacggagtttcggttggagagattgttttcagaggcagctcagtcatgttgggatactacaaagaccctcaaggaactgcggcttgtatgagagaggacgggtggttctactctggagacatcggggttatacacaaagatggttacttggagatcaaagatcggtcaaaagatgtgatcatatgcggaggagaaaatataagcagcgcagagattgagacggttctgtatacaaatccggtggtgaaggaagctgcggtggtggctaaaccggataagatgtggggagagacaccatgtgcttttgtgagcttgaagtgtgataacaatggtgatggttcggttcccgtgaccgagagagagataagggagttttgtaagacgaagttacctaagtacatggttccgaggaaagtgatctttcaggaggaacttcccaagacttccacaggaaaaattcagaagtttttgctaagacaaatggctaagaccctggtttacgtgaggaagaagaaagcactaagttctgatgatttaaatggtacaaaggttctagaagctacagaagggacaggtggagaagaggttatagaagctgctagtgagtcaggtggattagaagcagcacagaaacgtggatcgaacacgcgaccttcagatgaatgggtattggtgccagagaaggtgttagatactcgttactcagctgaaggtgtgttagaagcgttggttcagtggcaaggcttaccaactcatgagacgtcatgggaactcaatagggtttacgtgaggaagaagaaagcactaagttctgatgatttaaatggtacaaaggttctagaagctacagaagggacaggtggagaagaggttctagaagctgctagtgagtcaggtggattagaagcagcacagaaaagagtgaatatcgatgagcacggtagaaaaagcggtggaggtggtggcgatacaggatggagagtggcggttggggccgaaacaagggagtgtgttcccaaaaaagaggatgctggtgaagtcaatgattatgaagactctcttttcatctcgatctcctttaaagtccaagcaaatagtggagcttccgaggaacaagcgcgtgcagtctacgctccggtagccttccaatga

SEQ ID NO: 1772 - DNA, 4500 bp, Arabidopsis thaliana
  Clone ID: AT_F28J9.C1.o18.tg
atggtgactacaaggtcgcaggagggtgacggaaaggggaaagaggtggagttggaggttccgctggattcccgagttacgcggttagaaacgacggtcgctgagcaacataaggagatgatgaagcagtttgctgatttgtatgcagtgcttagccgatctacagctggtaagatggtggatgagcaatcgacgttagatcggagtgcgccgaggtcgtctcagtcgatggagaacagatccggttaccttgatccatatcgtgatgctcgtcatcagcaggtgcgatcagaccattttaatgcttataataatcttacacggttagggaaaattgattttcctcggtttgatggtacacggttgaaagagtggttgtttaaagtcgaggagttttttggtgtggattcaactccagaagatatgaaggttaaaatggcagcgatccactttgatagccatgcctctacttggcatcagtcctttattcagtcgggtgttggtcttgaggtgttgtatgattggaagggatatgtgaagctgttgaaggaacgatttgaggatgattgtgatgaccctatggcggagctaaaacatttgcaggaaactgatggcatcattgattatcatcagaaatttgagctgattaaaacaagagttaatctctctgaagaatatttggtgagtgtgtacttggcaggactcaggacagacactcaaatgcacgtccggatgtttcagcctcaaactgtgagacattgcttgttcttgggcaagacatatgagaaagcacaccttaagaaaccagctaatactacttggtccacaaatcgttctgcacctactggcggttataacaaatatcagaaggaaggcgagtctaagacagatcattatgggaacaagggaaattttaaaccggttagtcagcaacctaagaaaatgtctcaacaagaaatgagtgataggaggtctaaagggctatgctatttttgtgatgagaagtacactccagaacattatttggttcacaagaaaacacaactgtttcgaatggatgttgatgaagagtttgaagatgctagagaagagttggtaaatgacgatgatgaacatatgccacaaatctctgtcaatgcggtttcaggaatagctggttacaagactatgagagttaagggaacatatgacaaaaagattatcttcatcctgatagactcagggtcgacacacaactttctggatccaaatacagcagctaaacttgggtgtaaggtggacacagctgggttaactcgtgtatctgtagctgatggcaggaaattgcgtgttgagggtaaagttactgatttctcttggaagttgcagactacaacttttcagtctgatatcttattgattcccttacaagggattgatatggtactaggggtgcaatggttggagactttgggtcgtatctcttgggaattcaagaaactggaaatgcgatttaaattcaataatcagaaagtacttttacatggacttacatcaggttctgtcagggaagtgaaggcgcagaaactgcagaaactacaggaagatcaagttcagctggccatgttatgtgtacaagaagtttcggagagtacagaaggggaactttgtactattaatgctttaaccagtgagcttggtgaggagtctgtagtggaagaagtactcaatgagtatcctgatatattcattgaaccgactgctttacctccatttcgtgagaagcataatcataagattaaattgttggaggggtctaatccggtgaatcagcgaccctatcgctattcaatacaccagaagaatgaaattgataaactggttgaggatttacttactaatggaacagtgcaagctagttctagtccttatgcttcacctgttgttttggtcaaaaagaaggatggaacttggagactttgtgttgactatcgtgagttgaatggcatgactgtaaaagatagttttcctattccattgattgaggatctcatggatgagttgggaggtgcagttatcttttccaagatagatcttcgggctggttaccatcaggtgcggatggatcctgatgatatacaaaagacagcatttaaaacgcatagtggccattttgagtacttggtcatgcccttcggactcactaatgcaccggctacgtttcaaggtctcatgaatttcatattcaagcccttcttacgtaagttcgtcttggtcttctttgatgacattctggtttatagttcttccttggaagagcatagacagcaccttaagcaagtgtttgaagtcatgcgagctaataagttgtttgccaaactcagcaaatgtgcttttgcggttcctaaagtcgaatatctaggacacttcattagtgcacaaggcattgaaactgatcctgcgaaaatcaaggctgtgaaggagtggcctcaaccaacaacactcaagcagttgagggggttcttgggtcttgctggttactatcgacgttttgtgcggagttttggggttattgcgggaccattacatgctttgactaaaactgatgcatttgaatggacagcagtagcacaacaagcgtttgaggatcttaaagcggccttgtgtcaagcgcctgtcttatctttgcctctgtttgataaacaattcgtggtagaaactgatgcgtgtggtcagggcataggggcggttttgatgcaagagggacatcctttggcttacattagtcgccaattaaaagggaagcaactacacctatctatctatgagaaagaattgctggcagttatctttgcagtccgaaaatggcgacactatttgctgcagagtcacttcataatcaagactgatcaaagaagtttgaagtatctattggagcagcgtttgaacacaccaattcagcagcagtggcttcctaaattgctcgagtttgactacgagatccagtatagacaaggaaaagaaaatgtagtggcagatgctttgtctcgggtagaaggatctgaggtgttgcacatggctatgacagtggtggagtgtgatttgttgaaggatattcaagcaggctatgccaatgactctcagttacaagatattattactgcacttcaacgtgatccagattcaaaaaaatatttctcttggagtcagaatatactgagaaggaaaagtaagattgtagttccagcaaatgacaacattaagaatacaatattgctttggttacatgggtctggtgtaggaggacattcaggcagggacgtgactcatcagcgtgttaaaggactgttttactcgaaaggcatgattaaggacatccaagcttatattcgcagctgtggtacatgtcaacaatgtaagtctgatcctgcagcttcaccggggttactccagccattaccaatccctgataccatttggagtgaagtgtcaatggattttattgaggggctaccagtttcaggaggcaaaacagtcatcatggttgttgtggatcgcttgagtaaggctgctcacttcattgcattatcacatccttatagtgcattgacagtagcacaggcttacttggacaacgtttttaagttacatggctgccccacttcgattgtcagtgacagagatgttgtgtttacaagtgaattttggagagagttcttcacgttacagggagttgcattgaagttgacgagtgcttaccatccccagagtgacggacaaactgaagttgtgaacagatgtttggagacctacttgcgttgtatgtgccatgacagacctcagttgtggagtaaatggcttgcattggcagagtattggtacaacaccaattaccactcttctagcaggatgacgccatttgagatagtgtatgggcaggtacctccagtccatttaccttatctgcctggggaatcaaaagtggcggttgtggctaggtctttgcaggagagggaagatatgttgctgttcttgaagtttcatttgatgcgcgctcaacaccgaatgaaacaatttgcagaccagcatcgaactgaacgtgaatttgagattggggattatgtctatgtgaagctgcaaccttaccgccaacaatctgtggtgatgcgtgctaatcagaagctgtcaccgaagtattttggcccatataagatcattgatcgttgtggtgaagtggcttataagttggctcttccttcttactctcaagtgcatcctgtgttccatgtttcgcagctaaaggtgctagtgggcaatgtctctacaacagttcatttgccttcagtgatgcaagatgtctttgagaaagtacctgagaaagtggtggaaaggaaaatggtcaatcgtcagggaaaagctgtcactaaagtgttggtgaaatggagcaatgaacctttggaagaagctacatgggagttcctcttcgatttgcagaaaacatttcctgagtttgaagcatag

SEQ ID NO: 1773 - DNA, 4500 bp, Arabidopsis thaliana
  Clone ID: AT_T21B14.C1.o124.tg
atggtgactacaaggtcgcaggagggtgacggaaaggggaaagaggtggagttggaggttccgctggattcccgagttacgcggttagaaacgacggtcgctgagcaacataaggagatgatgaagcagtttgctgatttgtatgcagtgcttagccgatctacagctggtaagatggtggatgagcaatcgacgttagatcggagtgcgccgaggtcgtctcagtcgatggagaacagatccggttaccctgatccatatcgtgatgctcgtcatcagcaggtgcgatcagaccattttaatgcttataataatcttacacggttagggaaaattgattttcctcggtttgatggtacacggttgaaagagtggttgtttaaagtcgaggagttttttggtgtggattcaactccagaagatatgaaggttaaaatggcagcgatccactttgatagccatgcctctacttggcatcagtcctttattcagtcgggtgttggtcttgaggtgttgtatgattggaagggatatgtgaagctgttgaaggaacgatttgaggatgattgtgatgaccctatggcggagctaaaacatttgcaggaaactgatggcatcattgattatcatcagaaatttgagctgattaaaacaagagttaatctctctgaagaatatttggtgagtgtgtacttggcaggactcaggacagacactcaaatgcacgtccggatgtttcagcctcaaactgtgagacattgcttgttcttgggcaagacatatgagaaagcacaccctaagaaaccagctaatactacttggtccacaaatcgttctgcacctactggcggttataacaaatatcagaaggaaggcgagtctaagacagatcattatggaaacaagggaaattttaaaccggttagtcagcaacctaagaaaatgtctcaacaagaaatgagtgataggaggtctaaagggctatgctatttttgtgatgagaagtacactccagaacattatttggttcacaagaaaacacaactgtttcgaatggatgttgatgaagagtttgaagatgctagagaagagttggtaaatgacgatgatgaacatatgccacaaatctctgtcaatgcggtttcaggaatagctggttacaagactatgagagttaagggaacatatgacaaaaagattatcttcatcctgatagactcagggtcgacacacaactttctggatccaaatacagcagctaaacttgggtgtaaggtggacacagctgggttaactcgtgtatctgtagctgatggcaggaaattgcgtgttgagggtaaagttactgatttctcttggaagttgcagactacaacttttcagtctgatatcttattgattcccttacaagggattgatatggtactaggggtgcaatggttggagactttgggtcgtatctcttgggaattcaagaaactggaaatgcgatttaaattcaataatcagaaagtacttttacatggacttacatcaggttctgtcagggaagtgaaggcgcagaaactgcagaaactacaggaagatcaagttcagctggccatgttatgtgtacaagaagtttcggagagtacagaaggggaactttgtactattaatgctttaaccagtgagcttggtgaggagtctgtagtggaagaagtactcaatgagtatcctgatatattcattgaaccgactgctttacctccatttcgtgagaagcataatcataagattaaattgttggaggggtctaatccggtgaatcagcgaccctatcgctattcaatacaccagaagaatgaaattgataaactggttgaggatttacttactaatggaacagtgcaagctagttctagtccttatgcttcacctgttgttttggtcaaaaagaaggatggaacttggagactttgtgttgactatcgtgagttgaatggcatgactgtaaaagatagttttcctattccattgattgaggatctcatggatgagttgggaggtgcagttatcttttccaagatagatcttcgggctggttaccatcaggtgcggatggatcctgatgatatacaaaagacagcatttaaaacgcatagtggccattttgagtacttggtcatgcccttcggactcactaatgcaccggctacgtttcaaggtctcatgaatttcatattcaagcccttcttacgtaagttcgtcttggtcttctttgatgacattctggtttatagttcttccttggaagagcatagacagcaccttaagcaagtgtttgaagtcatgcgagctaataagttgtttgccaaactcagcaaatgtgcttttgcggttcctaaagtcgaatatctaggacacttcattagtgcacaaggcattgaaactgatcctgcgaaaatcaaggctgtgaaggagtggcctcaaccaacaacactcaagcagttgagggggttcttgggtcttgctggttactatcgacgttttgtgcggagttttggggttattgcgggaccattacatgctttgactaaaactgatgcatttgaatggacagcagtagcacaacaagcgtttgaggatcttaaagcggccttgtgtcaagcgcctgtcttatctttgcctctgtttgataaacaattcgtggtagaaactgatgcgtgtggtcagggcataggggcggttttgatgcaagagggacatcctttggcttacattagtcgccaattaaaagggaagcaactacacctatctatctatgagaaagaattgctggcagttatctttgcagtccgaaaatggcgacactatttgctgcagagtcacttcataatcaagactgatcaaagaagtttgaagtatctattggagcagcgtttgaacacaccaattcagcagcagtggcttcctaaattgctcgagtttgactacgagatccagtatagacaaggaaaagaaaatgtagtggcagatgctttgtctcgggtagaaggatctgaggtgttgcacatggctatgacagtggtggagtgtgatttgttgaaggatattcaagcaggctatgccaatgactctcagttacaagatattattactgcacttcaacgtgatccagattcaaaaaaatatttctcttggagtcagaatatactgagaaggaaaagtaagattgtagttccagcaaatgacaacattaagaatacaatattgctttggttacatgggtcgggtgtaggaggacattcaggcagggacgtgactcatcagcgtgttaaaggactgttttactggaaaggcatgattaaggacatccaagcttatattcgcagctgtggtacatgtcaacaatgtaagtctgatcctgcagcttcaccggggttactccagccattaccaatccctgataccatttggagtgaagtgtcaatggattttattgaggggctaccagtttcaggaggcaaaacagtcatcatggttgttgtggatcgcttgagtaaggctgctcacttcattgcattatcacatccttatagtgcattgacagtagcacatgcttacttggacaacgtttttaagttacatggctgccccacttcgattgtcagtgacagagatgttgtgtttacaagtgaattttggagagagttcttcacgttacagggagttgcattgaagttgacgagtgcttaccatccccagagtgacggacaaactgaagttgtgaacagatgtttggagacctacttgcgttgtatgtgccatgacagacctcagttgtggagtaaatggcttgcattggcagagtattggtacaacaccaattaccactcttctagcaggatgacgccatttgagatagtgtatgggcaggtacctccagtccatttaccttatctgcctggggaatcaaaagtggcggttgtggctaggtctttgcaggagagggaagatatgttgctgttcttgaagtttcatttgatgcgcgctcaacaccgaatgaaacaatttgcagaccagcatcgaactgaacgtgaatttgagattggggattatgtctatgtgaagctgcaaccttaccgccaacaatctgtggtgatgcgtgctaatcagaagctgtcaccgaagtattttggcccatataagatcattgatcgttgtggtgaagtggcttataagttggctcttccttcttactctcaagtgcatcctgtgttccatgtttcgcagctaaaggtgctagtgggcaatgtctctacaacagttcatttgccttcagtgatgcaagatgtctttgagaaagtacctgagaaagtggtggaaaggaaaatggtcaatcgtcagggaaaagctgtcactaaagtgttggtgaaatggagcaatgaacctttggaagaagctacatgggagttcctcttcgatttgcagaaaacatttcctgagtttgaagcatag

SEQ ID NO: 1774 - DNA, 2838 bp, Arabidopsis thaliana
  Clone ID: AT_T6B13.C1.o12.tg
atggcgaccaacaaggatcagttagagcagttggaaacgagtcaggacatgatgcaagatgagatgcagagaatgacggtggctatggttgatctcaagggagataacgaggaccgccataggaggttggaggaggctctcgcgcatttgatagaggcagtgacgcagagagaaagtggagggtcagcggcttcaagaggaagtcgaaggaccgaaaggaaccagttccaatcgacagggaaccgtggagaaccagataacccattcgctgcggtgacggctaacaacaataacgccatcgccagaccatcaaaactggattttccacgcttccatggaggagacttgacgaaatggttgagcaaggcaaaacaatattttgaatatcacgaggggccagtggaacaagccgttcgattcaccacttttcatcttgacggggtggctaacgggtggtggcaggctacattaaggcgctccgccacgatagggcagaccgggtcactcagtgagtatcaacatgaattcgaatggctacagaacaaggtttacggatggactcaagaggtgttggtgggagcgttcatgaatggattgtattactccatctctaatgggattcgcatgttccagcctcgatctctgagagaagtaatcaacttgcgcgttggatggaagggcaaatccaaagacagaagaaggaaacgagctactcaccatctccacgcagttttgtccctaaccgtctggtggtgcgcaaagagacagagtaacagacgccaaagagactcagttaggaagaattacgaaagaaaaggagtttgggcttatgtttcagctgtgatgaaaggggagaatgatgacgaagcggttgaggaggagagtacagaagcagaggggaaaccagaaatcacactgtacgcgctcgaaggggttgacactacgagcaccatacgagttcgagccacaatccataggaatcgtctaattgccttgatcaatagcggttctactcacaatttcattggagagaaagctgttcggggaatgaatctcaaagccacaacaacaaaaccattcactgtgagagtggtgaacggaatgccgttggtttgtcggagtaggtacgaggcgattccggtggtgatgggcggcgtggtgttccctgtcacgctctatgctttaccgttaatgggcttggatttggccatgggagtccaatggctcagcactttgggcccaacactttgtaattggaaggaacaaactctgcagtttcattgggccggagatgaagtaaggttgatgggtattaagcctactgggcttagaggcgtggaacataaaaccataaccaaaaaggcccgaatgggccacactatttttgcaatcactatggcccataattccagcgaccctaatacacccgatggcgaaattaaaaagctgatagaggagttcgccggtttgtttgagacgccgacgcagcttccgtcggagcggccaatagtgcaccgcatagcactcaaaaaagggacagatccggtgaatgtgcggccttatcgttatgcgttttaccaaaaagatgaaatgagtcgtgcgggcattattcgaccgagctcgagtccgtttttgtctccagtgttgctagaacggttccctattcccacggtggatgatatgctcgatgagctcaatggagcagtctatttcactaagctcgatctcacagcaggctatcaacaggtccgtatgcattctcctgacataccaaagatagcctttcagacacacaacggtcattacgaatacctcgtaatgcctttcggcttatgcaacgcaccgtcaacgttccaggcgcttatgaatgagatcttttggcctctgctttctagatctgtcgctgcaaagtttgtgtcacatgtggtaaagcttcatggcatacctcgttccattgtaagtgactgtgaccctatcttcatgagcttgttttggcaagaattttggaagctttcacgaaccaaactctggatgtccaccgcatatcacccacaaacggatggccaaacggaagttgtgaatcgttgcattgaacaattcttgcggtgtttcgttcattaccatccgaaacaatggagttcgttcattccatgggcagagtattggtacaacacaacgttccatgcctccacaggaatgactccatttcaggctctctatggtcgaccaccatcacctattccagcctacgaactgggctcagttgtttgtggcgaattaaatgagcagatggcagcccgagatgagttgttagctgaactaaagcagcacctggtcaccgcaaacaactgcatgaagcagcaagctgattctaggcttcgtgatgtctcttttcaggtcggcgattgggttctacttcgcattcaaccttaccgtcagaaaactctgttccgtcgcagttcacaaaagctatcacaccgcttctatggccccttccaagtcgcatcgaaacatggcgaggtggcttatcgtctcactcttcctgaaggtacacgaattcatcctgttttccacgtttctctactcaaaccttgggttggagatggtgagccagatatgggacaactaccgcccttgcgcaacaatggcgaattgaagttgcagcctacggccgtgttagaggtacgatggaggtctcaagataagaaaagagttgcagatctccttgttcaatgggaagggctacacatcgaagatgctacttgggaagagtatgatcaactggcagcaagttttcctgagtttgtcttgaaccttgaggacaaggttcgtctttag

SEQ ID NO: 1775 - DNA, 3204 bp, Arabidopsis thaliana
  Clone ID: AT_F11C18.C1.o100.tg
atggctaatctgttgcaaaggcttcgtagacgaaccgggccaaagccagattatattgaagacaagttggatgaatacattcgtgaagaacaagttgaagaaacaggcggaagtaaccaggattgtcctcttggcgagattgaaaagattttggaccgtgaatggcgtcctactgcatctaacaatccgaattcttctgacaacgggacaccaaccctagttgtcgtgaaacaatatcttgtgaagtggaaggggttatcgtacttgcactgctcttgggtgcccgagcaggagttcgagaaggcttacaagtcccatcctcatttaaaactaaaattaagggtgaccaggtttaacgctgctatggacgtattcatcgctgagaacggagctcatgagtttatcgccattcgtcctgaatggaaaactgttgaccggattattgcttgccgggaaggagatgatggggaggagtatctggtgaagtacaaagaactttcttacagaaatagttactgggaatctgaatctgacatctcagatttccagaatgaaatccaaaggtttaaggatataaactctagctctcgtagagataaatatgtcgaaaatgagagaaatcgagaggaattcaaacagtttgatcttactcctgaatttcttacaggcacattgcatacataccagctcgaagggctgaatttcctaaggtattcatggtccaagaaaaccaatgtaatccttgcggatgaaatgggactaggcaaaactattcagagcattgccttcttggcctctttgttcgaggaaaacttatctcctcatctagttgttgctcctctctcaaccatccgtaactgggagagggaatttgccacctgggcaccacatatgaatgtggttatgtacactggggattcggaagcacgtgatgttatatgggaacatgagttctacttctctgaagggcgtaaaaggttaaagaaagacgtgctcaaggataaggtgcccccaaagaaggagctcattttgcgtgttgatatgagcagccagcaaaaagaagtgtacaaagctgttattaccaataattatcaagtcttgacaaagaaacgagatgctaaaatatctaacgtgctaatgaaattacgccaagtttgctctcatccgtatctgttaccagactttgagccaagatttgaagacgcaaatgaagcttttacaaaactattggaagcttccggaaagttgcaactgttagacaaaatgatggtcaaactcaaagagcaggggcacagagtgctaatctatacccaattccaacacaccctttaccttttggaagactacttcactttcaagaattggaattatgaacggattgatggaaagatcagtggacctgagaggcaagtaagaatagatcggtttaatgcagaaaactcgaaccggttctgttttttgctcagtacaagagctggtggaatagggataaaccttgcaacagctgatacagtcatcatttatgacagtgattggaatcctcatgctgatctccaggctatggctagagttcatcggcttggccaaacaaataaggtaatgatctacagactgattcacaaaggtactgtagaagaacggatgatggagataaccaagaacaagatgcttctagagcatctcgtcgtgggaaaacaacatctttgtcaggacgagttagatgacatcatcaaatatggttccaaggaacttttctctgaagagaatgatgaagcagggaggtctggaaaaatccattacgatgatgctgctatcgaacagttgctagatcgtaatcatgtagatgctgtggaggtctcactggatgatgaggaggaaactgattttttaaagaatttcaaggtggctagttttgagtatgtagatgatgaaaatgaggctgcagcattagaggaggcacaagctatagaaaacaattcttcagtaagaaatgctgatagaacaagtcactggaaagatttgctgaaagacaaatatgaagtgcaacaagctgaggagctcagtgctcttggaaagaggaagagaaacggcaagcaggtgatgtatgctgaagatgatcttgatggtttagaagaaatctctgatgaggaggacgaatattgtcttgatgatttaaaagtgacctctgatgaggaggaggaagcagatgaacccgaagcagctcgacagagaaagccgaggacggttacaaggccttacagaaaaagggctcgcgataattcggaggaaatacctttgatggaaggcgaagggagatatctcatggtgctgggatttaacgagactgagagggatatatttttacgtacgtttaagaggtatggaatcttatttttgaaacacattgccgaaaaccctaccgataattctacaaattttaaagttattacggcaatggtctatgcagatggagttcccaaagaagggataagcagtgacgagctactagtgagcatgacttttatgatgctagtaaaggagaagtgtcaatttttggacaaccatccgacagcacctgttttctctaactacgtcatcagtaagtacaatttgagaaatggagcattttctaaggaagaacatgataggatactgattcctgctgtttccaagcatggctatggtagatgggtggccatcgttgaagacgaagagatagggttccaagaggttgcctgcaaagacctgaatatccctttccctcctgatactaaatctgctcgtaaaagaatttgtgaccatgtgggaaaacgggttaagaagatggaggatgccataaagtatgagtacgcagaaaagatacttgctgaacaagcaaaagctgaaacaaagggaacaagctttgttgatgcagaaaaagaaatgcttaagaatgatcccatcacttcaaaaaaaaattctgcaactgccgttgacaacaagcaaggcagagttgaaatggctcaatcatacgatcagagtgttaatgagaagtcaggtgagtcattccagacatatttagatattcaaccgctgaatcgaatgccgagggagagctttaagcctctggaacctatcaatgaggaaataagcactaggctaagcgttgggacagatcatgatgtagagatggatgcagcggataacatcattgtgctggattga

SEQ ID NO: 1776 - DNA, 6687 bp, Arabidopsis thaliana
  Clone ID: AT_K23L20.C1.o15.tg
atgaagcagaaacgaagaaaacttccgtctatactagatatattagaccaaaaagtggatagttctatggcttttgattccccggaatacacttcttcctctaaaccaagtaagcagcggcttaagactgattcgactcctgaaaggaactcctctaagaggaaaggaaatgatgggaattattttgaatgtgtgatctgtgaccttggtggtgatttattgtgttgtgatagttgtcctcggacctatcataccgcatgcctcaatccacctcttaagcggattccaaatggtaagtggatctgcccaaaatgttccccaaacagtgaagcactcaagcctgtcaatcgtttagatgccattgctaagcgagcaagaacaaaaaccaagaaaagaaattcaaaagccggaccaaagtgcgaaagagcttctcagatttattgcagttctataatttctggagaacaatcttcagagaaagggaaatctatatcggccgaagagagcaaatccacaggaaaggaagtttattcttccccgatggatggctgttcaactgctgagcttggtcatgcatctgcggatgaccgacctgattcatcgtctcatggagaagatgatttggggaaacccgtcatacccactgcagatttaccatctgatgcaggattaacgttgctgtcctgtgaagatctctccgaatctaaactatcagatacggagaaaactcatgaagcacccgtggagaagttggaacatgcttccagtgagatcgtggagaacaagacagttgctgaaatggagactggaaaaggtaaaaggaaaaaacggaagcgtgaactaaatgatggggaaagtcttgaaaggtgcaagactgataagaaacgcgcgaagaaaagtttgtccaaagtgggttccagttctcagactaccaaatcaccggagtcttcgaaaaaaaagaaaaagaaaaatcgtgtgactttaaaatccttgtccaaacctcagtccaagacagaaacaccagaaaaagtgaagaagcttcccaaggaggaacgtcgtgcagtacgtgccactaataaatcttctagttgtttggaagatacaaactctcttccggttggaaacctccaggttcatcgtgttttaggatgccgaatccaaggtctgactaaaacctcgctgtgtagtgctctttcagatgacttgtgttcggataatttacaagctactgaccaacgggatagcttagtacaagatacgaatgctgaattagtagttgctgaggacagaatagattcttcttctgagacaggtaaaagttcgagggattcacgactgagggataaagatatggatgattctgctttaggtaccgagggtatggttgaggtgaaagaagagatgctttctgaagacatttccaatgccacattgagtagacatgtggatgatgaagatatgaaagttagtgaaacgcatgtatctgttgagagggagttacttgaagaagcacatcaggaaacaggggaaaaaagcactgtggctgatgaagaaattgaggagcctgttgctgctaaaacttcagatcttattggtgagactgtatcatatgagtttcttgttaaatgggtggataaatctaatattcataatacttggatttctgaggcggagctgaaaggtctagctaaaagaaaactagagaactacaaagcaaagtacggaacagctgtaataaacatctgtgaagataaatggaaacagcctcagcgaatagttgctctccgggtttcaaaagaaggtaaccaagaagcttacgtaaagtggacaggcttagcttatgatgaatgcacgtgggagagcttggaggagcctattcttaaacattcatcccatttaatagatctttttcatcagtatgagcagaaaacattggaaaggaatagtaagggtaatcccacaagggaaaggggtgaagtcgttaccctcacagaacaacctcaagagctcagaggaggtgccttgtttgcccatcagcttgaggctttgaattggctgcgtagatgctggcataaatcaaaaaatgtaatacttgctgatgagatggggcttggaaaaactgtgtctgctagtgcattcctctcctccctttattttgaatttggagttgcaagaccttgtttagtcctggttccactttcaacaatgccaaactggctatcagagttttctctttgggctccactccttaatgttgtggagtatcatggaagtgcaaagggacgagccataattcgagactatgagtggcatgctaagaattctactgggacgaccaagaagccgacatcctacaaatttaatgtccttttaactacttatgaaatggttctggctgactcatctcatctacgtggggttccatgggaagttcttgtggttgatgaagggcatcgtctaaagaattcagaaagtaagctgtttagcttgctcaacacattctcttttcaacaccgtgtgctcttgactggcacccctcttcagaataacattggtgagatgtataatctgctcaacttcttgcaaccatcttcattcccttctttgtcttcttttgaggagaggttccatgatttgacaagtgctgagaaagtagaagaactgaagaaacttgttgctcctcatatgcttcgccggcttaaaaaagatgcgatgcagaatattcctccaaagacagagaggatggtccctgtcgagttgacatcgatccaggcggaatattatcgtgcaatgctaactaagaactatcagatactacgaaatatcggaaaaggggtagcgcaacaatcaatgcttaacatagtgatgcagttgagaaaggtttgcaatcacccatatctcataccaggtactgagccagagtctgggtcattggagtttcttcacgatatgagaataaaagcgtcagccaagttgactctgttgcactctatgcttaaggtgctacataaggaaggccatagagttctgatattttcacagatgacaaagcttctagacattctggaggactacctgaacatagaatttgggcctaaaacatttgaaagggtagatggttctgttgctgtagctgatcgtcaggcagctatagcacgtttcaaccaagacaaaaatcggttcgtttttctgttatcaactcgtgcctgtggtcttggtatcaatctggcaacagctgatactgttattatctatgactctgatttcaaccctcacgctgatatccaagccatgaatagagctcatcgaattggacagtccaaacgacttttggtatacagacttgttgtccgtgccagcgttgaagagcgcattttgcagctggccaagaagaagttgatgctcgatcagctttttgtaaacaagtcgggatcccagaaggaatttgaagatattctacgctggggtactgaagaacttttcaacgactccgctggtgagaacaagaaagatacagctgaaagtaatggaaacttagatgtaatcatggatttagaaagcaagagtaggaaaaaaggtggtggcctcggagatgtttatcaagacaaatgtacagaaggaaatgggaagattgtttgggatgatattgcaattatgaagttgcttgatcggtcaaatcttcaatctgcctccactgatgccgctgatactgagttggataatgatatgctcggctccgtgaagcctgtggaatggaatgaggaaacagctgaagaacaagttggagctgaatcacctgcactggtgactgatgatactggtgaaccgagttcagagaggaaagatgatgatgtcgttaattttactgaagaaaatgaatgggacaggcttctgcgtatgaggttggagttccctctttctctgagttcagcgtcttggctttggtcttggcagcatatatgggagaaatatcagagcgaggaagaagcagcgcttggcagagggaagcgtttgagaaaggctgtttcgtatagggaagcatatgccccacataccagtggacctgtaaatgagagtggtggtgaagatgagaaagaaccagaaccagaacttaagaaggaatatacaccggcagggcgagccctaaaagaaaagtttaccaaactgcgagagaggcaaaagaacctgattgcgagaaggaattctgttgaagagtctcttcctagcggcaatgtggatcaggtaactgaagtagctaatcaggacgaagaaagccctacatcaatggacttggacgatagcaaagctagccagcaatgtgatgcacagaaaagaaaagccagttcttcagatcctaaaccagatcttctaagccaacatcatcatggcgcagaatgtctgccatctttacccccaaacaacctgccagtccttggactgtgtgctcctaattttactcagtcagaatcctcccggagaaattattctcgtccaggtagtagacagaacagacccataacaggaccccattttcccttcaatctaccccaaacatcgaacttggttgagagggaagcaaatgaccaggaacctcctatgggtaaactaaaaccacagaacataaaggaagaaccttttcagcagcctcttagtaatatggatggttggcttccacatcgtcagtttcctccgtcaggggattttgagcgtcctcgaagttctggtgctgcttttgctgatttccaggagaagtttccgttgcttaaccttccatttgatgataagctgcttcctcgatttccatttcagccgagaacaatgggaacttcgcatcaagacataatggccaatctttcgatgaggaaaagatttgaaggtactggtcattctatgcaagacctatttggcggaacaccaatgccgtttctacccaatatgaaaatccctcctatggatccacctgtcttcaaccaacaagagaaggacttaccgcctttgggtttggatcagtttccatcagctctttcatctatcccagagaaccatcgaaaggtgctggagaatataatgctaagaactggctctggaattgggcacgtacagaaaaagaaaacaagagtagatgcatggtccgaggatgaactagattctctctggattgggattcgcagacatgggtatggaaactgggagacaattctcagagatccaaggctcaaattttcgaaatttaaaacaccagagtacttggcagctaggtgggaagaagagcaacgtaaattcttggatagtctttcatctctgccatctaaatcaagcaggactgataagtccaccaaatcttccttgtttcctggtcttccccaaggaataatgaatcgggccttacatggtaaatatgccactcctccaaggttccaatcccatctcacagacataaaactcggattcggcgatctagcatctccccttccgttatttgaaccatctgatcacctgggatttcgaagtgagcattttcctcccatggcaaatctgtgcactgacaatcttcccggggagccttctgctggaccatctgaacgagcagggacatcgacaaatattcccaacgagaagccttttccactcaactctcttggaatgggcaacttaggttcattgggtttggatagtttaagttccttaaacacactgagagcagaggaaaaacgggatgctattaagcgcgggaaactacccttgtttttagatatgccgttacctcagatgcttgattcaagcaacaacgtattcttgggaagatcagccaatccatctttccttcacccaaatcgagggttgaatccctccaatcccatggggagagacataatgggaattagctcttcagagaacaagctacctcattggttacggaatgttgtgactgttcctaccgtgaagtcacctgaaccacccactctacctccaactgtgtcagctatagctcaatcagtccgcgttttatatggtgaagactctacaaccattccaccgtttgtgataccagagccgccacctcctgctcccagagatccaagacacagtctgcgtaagaaaaggaaacgtaaattgcattcatcgagtcaaaagactacagacattggtagtagcagccacaatgctgtagaaagcagctctcaaggcaatccacaaacatctgcaactcctcctttgcctccaccgtctctggcgggtgaaacttcagggtcttctcaacccaaattacctcctcacaacctaaatagcacagaaccactgtcctctgaagcaatcataattccaccacctgaagaagattctgtgatagcagcagcgccatctgaagcaccagggcctagtctagagggaatcactggtacaacaaagtcaatctcgctagagagccaaagctctgaaccagaaactattaatcaagatggagacttagatccagaaactgatgagaaagttgagtctgaacgaaccccgcttcattcagatgagaaacaagaggagcaagaatctgaaaatgcattgaacaagcagtgtgagcccatagaggctgaaagtcaaaacaccaatgcagaagaagaagcagaggcacaagaagaagatgaagaatccatgaagatggtgactggtaattctcttagtgacgactga

SEQ ID NO: 1777 - DNA, 900 bp, Arabidopsis thaliana
  Clone ID: AT_T13L16.C1.o11.tg
atggaagatcaatcggcggcgagatctatcggaaaagttagttggtttagcgatggaaaaggctacggtttcattactcccgatgatggcggcgaagagctttttgttcatcaatcctcaattgtctccgatggattccgtagcttgactcttggtgaatcggttgaatacgaaatcgcgcttggaagcgacggaaagactaaggccattgaagttactgctcccggcggcggttcacttaataagaaggaaaacagctcccgtggatccggaggtaattgttttaattgcggtgaggttggtcatatggctaaggattgtgacggtggaagtggtgggaaaagctttggaggtggtggtggtcgtagatctggcggcgaaggtgaatgttacatgtgtggtgatgtgggacacttcgctagggattgtaggcaaagcggtggtggaaacagcggcggaggaggaggaggtggtcgtccgtgttacagttgcggtgaggttggtcatttggcaaaggattgtcgtggtggttctggtggaaacagatacggaggaggtggtggtcgtggatctggcggtgatggatgctacatgtgtggtggtgtgggacatttcgctagggattgtaggcaaaacggcggtggaaacgttggaggtggtggaagcacttgttatacctgtggcggagttggccacattgcgaaagtttgcaccagcaagataccttctggtggtggtggtggtggtcgtgcttgttacgaatgtggaggaactggccatttggctcgtgactgtgatcggagaggaagtggaagcagcggaggtggcggtggcagtaacaagtgcttcatctgcggcaaggaaggtcactttgcgagggaatgtacttcggttgcttaa

SEQ ID NO: 1778 - DNA, 900 bp, Arabidopsis thaliana
  Clone ID: AT_T19K4.C1.o150.tg
atggcttcagaggatcaatcggcggcgagatctaccgggaaggtgaactggttcaacgcttctaaaggctatggtttcattactcctgacgatggcagcgtagagcttttcgttcatcaatcttcaattgtctccgaaggttaccggagtttaaccgtcggcgatgcggttgagttcgctattactcagggaagcgacggtaagactaaagccgtcaatgttactgctcctggtggtggttctctcaagaaggagaataactctcgtggtaacggtgctaggcgcggcggcggtggaagcggttgctacaattgcggtgagttaggtcatatctctaaagattgtggtattggtggcggcggcggaggtggtgaacgtagatctagaggaggagaaggttgttacaattgtggtgatactggtcacttcgctagggattgtacttcagctggaaacggtgaccaacgtggagccaccaaaggtggaaacgatggttgctacacttgcggtgatgttggtcacgtggctagggattgtactcagaaatcagttggaaacggagaccaacgtggagcggtcaaaggtggaaacgatggttgctacacttgtggtgatgttggtcactttgctagggattgtactcagaaggttgctgccggaaacgtcagaagcggtggtggtggtagtggaacttgttattcatgcggtggagttggtcacattgcaagagattgtgcgactaagagacagccttctcgtgggtgttaccagtgtggtggttctggtcacttggctcgtgattgtgaccagagaggaagcggtggaggaggtaatgataatgcgtgctacaagtgtggtaaggaaggtcactttgcaagggaatgttcttctgtagcttaa

SEQ ID NO: 1779 - DNA, 1191 bp, Arabidopsis thaliana
  Clone ID: AT_T24P13.C1.o16.tg
atgtggctctctcatctcttcatgtccctctctaagctgacgtgtaatttctccattttctctgtctttatggcttgtggctctattggtatgtctcaagttagagatactccggttaaattgtttggctggacaattacaccggtttctcatgatccatactcttcttcgtcccatgttcttcctgattcttcctcgtcttcctcgtcttcttctctatcacttcgaccacacatgatgaataaccaatctgttactgacaatacaagtcttaagctgtcatctaatcttaacaacgagtcaaaagaaacatctgagaacagtgatgaccaacacagcgagatcacaacaattacatcggaagaagagaaaacaactgaactgaagaaaccagacaagattcttccatgtccgagatgcaacagcgcagacaccaaattctgttactacaacaactacaacgttaaccagccacgtcacttctgtagaaaatgccagaggtattggaccgctggtggatccatgaggatcgtcccggttggctcaggccgtcgcaagaacaagggatgggtttcttcagaccagtacctgcacatcacttccgaggatactgacaattacaatagctcctcaacaaagattctaagcttcgagtcttcggactctttggtaactgagaggcctaagcatcaatcaaacgaagtgaagataaacgctgaacctgtttcacaagaacccaacaacttccaagggttacttcctccccaagcatcccctgtttcgcctccttggccttaccaataccctccaaaccctagtttctaccacatgcccgtctactggggctgcgcgataccggtttggtctaccctcgacacttctacatgtcttgggaaaaggacaagagacgaaacttctcatgaaactgttaaagagagtaaaaatgcttttgagagaacaagcttgcttttggaatctcagagcatcaaaaatgaaacaagtatggctacaaataaccatgtgtggtatccagtaccgatgacccgcgagaagacacaagaattcagctttttcagtaatggagctgaaacaaagagcagcaacaacagattcgtccctgaaacgtatcttaacctgcaagcaaaccctgcagccatggcaagatctatgaacttcagagagagcatataa

SEQ ID NO: 1780 - DNA, 699 bp, Arabidopsis thaliana
  Clone ID: AT_T13K14.C1.o200.tg
atggataacttcaatgttgttgccaatgaagacaatcaagtgaatgatgtgaagcctccaccacccccaccgcgagtgtgtgcaagatgtgattctgataacacaaaattttgttactacaacaattatagtgagtttcaaccgcgctacttctgcaagaactgtcgaagatactggactcatggtggggctttaagaaacgtaccaattggtgggagtagtcgtgccaagcggacaaggataaatcaaccttcagttgctcagatggtttctgttggaatccaaccaggtagccataaacctttctttaatgttcaagaaaataatgactttgttggatcttttggtgcttcatcttcatcttttgttgctgctgtagggaaccgttttagttctttgtctcatattcatggtggtatggtaacaaatgtgcatccaactcaaacttttcgaccaaatcatcgcctagctttccataatggatcatttgagcaagattattatgatgttgggtctgataatcttttggtaaaccaacaagttggtggatatgttgataatcacaacggttatcacatgaatcaagtggatcaatacaactggaaccagagcttcaataacgctatgaacatgaattataataacgctagcactagcggaaggatgcatcctagtcatttagagaagggtggtccttga

SEQ ID NO: 1781 - DNA, 897 bp, Arabidopsis thaliana
  Clone ID: AT_K19B1.C1.o4.tg
atgctggaaactaaagatcctgcgataaagctctttggtatgaaaattcctttcccgacggttttagaggttgctgatgaagaagaagaaaagaaccaaaacaagacattaactgatcaatcggagaaagacaaaaccctaaagaaaccaaccaagattcttccatgtccaagatgcaacagcatggagactaagttctgttactacaacaactacaacgtaaaccaacctcgccatttttgtaaagcttgtcagagatattggacctcaggtgggaccatgagaagtgttccaatcggagcaggacggcgcaagaacaagaacaactcaccaacttcacattaccaccatgtgactatctccgaaacaaatggtccggtccttagtttcagcctcggagatgatcaaaaggtctcgagtaataggtttggtaatcaaaagctagttgctaggatagagaacaatgacgagcgctctaataacaacacttcgaacggtttgaattgttttccgggagtttcgtggccgtacacgtggaatcctgcgttttacccggtttacccttattggagcatgccagtgttgtcttctccggtaagttcaagtcctacttctactcttggtaagcattcgagagacgaagacgagacggtgaagcaaaaacagaggaatggatctgtattggttccaaagactttgagaattgatgatcctaatgaagctgcaaagagttcgatatggacaacacttgggatcaagaacgaagttatgttcaatgggtttggttcgaagaaagaggttaagctcagtaacaaagaagaaacagagacctcacttgttctttgtgcaaaccctgctgcgttatcaagatcaatcaatttccatgagcagatgtga

SEQ ID NO: 1782 - DNA, 1416 bp, Arabidopsis thaliana
  Clone ID: AT_MIJ24.C1.o130.tg
atggctgatccggcgattaagctctttggaaagacgattcctttacctgagcttggtgttgttgattcttcttctagctataccggatttttaaccgaaactcagattcctgttcggttatcagattcgtgtaccggcgatgatgatgatgaagagatgggtgattccggtttaggacgagaagaaggtgatgatgttggtgatggtggaggagagagcgagactgataaaaagggttttagcttctctgtgattggaatcaagtctttgatccctgaagaaaaagatagtgagtgtcaggaagagtcattgaggaatgaatctaatgatgttactactactacatcgggtataactgaaaaaacggaaacaacaaaagctgcaaagacgaatgaagagtcaggtggtactgcttgctctcaagaggggaagttaaagaaacctgataagattctaccgtgtccgcgatgtaacagcatggaaaccaagttctgttactacaacaactataatgttaaccaacctcgccatttctgcaagaaatgtcagagatattggacagctggtggaacgatgaggaatgttccggttggtgctgggagacgtaagaataagagtccagcttctcattataaccgtcatgtaagtataacatctgcggaagctatgcagaaggtggcgagaactgatcttcaacatcctaatggtgcaaatcttctcacttttggctctgattctgtgctttgtgaatctatggcttctggattgaatcttgttgagaagtcattgttgaagacacaaactgtattgcaagaacccaatgaaggcttgaagattacggttccgttaaaccagacaaacgaagaagctggaacagtcagcccgttaccaaaagttccatgctttccaggaccaccaccaacttggccttacgcttggaacggagtttcgtggacgattttaccgttttaccctccaccggcttactggagctgcccgggggtttcaccgggggcatggaacagcttcacatggatgccacaacccaattcaccatctggttccaatccaaattctcctacactaggtaaacattcacgtgacgagaacgctgctgaaccaggaaccgcttttgatgaaaccgagtcacttggtagggagaaaagcaaacccgagagatgcttgtgggttcccaagacgctgaggattgatgatccagaggaagctgctaaaagttccatctgggaaacattagggatcaaaaaagacgaaaatgcggatactttcggagctttcagatcatcaaccaaagaaaaaagcagtctttctgaaggaagacttccgggaagaagaccggagttgcaagcgaatcctgctgctctttctaggtcagcaaacttccatgagagctcatag

SEQ ID NO: 1783 - DNA, 762 bp, Arabidopsis thaliana
  Clone ID: AT_F11C1.C1.o250.tg
atgccgacgtctgactccggtgaaccacggcgaatagctatgaaacctaacggcgtaacagttccgatttctgaccagcaagaacagcttccatgtcctcgttgtgactcatccaacactaagttctgttactacaacaactacaacttctctcagcctcgtcacttctgcaaagcttgtcgtcgttactggactcacggtggtactctccgtgacgttcctgtcggtggtggtactcgtaaaagcgcgaaacgttcccgcacttgctcgaactcttcttcctcctctgtttctggtgtcgtctctaactctaacggtgttccgttacaaacgacgcctgttctcttccctcagtcgtcaatctctaacggcgttactcacacagtaactgaaagcgacggaaagggaagtgctttatctctctgtggaagtttcacctccactctgttgaaccataacgctgctgcgacggctacgcatggatccggttcggttattggtatcggaggttttggaatcggactcgggtcgggttttgatgacgtcagctttggactcggaagagcgatgtggccgttttcaactgttggtactgcgacaacgacgaatgttgggagtaacggtggtcatcacgctgttccaatgccagccacgtggcagttcgagggtttagagagcaacgctggtggtggatttgtctccggtgagtactttgcgtggccggatctttccatcacaactccgggaaactcactcaaatga

SEQ ID NO: 1784 - DNA, 996 bp, Arabidopsis thaliana
  Clone ID: AT_F1N19.C1.o18.tg
atgaacgagatcgtgacaaacacatgcctaaaacaacagtcgaatcctccttctcctgctactcctgtggaaaggaaggcaagaccggagaaagaccaggctttgaactgtccaagatgcaactccttaaacaccaagttctgttactacaacaactacagcctgacgcagcccaggaggtattggaccgcaggtggttccctcaggaacatccccgtcggtggcggcgtccgcaagaacaagagatcttcttccaattcctcttcctcttcaccctcttcgtcttcttcttcaaagaaacctctttttgccaacaacaacacgcctacgcctcctcttcctcatcttaaccctaagattggtgaagcagccgctactaaagttcaagacttgacgttttctcaagggtttgggaacgcccacgaggttaaagatctcaacttggcgttttctcaagggtttgggatcggtcacaatcatcacagtagtatcccagagtttctgcaagtagtacccagcagcagtatgaagaacaacccactggtctcaacttcctcgtctttggagcttttagggatctctagttcctctgcttcctctaactcacgccctgctttcatgtcttatccaaatgttcatgattcatcggtctacacagcatccgggtttggtctgagttacccacagtttcaagagttcatgagaccagctttgggattctctcttgatggtggggatcctctacgtcaagaagaggggtccagtggcactaataatggaaggccgttgctgccatttgagagcctcctcaaacttccagtttcatcatcaagcaccaatagtggtgggaatggcaatctgaaagagaataatgatgagcatagtgatcatgaacatgagaaagaagaaggagaagctgaccaatctgttgggttttggagtggcatgttaagtgctggtgcttctgctgctgcatctggtggttcatggcaataa

SEQ ID NO: 1785 - DNA, 744 bp, Arabidopsis thaliana
  Clone ID: AT_F22O6.C1.o180.tg
atggagagagcagaggccttgacatcatcgtttatatggcggccaaacgcaaacgcaaacgcggagatcacgccgagttgtccaagatgtggatcctctaacacaaagttctgttactacaacaactatagcctcactcagcctcgctacttctgcaaaggctgccgcagatattggaccaaaggtggttccctccgcaatgttcctgtaggcggtggctgtcgaaaatcccgccgccccaaatcatcttctggtaacaatactaaaactagcctaaccgctaattctggcaaccccggtggtggttcaccaagcatcgatcttgctcttgtttacgccaatttcttgaatccaaagcctgacgaatctatactacaagaaaattgcgacttagccactacggattttttggtagataatcctaccggcacttccatggacccttcatggagtatggacatcaatgatggtcatcatgatcattatattaatccggtggaacacattgtggaggaatgtggttataatggcttgcctccatttcctggtgaagagcttctctctttagacactaatggtgtttggtctgatgctttgttgattggtcataaccatgtagacgttggcgtgactccggttcaggctgtacacgaaccggtggttcatttcgctgacgaatccaatgattccaccaatctcttgtttggaagttggagcccttttgatttcactgccgatggatga

SEQ ID NO: 1786 - DNA, 1200 bp, Arabidopsis thaliana
  Clone ID: AT_F24J1.C1.o25.tg
atgtctaaatctagagatacggagataaagttgtttgggaggacaatcacatctcttttagatgtgaattgttatgatccgtcgtcgttgtcccctgttcacgatgtttcttctgatccaagcaaggaggattcgtcttcttcttcatcttcttgttctccaactattggaccaatcagggttccggttaaaaaaagtgagcaagagagtaacaaattcaaagatccatatatattatccgatctaaacgaaccaccaaaagcagtatctgagatttcatcaccaagaagttccaagaacaactgtgatcaacagagcgagatcacaacaacaactaccacaagtactacatcaggagagaaatcaacggctctcaagaaaccggacaagcttattccatgtcctagatgtgaaagcgcaaacaccaaattctgttattacaacaactacaacgtgaaccagccacgttacttctgcaggaactgtcagaggtattggacagctggtggatctatgaggaacgttcctgttggctcaggtcgtcgcaagaacaaaggatggccttcttcaaaccattacttgcaagtcacttctgaggattgtgataataataactcggggacgatccttagtttcggttcttcggagtcttcggttacagagactggtaagcatcagtcaggtgatacagcaaagataagtgctgattcagtttctcaagaaaataaaagctaccaagggtttcttcctccgcaagtaatgttacctaataattcttctccttggccttaccaatggagtccaacgggtcctaacgctagtttctaccctgtccccttctactggggatgcacggttccgatataccctacctcagagacttcatcatgtttaggaaaacggtcaagagatcaaactgaaggaagaatcaatgatactaatacaacaataactactacaagagcaagattggtctcagaatctcttagaatgaatatcgaagctagtaagagcgctgtgtggtctaagttaccgacaaaacccgagaaaaaaacgcaaggattcagtttgttcaatggatttgacacaaagggaaacagcaacagaagtagcttggtctccgaaacttctcacagtctacaagcaaaccctgcagcgatgtctagagctatgaacttcagggagagcatgcaacaataa

SEQ ID NO: 1787 - DNA, 528 bp, Arabidopsis thaliana
  Clone ID: AT_F28N24.C1.o14.tg
atggcgacccaagattctcaagggattaaactctttggcaaaaccataacattcaacgccaacatcacacagacgataaaaaaagaagagcagcaacaacaacaacagccagagctacaagcaacaacagccgttagatcaccctcatcggatctgacggctgagaagcgtccagacaagatcataccatgtccgagatgcaagagcatggagactaagttttgttacttcaacaactacaacgttaatcaaccaagacacttctgcaaaggttgtcaacgttactggaccgccggtggagctctccggaatgttcccgtcggtgccggtcgtcggaagtcaaaacctcccggacgtgtcggtgggttcgctgagttgcttggagctgcgactggagctgttgatcaggtcgagctagatgctttgctagtggaagagtggagagctgctacggcgtctcacggtggtttccggcatgattttccggtgaagaggctccgttgttacaccgatggtcaatcttgttaa

SEQ ID NO: 1788 - DNA, 678 bp, Arabidopsis thaliana
  Clone ID: AT_K8A10.C1.o1.tg
atgccttctgaattcagtgaatctcgtcgggttcctaagattccccacggccaaggaggatctgttgcgattccgacggatcaacaagagcagctttcttgtcctcgctgtgaatcaaccaacaccaagttctgttactacaacaactacaacttctcacaacctcgtcatttctgcaagtcttgtcgccgttactggactcatggaggtactctccgtgacattcccgtcggtggtgtttcccgtaaaagctcaaaacgttcccggacttattcctctgccgctaccacctccgttgtcggaagccggaactttcccttacaagctacgcctgttcttttccctcagtcgtcttccaacggcggtatcacgacggcgaagggaagtgcttcgtcgttctatggcggtttcagctctttgatcaactacaacgccgccgtgagcagaaatgggcctggtggcgggtttaatgggccagatgcttttggtcttgggcttggtcacgggtcgtattatgaggacgtcagatatgggcaaggaataacggtctggccgttttcaagtggcgctactgatgctgcaactactacaagccacattgctcaaatacccgccacgtggcagtttgaaggtcaagagagcaaagtcgggttcgtgtctggagactacgtagcgtga

SEQ ID NO: 1789 - DNA, 4230 bp, Arabidopsis thaliana
  Clone ID: AT_F16N3.C1.o38.tg
atggtgacagctagagttactcggaaatccactcgatcgaagtccggtacaagttctgcagctcgaaaatcatcgcgatccaccggtgttgatgaatctcctccgatctctcctccagttcacaaatccaacgtttctggagcttcgcgagtcatcgcaccaccggaatccgttgatccgactcagtctcccttcttcttgcatagtgcagatcatccaggtttgaatatcatatctcatcgtcttgatgaaacaaactatggtgattggaatgttgctatgcttatctccttagatgctaagaataaatctggatttattgatggaactctccctcgtccgttggaatcggataagaattttcgtctttggtctagatgcaaaagcatggtgaagtcttggttattgaattctgtatctcctcagatctataggagcattctccgtatgaatgatgcttctgatatatggcgtgatcttcacagtcgtttcaatgtgactaatctcccacgcacatataatcttactcaagagatccaggattttcgccaaggtacattgtctttgtctgagtactatactcgcctcaagacattgtgggatcaattagaaagtacagaggaactagatgatccctgtatttgtggtaaggctatgcgtttgcaacagaaggcagagcaagctaagatagtgaaattgttagctggtttgaatgattcttatgctatcattcgcagacagatcattgctaagaaagcactcccaagtttagcagaggtgtatcacattctggatcaagacaacagtcaacaaggtttttccaatgtggttgctccaccggctgcttttcaggtctctgaggcaatgatggctactaacaatgatgtgaatatgctatgttcagagtgggttggacatattgcagaaagatgctataaaaagcatggattccctcttggttttactcctaaaggcaaaggtggtgacaagtctcaggtgatagattcaggagcaatacatcatgtatctcatgataagagtcttttcttgaatttggatacttctgttgtgagtgcagtgaatttaccagctggtcctactgtaagaatcagtggtgttggtacattgcgacttaatgatgacattcttctcaagaatatcttattcattcctgagtttcgcctgaatctaatcagtataagttctctgactgatgacattggttcacgagtaatatttgataagacttcttgtgaaattcaggatcctatcaaggctcggatgcttggtcaaggtaggagaattgcgaatctatatgtgctggatattgaagatcctattgtctcagtgaatgcagtggttgatatcagtatgtggcatcgaagacttggtcatgcttctctacagagattggatgttatttcagactctttggggactactaagcctaagaataaaggctcagattattgtcatgtttgtcatttagctaaacagagaaagttacccttcccttctcagaataaagtttgtaatgaaatctttgatttgttacacattgacatttggggtcctttttcagttgagacagtggatggctataaatattttttgacaattgtggatgatcattccagagctacatggatttatttgcttagaaacaagtcagaagttcttactgtgtttcctgctttcattgaacaagttgagaatcagtataaagtgagagtaaaggcagtgagatcagataatgcaccagaattgaaattcacaagtttatatcagcagaaagggattgtttcgtttcattcctgtcctgaaacaccggagcagaatttagtggttgagcgtaaacatcaacacatactcaatgtttctcgggctctcatgttccaatctcaggtaccactctctctttggggtgattgtgtgttaacggctgtgtttcttatcaacaggacaccttcccagctcttatcaaacaagactccatatgagattctcactggtacagttcctttctacttcgccaaaaaaagacataagtttcagccgagatctaaagcgtgtgtgtttttgggatatcctgctggttacaaggggtacaagttaatggatttggagagtcacactgtgtttatctcaaggaatgttgtttttcatgaggaggtatttccattggctgtggatccaaagtcagagagttctttgaagttgtttactccaatggttcctgtgtcctcagagattggtgctatggaaactacacacacttgggagattactactttacctgcagggaagaaggcagtagggtgtaaatgggtattcagtttgaagtttttggcagatggcagtcttgagcggtataaggctagattggttgctaagggttacactcagaaagaaggtctagactatacagatactttctctccagtggcaaagatgactacaatcaagttgttattgaagatttctgcctctaagaaatggttcttaaaacagcttgatgtgtctaatgctttcttgaatggtgagttagaggaagagatttacatgaagttacctgaaggttatgcggcaaggaaaggtatcactctacctcctaattcagtctgtcgattgaagagatccatttatggtttgaaacaggcctctcgtcagtggtttaagaagttttctgcttcattacttgatttgggttttaagaagacacatggtgatcatactttgtttattaaagagtatgatggagaatttgtgattgttttggtttatgttgatgatattgctattgcgagtacaagtgaaggtgctgcaatacaattgactcaggatttacaacagcgattcaagttaagagatcttggggatttgaaatattttttgggtcttgagattgctagaactgaagctggtatttctatctgccagagaaagtatgctcttgagttattagcatctactggtatggttaactgtaaacctgtttcagttcccatgatcccgaatgtgaagatgatgaagactgatggtgatttgttggatgatagagaacaataccgtcgtattgtaggaaagctgatgtatttgacaattactagacttgacatcacctttgcagttaacaagttatgtcagttttcctctgctcctaggacgtctcatcttcaagctgcttatcgagttttacaatatatcaaaggcagtgttggccaaggtctgttctattctgcatctgcagatcttactcttaaaggttttgcagattcagattgggcttcctgtccagatagtaggagatcaacaactggattcagcatgtttgtgggtgattcattgatatcttggcgttccaagaaacagcatgtggtttccagatcttctgcagaggctgagtaccgtgccttagcactggttacgtgtgaactggtatggcttcacactttgctcatgtctttaaaagctagctacttggttcctgtgttatattctgatagcacaactgctatttacatcgccacaaatcctgtgttccatgaaagaacgaagcatatagagctagattgtcacacggttagggagaaactagacaatggcgagctgaagttgcttcatgtgcgaactgaagaccaaccctcaacggcggcttacccaccgccaaatctggctgagcctcttccttgtcctcgctgcaactccaccaccaccaagttctgttactacaacaactataacctcgctcagcctcgctactactgcaaatcttgccgccgttactggactcaaggtggtacactccgtgacgtccccgtcggtggtggaactcgtcgaagctcctcaaaacgtcaccgttctttctccaccactgccacctcctcttcctcctcttcttccgtcatcaccaccacgacacaagaaccagccacgactgaagcgagtcaaactaaggttactaatttaatttcaggtcatggaagctttgcttctctgttaggtttaggaagtggaaatggtgggttggattacgggtttgggtacgggtacgggcttgaggagatgagtattgggtatcttggagattcttccgtaggagagattccggtggttgatggttgtggtggtgacacgtggcagattggggagattgaaggtaaaagtggaggagacagtttgatatggcctggtcttgagatctcaatgcaaaccaacgatgttaagtga

SEQ ID NO: 1790 - DNA, 633 bp, Arabidopsis thaliana
  Clone ID: AT_T13K14.C1.o210.tg
atggataacttgaatgttttcgctaatgaagacaatcaagtgaatggtttgaagcgtccacccccgtcacgagtgtgtccaaggtgtgattctgataacactaagttttgcttttacaacaactacagtgaatctcaaccgcgctacttttgcaaaaactgtcgtagatattggactcatggtggagctttaagaaacataccagttggtggaagttgtcgtaaaccaaagcgtctgaaggtagatcaatcttcgatttctgagatggtttctgttgagaaccaaccaattaatcatcaatctttcagacaaactcaagaaaacaatgagtttgttcgatcttttgacgcttcttcttctgctactgttactgccgttccgaaccattttggttatctaagtgaacttcatggtgtaacaaatttgcttccaattcaaagttttcgaacaatggactgcttagatttcggtgatgaatcttttcaacaaggttattacgatgttggatccaatgatttgattgataaccctttgataaaccaatccatcggtgggtatgttgataatcttacaagttattgcataaatcaagtggaaccaaagcttcaaccacgctatgaacatgaatcataa

SEQ ID NO: 1791 - DNA, 585 bp, Arabidopsis thaliana
  Clone ID: AT_T13K14.C1.o190.tg
atgaataatttgaatgtttttacaaatgaagacaatgaaatgaatgtgatgcccccaccgcgagtgtgtccaaggtgttattccgatcaaaccagattcagctacttcaacaacaacaagaagtctcaaccgcgctacaaatgcaagaattgttgtagatgttggactcatggtggagttttaaggaacataccagtcactggaatatgtgataaatccaatcttccgaagatagatcaatcttcggtttctcaaatgatcttggctgagatccaacaaggcaatcatcaacctttcaaaaaatttcaagaaaacatttcagttagtgtttcttcttcttcagatgtttctattgttgggaaccatttcgatgatttgagtgaacttcatggtataacaaattctactccaattcgaagttttacaatggatcgcttagattttggtgaagaatcgtttcaacaagatttatacgatgttggttccaatgatttgattggtaaccctttgataaaccaatcaattggtggatatgttgataatcacaaagatgaacacaagttgcaatttgaatatgaatcataa

SEQ ID NO: 1792 - DNA, 1086 bp, Arabidopsis thaliana
  Clone ID: AT_T19F6.C1.o50.tg
atggatacggctcagtggccacaggcaaaggtttttgtgctaacgtttggaagagatgtatttttttattttgatgatcaggagattgtagtgaagcccttggaagaaatagtaacaaacacatgcccaaagccgcaaccgcaaccgcttcaaccgcagcagccaccgtcggtgggtggagagaggaaggcaaggccagaaaaggatcaagctgtaaactgtccgagatgtaactcaaccaacacaaagttttgttactacaacaattatagtttgacgcagccaagatacttctgcaaaggttgtagaaggtattggaccgaaggcggttcgcttaggaacattcctgttggcggtggctcaagaaagaacaagagatctcactcttcttcttctgatattagtaacaatcactcggattctacacaaccagctacaaagaagcatctctctgatcatcaccaccacctcatgagcatgtctcaacaaggtttgaccggtcaaaaccctaaattccttgagacgacccaacaagatctcaatttaggtttttcaccacatgggatgattaggaccaacttcactgacctcatccacaacattggcaacaacaccaacaagagcaacaacaataacaatccattgattgtttcttcatgttctgccatggctacttcttctctggatctcataagaaacaatagtaacaatgggaattcttcaaattcttccttcatgggatttccagttcataatcaagatccagcatcaggagggttttcaatgcaagatcattacaagccttgcaacacaaacaccacactgctagggttttcattagatcatcatcataataatggatttcatggagggtttcaaggaggagaagaaggtggagaaggtggtgatgatgtgaatggaaggcacttgtttccttttgaggatttgaaattgccagtttcttcttcatcagcaacaattaatgtcgacattaatgaacatcagaagcgaggaagcggtagtgatgcagctgctacgtctggtgggtattggactgggatgttgagtggaggatcatggtgctaa

SEQ ID NO: 1793 - DNA, 714 bp, Arabidopsis thaliana
  Clone ID: AT_f15l12.C1.o60.tg
atgggactatcatattcatcaaacccaacaccgttagataacgaccagaagaaaccttctcctgcaacggctgtgacaaggccacagcctccggagctagctctcaggtgtccacgttgcgactcaacaaacacaaagttttgttactacaacaactacagtctcactcagcctcgctacttctgcaaatcatgccggagatattggactaaaggtggaactctaaggaacatccccgtgggtggaggctgccggaaaaacaaacgatccacatcttcggctgcaagaagcctcagaaccactccagaaccggcgtcccacgacgggaaagtcttctcggcggcaggttttaatgggtatagtaacaatgaacatattgatctgagcttagcctttgccttgctgaacaaacaacatccggggagttcttcacagctagggtttcattcagaactcggtagctctcatcagtctgacatggaaggtatgtttgggacaagccaacaaaaagagaacgctacttatgcgtttggtaacgggagcagcggtttgggtgatccaagcagagtcttatggggatttccatggcagatgaatggagagagctttggaatgatgaacataggaggaggtggtggtcatgtagatcagattgattcagggagagagatgtggaccaatatgaactacattaattctggtgctttaatgtag

SEQ ID NO: 1794 - DNA, 738 bp, Arabidopsis thaliana
  Clone ID: AT_F20D10.C1.o120.tg
atgacgtcatcccatcagagcaacaccaccggctttaaaccgcggcggatcaagacgacggcgaagccaccacgtcagatcaataacaaagaaccatctccggcgacgcagccggtgctcaagtgtccgagatgtgattcagtcaacaccaaattctgctactacaacaactacagcttgtctcagccacgtcactactgcaagaactgtcgtcgttactggacacgtggcggcgccctccgtaacgttcccatcggtggctccactcgaaacaagaacaagccttgcagcctccaagtcatctcttctcctcctttgttctcgaacgggacgtcatcggcgtctcgtgagcttgtaagaaaccatccatcgacggcaatgatgatgatgagttctggtggattctccggctatatgtttccgttggatcctaacttcaaccttgcctcgtcttctatcgagtctttgagttcttttaaccaagatttgcaccagaagcttcagcaacaaagactcgtcacttccatgtttctccaagattctcttccggttaacgagaaaacggttatgtttcagaacgtagagttgattcctccttcgacggtgacgacggattgggttttcgataggttcgccactggaggaggtgcaacaagtggcaatcatgaagataatgatgatggggagggtaatttgggaaattggttccataatgctaataataatgctctgctctaa

SEQ ID NO: 1795 - DNA, 783 bp, Arabidopsis thaliana
  Clone ID: AT_F24J8.C1.o13.tg
atgttgccgtacattggacacaacagctaccagcagcaccagtttccgttgccggagatggaaattccggagaagtggaagctttcttacgaacaagaggctattactgctccggcttgtcctcgttgtgcatcgtccaacaccaagttttgttattacaacaactacagcttgtctcagcctagatacttctgcaagggttgccgtcgttactggacgaaaggcggttctctccgcaacattcctgtaggtggaggctgtcgcaagagaagtcgaagcagacagaacagtcacaaaaggtttggccggaacgagaatcggccagatggtcttattaaccaagatgatggattccagtccagccctcctggttctgatattgatttggctgcggttttcgcacaatatgtgactgatcggagcccttctagtacagataatactactggatccgatcaagattcaccgataacaacaaccactcatgctttagaatctttgagttgggatatctgccaagaaactgatgtggatcttggattctacggggaattcaataatctaactcagaagaccaaagaggatcaagaagtatttggtcagtttctccaagaagatcgagaggagatcttcgagttccagggtttactcgatgacaaagagattcaagagatcctggaatgctcattctcagaggagccagaccagttagtttctcaggggagcttcatgatcaatggtgataactggagttcaacagatcttaccaggttcgggatttga

SEQ ID NO: 1796 - DNA, 1200 bp, Arabidopsis thaliana
  Clone ID: AT_T22P11.C1.o50.tg
atggttttttcttcatttcctacttatcctgatcattcatcaaactggcaacaacaacatcaaccaatcacaaccaccgttggattcacgggaaataacatcaaccaacagtttcttcctcaccatcccctcccaccgcaacagcaacaaacgcctccgcagcttcaccacaacaacggtaacggcggagtcgctgttcccggtggacctggcgggttaatccgaccaggttcgatggcggaaagagcaaggctagccaacataccattacctgaaacagccttgaagtgtccaagatgtgactcaactaacaccaaattctgttacttcaacaactacagtctcactcaacctcgccacttctgcaaagcatgccgtcgttactggacacgtggcggtgctctaaggagcgttcccgtcggtggcggttgccgtagaaacaaaagaaccaaaaacagcagcggtggaggtggcggtagcaccagtagcggtaacagcaagtcacaagacagcgccacgagcaacgaccaataccaccaccgagccatggctaacaatcagatgggaccaccttcttcgtcatcgtctctaagctcgttgctgtcttcttacaacgcagggttaatccccggacatgatcataacagcaataacaacaacatacttggacttggatcatctttgcctcctcttaagcttatgcctcctttagacttcacagacaacttcaccttacaatacggtgccgtttcagctccttcttatcatataggcggtggaagcagtggaggagcggcggctcttttaaacggttttgaccagtggagattcccggcaacaaaccaacttcctttaggcggtttagacccgtttgatcaacaacatcaaatggagcagcagaatccaggttacggattggttaccgggtcgggtcagtatcgacctaagaacattttccataaccttatctcctcttcttcgtctgcttcatcagctatggttacagccaccgcgtcgcaattagcttcagtgaaaatggaagatagtaacaatcagctcaacttgtctagacaactttttggagacgaacaacagctctggaatattcatggcgctgctgcagcatccaccgcagctgcaacaagttcgtggagtgaagtctctaataatttcagttcttcttctactagcaatatataa

SEQ ID NO: 1797 - DNA, 750 bp, Arabidopsis thaliana
  Clone ID: AT_F7J7.C1.o20.tg
atggataacttgaatgttttcgcaaatgaagacaatcaagtgaatgatgtgaagcccccaccaccaccacctcgagtgtgtgcaaggtgtgattctgataatactaaattttgttattacaacaactactgtgagtttcagccacgatacttctgcaagaactgtcgtagatactggactcatggtggggctttaagaaacataccaattggtggaagtagtcgtgccaaacgggcaagggtaaatcaaccttcggttgctcggatggtttctgttgagacccaacgaggtaacaatcaacctttctctaatgttcaagaaaacgttcatcttgttggatcttttggtgcttcatcttcatcttctgttggtgctgttgggaacctttttggttctttgtatgatattcatggtggtatggtaacaaatttgcatccaactcgaactgttcgaccaaatcatcgcttagctttccatgatggatcatttgagcaagactattacgatgttgggtccgataatcttttggtcaaccaacaagttggtggctacggttatcacatgaatccagtggatcaattcaagtggaaccagagcttcaacaacactatgaacatgaattataataacgatagcactagtggaagtagcagaggatctgacatgaatgtgaaccatgataacaagaagatcagataccgcaactctgtgattatgcatccttgtcatctggagaaggatggtccttga

SEQ ID NO: 1798 - DNA, 1317 bp, Arabidopsis thaliana
  Clone ID: AT_T18A20.C1.o9.tg
atggacttcacaagaaacagcaacaccaagctccatccccaaactcagcttctgtttccccctaatatggagaaaaactcaaatgttagcgccaacccatttgcagaagactcacttacaagcagaatcaatctaaaggaaactacagatttcatcaagtcacttccaatttcatcaaaccaaagcagtagtagcagcaatgagatggtaaacgagagaagaccaagtttctcatcacaaaagagcattggagaaggaagaagcaatggacaaagaagattgatgttaatggagtctccttgtactccaggtagaggagtcttcagtttcagtagcaatgtctctggtagaagaagaaacttcccttctaaatggattgatgctgagaaatgggtcacttcctctggtcatgactctccagcacattctctcaaaaacaaccaatttgatgggtttaaacaccaggtggaagttgtatactcagagaaatctagggttacagaagaatgtttccatggatctgtctcattatctccacaagatcttatccttaaagataagttagcaaacgaagttcctcagattcttccatcaacggaagggtttatattcaaagattccgacaagtttctccggtacgaggaagctcaagttcaacacagagacatgggaacagagatgacaccaataggaagtgtaacgacttcaagatgtcacacgccgtttaaaagttcctctccagcgagacacaacacgccttctcaattgtctggtccgttaacggaaaccaaaaacgttatagatatatccgagttcgaagacaagcttagactcagtgggtcatcaacgagtcagtattgttactcggtgacgagtcattggaactcgagagaagaagaagaagaagagatatcgaagagtttaagacatttcgatatggagagtgagttaaggagaagtgtgtctgaatctaaagctcctttatgggatgatgaagacgacaagatcaagtatcaaagagaagaggccaaaattcaagcatgggttaatcttgaaaacgctaaagccgaagctcaatctagaaagcttgaggtgaaaatacagaagatgagatcaaatttagaggagaaattaatgaagagaatggatatggtgcaccggagagcagaagattggagagctacggcgaggcagcaacatgttgagcagatgcagaaagcggccgagacggcgaggaaattgacaaaccgccgaggctatttggttaccggccgtagctcatgtggttgtctaccttgcaataatacttgtcattaa

SEQ ID NO: 1799 - DNA, 1284 bp, Arabidopsis thaliana
  Clone ID: AT_C7A10.C1.o390.tg
atgagaaagacttctgtttcatctaatagctttggtgggtttttaagtcccggagctccgagttacgctgacaacaaaggttggagctccgagagagttcctcatccttcctccactacttcctcctctgcaattaacggtggtcgtcgtcacatcggctcttcttccgctttaacgacgccgttttacagcggcagagcaattccttcgaaatgggaagatgctgagcggtggatttgtagccctgtgtcgacttacccacaaggtgtttgtttaaattcctcagtgagttctgaacagagaaggcagaaatctaaaagtggtccgattgttcctcctacgttgcctcatccgcatcctacgtcttcttcgtcggcgactgggtgttatcactattctccgaggatgatgatgcggtctatggatgctcctcctaagggtttaatggttgctggttctccgttttctactggagttttggaggcggatagggtttttagaggaagtgtcggtggtggtggttgtgatggctatggtcgtggacctggccatggacatagccggagctgggttgatttgatgagtgaagaaacttcttcacttagctccaaaactgatacagaggagaaagcagagatgacgacggcgatgcaatctccggtggtatcaagaagagatatggctactcagatgagtccagaagagacgagtcctaataacaataaccagtctccaccattggttgtttctgtgattgagccacctccttgtagaggtgaagtgagagaagtgaaaatggataaaggagcaagaatgattaagcgtccaaagagacgagtcatgtcttctaggattattaggagagagcaacctgaggttgaagacaattctgaagcttctgcttcttcttcttcttgggatatctcagaaccagccatgactctttctaagttgcaaagagaggaagcgaagattgcagcttgggaaaatctgcagaaggcgaaagcagaagccgctattagaaaacttgaggtgaagctggagaagaagaaatcagcatcaatggataagatcttgaacaagcttcaaacagctaagatcaaagcacaagagatgaggagaagttcagtatccagtgaacatgaacaacaacaagggaatcatcaaatctccagaaactcggtgaagatcacgcatcttgttcgaagacatactttcatgactcctttcatgacttgctttgctcctcgtgttgattgcagaaaatcttcttctgctctctga

SEQ ID NO: 1800 - DNA, 792 bp, Arabidopsis thaliana
  Clone ID: AT_mfb13.C1.o50.tg
atggataatttggttaagcaaagaagaagaagggtctcaatctctgagaacataaaaacggatttgccaatgctatcagaattggacataacagattacccagcattaaactggctgaaaaaccaatcatattggtacgagaaaaatgactactacaacgagaaagagagtgaattggcagtttctgttgcggttgctgcattcgtcattagatcaatggaagaagccgataaacaaaaatcgaaaagaataagagaagaaatcaagaggtcaaggaccaaaaaatccaatctggttatacctaatacccaagtaaagaggttaagcaaatcatatacacaagaggtgaaaattggagaggagagtttcagaaaaaaattgttggagtatccatcagaaaaccgtcggccacaagagattggctcatcctccggaacatcaggacttgcttcagcgtcaagtaaagcagattcttgggaaaaatctcaaatcaagaaaataagattaaggtatgagaaaatgaaagctgatattgtgggttgggagaatgagagaaaattagcagctacactgttaatggagaaaagaaagagtgaattggagaagagaaaagggattaataatcagcattataagtcaaaattagcaaggattcaactaatagctgatggagccaagaaacagcttgaggagaagagaaggagcaaagaagctcaagttcatggaaaagtaaagaaaatgagtcgaacagggaaagttcctaataattatttctgctttcggtgttactaa

SEQ ID NO: 1801 - DNA, 1530 bp, Arabidopsis thaliana
  Clone ID: AT_T4K22.C1.o7.tg
atggattacgagaggatacagaaagtgcagaagagtataatctcgccaacgaagctgagaatgaagctaatgggtccactcaataacatgaagcgagaaggatccaagtccaacagtaactcttcaagaacatctccttctcgtcttcagattccagatgactccgagttctccaagaacagcttgttagcttctaactcttattcagacgacgatgtggcagctacaactacggatatagaagtagctaagctgccaaatgagccggttttgtatccaaccgagaacgataatcaaggctcaaaagatcggtgtgaaggtgttgttccaagggaaaatgatcagcctagactgcagcaatttaggaaaggggacttgaatatggcttctcctcatataatgagacctcaagaagatgaaaaccttgattatgacagtaacgctagctcttcaagcttcgagtttcaccgagctcgtggtgagcgttcgaatcagaatcatggctcaagaggatatccttcaagacaaatgccatctaaatggaatgatgctgagaagtggataatgagcagacagaacatggtgatgaggaagaacggtcaagggaaccgaatacctgtgagaattgtgcctgataatgcaggttacgagcataacaaatctaggatggatctgtgccaatcctcacaagttgatgggtttgagaagttccctaatgttgttccctcggcgccacatcctattctaactcaagagtatggaggagactcgttgattgaccaatccacacaaagcaatgatcttgcggattcatcacatgatcatacaacaggtggtcctgcgattcgttcggtatgtatgagagatatgggaaccgaaatgacacctataccgagtcaagaaccttcaagatctgtgacaccagttggtgcaacaactcctcttcgtagcccgacttcatctctcccttctactcctagaggtggccaaccagaggaatcttctatgtcgaaaaacacaagaagagaactatctgaggaggaagagaaagcgaagacgcgaagagagattgtagctcttggagttcagctagggaagatgaacatcgccgcttgggcaagtaaagaagaagaggagaacaagaaaaacaatggagatgcagaggaggcacagaagattgagtttgaaaaacgagcgactgcatgggaagaagcagagaaatccaaacataatgcgaggtataagcgtgaggaaatcagaatccaagcttgggaaagtcaggagaaagccaaactcgaagcagaaatgcgacgtatagaggctaaagttgagcagatgaaagctgaagctgaagcaaagataatgaagaaaattgcgttggctaagcaaaggtcagaagagaaacgggctttggcggaagctagaaaaacccgtgatgctgagaaggcagtggctgaagcccaatatattcgggaaactggtagaataccggcatcaagttacaagatatgttgtggttggttctcatga

SEQ ID NO: 1802 - DNA, 1461 bp, Arabidopsis thaliana
  Clone ID: AT_F5O4.C1.o6.tg
atggattacgaacgaatcggaaagacccaggttactagtagcggcggcggattttctccggggaagttaaggagtatgcttcttctaggtgttgatagaaagaagaatgaagaagaagaatcaactcctacaatgagatctgggtctaatcaaattgatgaccctagggtttatgttgctagtggattagatgattgcaaagatgttgatgttgtgagtgagattactgattgttctacttcagggatagctagatcgattagtttgggtcttcaagagtattctgattatgataatgtgaatgagatcaagagtgtttctgcatcatctgtctttgagtttcaaaagactgagaaggaaaaagttaatcaaagaatgcctattagatcattctctaaaccagctccatctaaatgggatgatgctcagaaatggattgctagtcctacggctaaccgaccgaagactggacaggttcaggttccgggttcgaagaaagggcctagctttggtcgtcagtcttctatgaagattgttgaagttgctgaacatagagtggttgaagagcctgatacaaagagaatagatgtaagccaagtgaaaaaggatatgggaaacaagtttggtagctgggaagttgattcgtacactaccgtggattcatatgtcaaaccggttcttatggttgagaactctattgtagaatcagcaactgaagttaatctcagccgtcatgactcgtcagtcgcaactgcgtttgctcaaccgccttcaacggcaaggtctgtgtcaatgagagacatgggaactgaaatgactcctatagcgagccaagaaccttctagaaacgggacaccgattagggcaacaacgccaatacgaagtcctatatcttctgaaccttcaagtccaggcagacaagcatcagcttctcctatgagtaacaaggaactgtcagagaaagagcttcaaatgaaaactaggagagagataatggtgttgggtactcaacttggtaaatttaacattgctgcttgggctagcaaggaggatgaagataaagacgcatccacatcattaaagaccaaagcttctctacaaacttctaaaagtgtttctgaagctcgtgctacagcgtgggaggaagcggaaaaagctaagcacatggctaggttcagacgcgaagagatgaagattcaagcatgggagaatcatcagaaggcgaaatctgaagccgagatgaagaaaaccgaggttaaagttgagaggattaagggacgagcacaagaccggttgatgaagaaactcgctacaatcgagcgcaaagcagaggaaaagcgagcagcggctgaagcaaagaaggatcatcaggcagctaaaacagagaaacaagctgaacaaatccgaagaacaggcaaagtaccttcattgttgttctcttgctttagcttttgttcttaa

SEQ ID NO: 1803 - DNA, 1044 bp, Arabidopsis thaliana
  Clone ID: AT_F12B7.C1.o14.tg
atgagatctagtgtagaagataacaaaggatggataggaccagcgacaccggagatatcgaacggttttgagtttcagaaaggttcgaaccggacaccaaaccatcaccggtctactatggggaagccagcgccgtcaaaatgggacgatgctcagaaatggctttctggtgtagggtttgctcgtggaggtggtggaggtggtgacaagagtagtcatcactcaagaagtaataagccgagaaactcgaacgcggatgatcttagacttatagcttcagcttcacagagagaacgtgaaggagaagatcagtacgttgagtatgatgatgaagagatggcggcgggaagaccggaggttgagacgaagaatgttgattgtggtgaatctgtttggaggaaagaaagtagtattaatccaacggctgtgattagatccgtttgtgtgagagatatggggactgagatgactcctattggtagtcaagagccttctagaacagctacaccggtgcgagctactacaccggttgggaggagtcctgtgacttcaccggtgagggcttcacaacgtggtgaggcggtgggggttgtgatggagacggtgacggaggttaggagggtagagagtaataatagtgagaaggttaatggttttgtggagagtaagaaggctatgagtgctatggaagctcgagccatggcttgggatgaagcagaacgtgctaaattcatggctaggtataagagagaggaagtgaagatacaagcttgggagaatcacgagaagagaaaggctgagatggagatgaagaaaatggaggtgaaggcggagaggatgaaagcaagggcagaggagaagttggccaacaagctagctgcgacgaaaaggatagcggaagagaggagggcgaatgcggaggctaagttaaacgaaaaggcggtgaagacatcggagaaagctgattatataaggaggagtggtcacttgccttcttctttttctttctcctttaagcttccctctcgttgttggtgtcaataa

SEQ ID NO: 1804 - DNA, 351 bp, Arabidopsis thaliana
  Clone ID: AT_F6N23.C1.o13.tg
atggagccaaatattccgatccaaagaggtaactcatatcacagagttttagtattgtttagtttcatgttgactcagaagaagctactagatatttcaggatgggagaaaaagaaaactacaaagatcgaatctgaactcgctagaattcagcggaagatggacagtaagaagatggagaaatctgagaaactaaggaacgaaaaagcggcagttcatgcaaaggcacaaaagaagaaggcagatgttcaaaccagacgggctcaagagatccttgatgcggaagaagctgctgctaggtttcaagccgcaggaaagatacccaagaagtcatctttgagctgcttctga

SEQ ID NO: 1805 - DNA, 639 bp, Arabidopsis thaliana
  Clone ID: AT_T20K12.C1.o160.tg
atggcggaggaacagaagatagcgttagaatcagaatctccggcgaaggttacgactcctgctccagcagatacaccggctccagctccggcagagattccggctccagctccagctccgactccggctgatgtcacgaaagacgttgcagaggagaaaattcaaaacccacctccggagcaaattttcgatgactccaaagcccttactgttgttgagaaacctgtagaagagcctgcaccggcgaaacctgcgtctgcatcgctcgatagagatgttaagctagctgatttgtcaaaggaaaagagattgtctttcgtcagagcgtgggaagaaagcgaaaagagcaaagcagagaacaaagctgagaagaagattgcagatgttcatgcttgggaaaacagcaagaaagcagctgtcgaagcgcaactcaagaaaatcgaggagcaactagagaagaagaaagcagagtatgcagagaggatgaagaataaggttgcagcgattcacaaggaagcagaagagagaagagcaatgattgaagctaagcgtggagaagacgttcttaaagcagaagaaacggctgctaaatacagagccactggaattgttccaaaggcaacttgtggatgtttctaa

SEQ ID NO: 1806 - DNA, 825 bp, Arabidopsis thaliana
  Clone ID: AT_T6D20.C1.o23.tg
atgctgactctttaccatcaagaaaggtcaccggacgccacaagtaatgatcgcgatgagacgccagagactgtggttagagaagtccacgcgctaactccagcgccggaggataattcccggacgatgacggcgacgctacctccaccgcctgctttccgaggctatttttctcctccaaggtcagcgacgacgatgagcgaaggagagaacttcacaactataagcagagagttcaacgctctagtcatcgccggatcctccatggagaacaacgaactaatgactcgtgacgtcacgcagcgtgaagatgagagacaagacgagttgatgagaatccacgaggacacggatcatgaagaggaaacgaatcctttagcaatcgtgccggatcagtatcctggttcgggtttggatcctggaagtgataatgggccgggtcagagtcgggttgggtcgacggtgcaaagagttaagagggaagaggtggaagcgaagataacggcgtggcagacggcaaaactggctaagattaataacaggtttaagagggaagacgccgttattaacggttggtttaatgaacaagttaacaaggccaactcttggatgaagaaaattgagaggaagctagaggagagaaaagcaaaagcgatggagaaaacgcaaaacaatgtggcgaaagcgcagaggaaagcggaggagagaagagcgacggcagaggcaaagagagggacagaggttgcaaaagtagttgaagttgctaatctcatgagagcccttggacgtcctcctgccaaacgctccttcttctctttctcctaa

SEQ ID NO: 1807 - DNA, 609 bp, Arabidopsis thaliana
  Clone ID: AT_MRO11.C1.o21.tg
atggctgaagaggaaccgaagaaggtgacagagaccgtgtcggaaccaactccaacaccggaagttccggtggagaaacctgctgctgctgcagatgttgctcctcaggagaagcctgtggctccacctcccgttcttccatctccggcaccggcagaggagaagcaagaagactctaaggctattgttcccgtcgtccctaaagaagtagaggaagagaagaaagaaggatcagttaatcgagatgctgttctggctagagttgagacagagaagaggatgtcacttatcaaagcttgggaagaggctgagaaatgcaaagtggagaacaaagctgagaagaagctttcttcaattggatcatgggagaacaacaagaaagcagctgtggaagctgagctcaagaaaatggaggagcaattggagaagaagaaggcagagtatgtggagcagatgaagaacaaaatagctcaaattcacaaggaagcagaagagaagagagcgatgattgaagctaagcgtggagaagaaattctcaaagcagaggaattagcagccaagtaccgtgccactggaaccgctcccaaaaagcttttcggatgcatgtga

SEQ ID NO: 1808 - DNA, 771 bp, Arabidopsis thaliana
  Clone ID: AT_T8H10.C1.o140.tg
atgacgacgacgacagagcttactcggccacaacaaaggggatcaggaggaggatacttgtctccgtcgaggtctattgcttttagcgacggaactacttcttccggtgagaatttcaccaccgtgagcagagagttcaacgctctagtcatcgccggatcttccatggacaacaacagtaacggaactaaccaatcaggtggtcatcgtgacgtcatacgtgatgaaagaaacgagctgactaggatcggcgaaaacgatgacgttggtgatcatggtcaggtgcctgaggaggattcaaatccatgggcgattgtaccggacgattacaacaaccgggacggttcagagaataatattgtgttggcgtcatcaggtggtcagaaccggatggtgacgactgcttcggtgcagagggtgaagagagaagaggtggaagcaaagataacggcgtggcaaacggcgaaggtggctaagattaataataggtttaagagacaagacgccgttattaacggttggttgaatgagcaggttcatagagctaactcttggatgaagaaaatcgagaggaaactggaagataggagagcgaaggcgatggagaaaacacaaaacaaagtggcaaaagctcagaggaaggcggaggagaggagagccacggcggaaggtaaacgagggacggaggttgcgagggttcttgaagttgctaatctcatgagagccgttggacgacctccggccaaacgatcattcttctctctttcctag

SEQ ID NO: 1809 - DNA, 2640 bp, Arabidopsis thaliana
  Clone ID: AT_F12F1.C1.o18.tg
atggagggtgaagttgctactaacggagtgattctcaagcataatggtgtaaaggatatttctttagaaacttgttggccagagaagaagaaaccggttgaggcaacgagtcttagcagtggttcatcagacatagaagaagagattagtgtggaatgtcctaagcgagtggctaatcaaagacggaaacggtctaaagctgatgagattaaaacgaaatcttcaagaaagaggaaatgtgatgatgagaacaagtgtgaagagaatgagaagaagcagaggagctctgttaaaaagagagcaactacatggaaagaagaagaagttgttgttgatgatgaaaagaaatgcgaacaacaactccaactagttccttccagcaaggcaacatctcgaagcaggagcaagaaatcagtcagtgtggatacttggttggttaacaacgagattgatgttagcgctttgagttcgcgttctgagtctgaactttcggattcttatctgaaaaccgagtactttaatgactgcagaagcatgacaaggagtttaaaggcaaatttgggagagcttgcaatttgccatcaatgctctaaaggggaaagaagatatcttttcatttgcaccttttgtgaagtgaggttgtattgttttccatgcataaagaaatggtatccccatttgtccacggatgatatccttgaaaaatgtcccttttgccgaggaacttgcaactgctgcacatgtttgcactctagtggtttaatcgagacatctaagagaaagctcgataaatacgaaagattttatcatcttcgcttcttgattgtggcgatgcttcctttcctgaaaaagttatgcaaagcacaagatcaagaaatcgaaaccgaggctaaggttcaagattcaatggcttctcaagttgatatatccgagagtctatgctcaaatgaagagcgtgtcttctgtaaccactgtgcaacatcaattgttgacttgcatcgaagctgtccaaagtgttcatatgaattgtgtctgaactgttgccaagagatccgtggaggttggctttctgaccgcccggaatgtcagctacaattcgagtacagagggacccggtatatacatggcgaagctgcagaaccgagctcttcttctgtttccgaggatgaaactaaaactccatccatcaagtggaatgctgatgaaaatggaagcatacggtgtgcgccaaaagagctaggaggttgcggggactctgtgctggagcttaagcgaatcttaccagtgacttggatgtcagatttggagcaaaaggcagaaacattcttagcctcttatagtatcaaaccgccaatgtcatattgtagatgttcttctgatatgagtagtatgaagaggaaggcagcttcgagggacggatctagtgacaattacctttattctcctgattctttggatgtcctgaagcaagaagaacttctgcatttccaagagcattggtccaaaggtgaaccagtgattgttcgaaatgctcttaacaacacagctggtttaagctgggagccaatggtgatgtggcgggctttatgtgagaatgttgattcagcaattagctctaatatgtctgatgtcaaagctatcgattgtttagctaattgtgaggtgaagataaatactctatgtttctttgaaggatatagcaaaggaagaacatatgaaaacttctggcctgagatgctgaagctgaaggattggcctccttcagacaagtttgaaaaccttttacctcgtcactgcgatgagttcatttccgcattaccatttcaagaatacagcgatcctagatcaggaattctcaacattgctacaaaacttcctgaaggacttcttaaaccagatcttggtccaaaaacttatgttgcatatgggacttcagatgagctcggtagaggagattcagtcactaagcttcactgtgatatgtcagatgctgttaatattctgatgcatactgctgaagtaacactaagtgaggagcaaaggtctgcaattgcagatttgaaacagaaacataagcaacagaatgagaaagagcttcaggagcaaaatggtttagaggaagaagaggttgtgagtgatgagattgtggtttatgatgaaacaagtggtgcactttgggacatctttaaaagagaagatgttcctaagcttgaagagtatctaaggaagcattgcatagaattcagacatacttattgctctcgtgttacaaaggtgtatcatccaatacatgatcagtcatatttcttaaccgtggagcataaaagaaaactcaaggcagaatttggtatggttacttggattgagccatggacatttgtgcaaaagctaggagaagcagtgtttattccagcaggttgtcctcatcaagttcggaatctcaagtcgtgcacaaaggtagctgttgattttgtttcccctgaaaacatcgatgagtgtctccgtttgactgatgagtttcgacaactccctaagaaccataaagccagagaagacaaacttgagataaaaaagatggtgatctatgcagttgaacaagctctgaaagaagtggagacattattgctagatcgcagctaa

SEQ ID NO: 1810 - DNA, 2187 bp, Arabidopsis thaliana
  Clone ID: AT_T6K22.C1.o160.tg
atgtcggagaacgaaatcgtccctgacgagtttcgttgcaaccgctctgatggtaagcaatggcggtgcaagagacgagctttagaggggaaaaagatgtgtgagagtcatcactcgcagcaaagcctaaagcgaagtaagcagaaagttgcagagtcttctaagcttgtcagatcaagaagaggaggaggagatgaagtggcgtcttcagagatcgagccaaacgaaagcagaattaggtctaagagattggggaaatcgaagaggaagagagtgatgggtgaagcagaggctatggatgaagcagtgaagaagatgaagttgaagagaggagatttgcagttggatttgataaggatggtgttgaagagagaagttgagaagaggaagagattaccaaatagtaataataagaagaagagtaatggagggtttagtgaatttgttggagaagagttaacgagggttcttcctaatggtattatggcaatttctccaccttctcctactactagtaatgtgtcttctccttgtgatgttaaagttggggaagagccaatttcgatgattaaaaggaggtttaggtctaagaacattgaacctttgccaattgggaaaatgcaggattctcagagtgtcaggagtgatattgacagggttttgcatctacattatgcggtgtgcatgctacttccagtactaaaagaaatcaatgcggaacacaaagtggaggtggaaaatgacgcagaaaagaaagtggatttgcaaagaatgtgcacacgcagttcctctgttctcaggctaaattctgaccaagatcagagtcaagagagcttatctagaaaggttggatcggttaaatgctcgaatggtataaaatctccaaaagtgttgctggattttcatcaaaacaatctggaacattttcagacacactggagtaaaggccatcctgtaatagttcgtagtgtgataaagagtggttcaagcctgaattgggatccagtagccttgttctgtcactatcttatgaacagaaacaacaaaaccggtaatactactgattgtatggattggtttgaggtagaaattggtgtcaagcaattttttttggggtctttgagaggaaaggctgagactaatacttgtcaagaaaggctgaagctggagggatggctttcatcttcattgtttaaagaacagttcccaaatcattacgctgaaatactgaatattttaccaatctcccattacatggatccaaagcgcggtctactaaatattgcagccaacctacctgacactgtacaaccacccgattttggcccatgcctcaatatttcatacaggagtggtgaagaatatgcacagcctgattctgtgaagaagttaggttttgaaacttgtgacatggttgatatcttgttatatgtcacagaaacacctgtatccacaaaccagatttgtaggataagaaagctaatgaaaaacatcggaagagtaagatctaaaaatccggcaaaggggagggaaagcagatttgataagggaaagaaacgagataggttggatgactattccagttctgattcagaatcttcacaacactgtttaggcgctaaatgcagaggcagtgagtttgagggagaggaaagagaaagttgcaactactcttgtgaagaagagagcctaagcaacacttatggtgcccagtgggatgtattccaaaaacaagatgtttctaaacttcttgagtatattaagaaccactctctggagctagaatccatggattccagcaaaaaaaaggtgagtcatccattacttgagcagagttactatcttgatgagtatcacaaagcaaggcttaaggaagaatttgacgttgaaccatggagttttgatcaatgtgttggggaagcagtcatcctccctgctggatgtccataccaaattagaaagaataagtcttgtgtaaatgcggttctgaagtttctgtcacctgagcacgttagcgaatctattaaacgagtgaaggagctcaatcaacttcctcagagcgtcaaatcgaaagcaaataagattgaggtgaagaaaatggcgattcataaaatcagcgaagctgtaaaggaaattcgggaactcacatcttcggattcaactggtgcattgagattatataactag

SEQ ID NO: 1811 - DNA, 2736 bp, Arabidopsis thaliana
  Clone ID: AT_F7G19.C1.o7.tg
atgcaggtcaattttgatgaaacttgtgattcagtgattagaatgaatgctaatgagcaaactcgatccgccaatggcattggcaatggcaatggtgagtctattcccgggattccagatgacttacggtgcaagagatcggatggtaaacagtggagatgcactgcaatgtccatggctgataagactgtttgtgagaagcactacatccaagcaaagaagcgggcggctaattctgctttcagggcgaaccagaagaaagcgaaaaggcgatcatcgttaggcgaaacagatacgtattcggaagggaagatggatgatttcgagttaccagtcaccagcattgaccactataataacggtcttgcctctgcttccaagagtaatggtagactagagaagagacataataaaagcctgatgcggtactcgcccgagacaccgatgatgaggagtttctctccacgtgttgcagtggatttgaatgatgacttgggtagagatgttgtaatgtttgaagagggctacagatcttataggacaccaccatctgttgctgttatggatccgacacgaaacagatcacaccaaagcaccagtcctatggaatactcagcagcaagcacagatgtgtctgcagagtctttgggggaaatctgccatcaatgccagagaaaagatagagagagaatcatttcttgcctcaaatgcaatcaaagagccttctgccacaattgtctatcggcaaggtactcggagatatcacttgaagaagtcgagaaagtttgccctgcatgtcgtggcttgtgtgattgcaaatcttgcctgcgttcagataatacaataaaggttcggatccgggaaatacccgttttggacaagttgcagtatctttatcgtctattatcagctgtcctaccagtcataaagcagatccatcttgaacaatgtatggaagttgaactagagaagaggcttcgtgaagttgagattgatcttgtcagggcaagattgaaagcagatgagcagatgtgctgcaacgtgtgtcggataccagttgttgactactaccgtcactgtccgaactgctcatatgacctttgcctgagatgctgtcaagatctacgggaagagtcttcagtgacgattagtgggactaaccaaaacgtacaagatagaaaaggagctcccaaactaaaactaaacttttcatacaagtttcctgagtgggaagccaacggtgatgggagcatcccttgccctcctaaggagtatggaggctgcggttcacattctttgaatcttgcccgcattttcaagatgaattgggttgcaaagcttgtgaaaaatgctgaggagattgttagtggctgcaaattatctgatcttctgaaccctgatatgtgtgattcaagattctgcaaatttgctgagagagaagagagcggtgacaactacgtgtacagcccgtcgcttgaaacgattaaaactgatggagtagctaagtttgagcaacaatgggcagagggtcggcttgttactgtgaaaatggtacttgatgactcatcttgctctagatgggatcctgagactatttggagggatatagacgagctttcggacgagaaactgagagaacatgatccattcttgaaggccattaattgcttggatggtttagaggttgatgtaagacttggggagtttacaagagcatataaagatggaaagaaccaagagacaggtcttccgctattgtggaagttaaaggactggccgagcccaagtgcttccgaggagttcattttctaccaaagacctgagtttatcagaagttttccgtttctcgagtacattcatccccggttaggccttctgaatgttgcagccaagttacctcattactcgctccaaaacgattcaggtccaaagatttatgtgtcttgtgggacgtaccaagaaatcagtgctggcgattcattgactggtattcactacaacatgcgtgacatggtatacctattggtgcacacgtctgaagaaacaacattcgaaagggtgagaaaaacaaaacctgttccagaggaacctgaccagaagatgagcgaaaatgagtcacttcttagccctgagcagaaattaagggacggagagttacatgatctatcacttggtgaagccagtatggagaagaatgaacctgagttggcgttgactgtgaatccagagaacttaacggaaaacggtgacaacatggaatcttcttgcacatcttcatgtgcaggaggagcccagtgggatgtctttcgacgccaagacgtcccaaagttgtccgggtatttgcagagaacattccagaagcctgataatatccagactgattttgtgtcacgcccgttgtatgaaggattgttcttaaatgaacaccacaagagacaactaagagacgagtttggagttgagccatggacatttgagcaacatcgtggtgaggctatcttcattccggctggatgtccgttccaaatcactaatcttcagtcgaatattcaggtggcacttgacttcttgtgccctgaaagcgttggagagtcagcaagactagctgaagaaatccggtgtttaccaaacgaccacgaggcaaaacttcagattctagagattggaaagatatcattatacgcagctagctcagccattaaagaggttcagaaactggtcttggatccaaagtaa

SEQ ID NO: 1812 - DNA, 2193 bp, Arabidopsis thaliana
  Clone ID: AT_F3I3.C1.o10.tg
cctccaagtgaaaaagatacagatgtcaagcttaagcagctgcagtatctgttagtcaaagttctcccagttcttaaggatatttatacggagcagaaccgtgaactagagattgaatcaacaattagaggacaccctgtgacagaagctaatatcaagaggtgcaaacttgacccaagcgaacgcatatactgtgatctctgccgcacatccattgccaattttcacagaagctgtccgaacaaaaattgttcagtcgatatatgtctttcttgctgcaaggaactaagtgagggcttccatcaagagagagatgggaagaaaaatgcagaagggaaaggatatgaatgtcgaatcccagcaggtcaaggaaaagactcggacgcatatgttccactgcatttctcgacttggaagcttaactcagacagtagcattccatgccctccaaaagagtgtggtggttgtggtacttcaacactggagttgagacgcttatggaaaagagattgggttgaaaaattaataacgaatgccgagaaatgtactctgaattttaggccaacagatgtggatattgttcatgaatgttcctcatgctctaccaattctgattccattagaaggcaggcagcttttaggaagaatgctcatgataatttcttatactccccaaatgctgttgatctggctgaagacgatattgctcattttcagtttcattggatgaaggcagaacctgtgatagtcagaaatgttctcgagaagacatctggactaagttgggaaccaatggttatgtggagggcttgtagggaaatggatccaaagcgtaaaggtacagaagaagagacaacaaaagtgaaagctttggattgcttggactggtgtgaggttgaaataaatctgcatcagttttttgagggctacttagaaggccgcatgcataaaaacggttggccagaaatgttgaaattgaaggactggcctccctcagatttatttgaaaagcgccttccaaggcataatgctgagtttattgccgcattgcctttctttgattacactgacccaaagtctggtatcctaaatctcgcaacaagatttccggaaggatccttgaagccagatcttggacccaagacatacattgcgtacggtttccatgaagagcttaatagaggagattcggtgacaaaacttcattgtgacatttctgacgcggtcaatgtgttgacacacacagctaaagtggaaatccctcccgtcaaataccaaaacataaaagtacatcagaaaaaatatgcagaagccatgttgcagaaacaacaatacagtggtcaagtgaaagaagccagcgaacttgaaaacaagtcaatgaaagaagtggatgaaagtaaaaaggatttaaaagacaaggcagctaacgaagaacaatcaaataacagttcaagaccgtcgggctcaggagaagctgagaaagtaattatttcaaaaggtattgcgagaataagagagctttcccattcttatgtatacaaacatatgttactgaatatggagaatggactaatgatgccaacacttcttgcaactcccccatgcgatacagaggataatcccacacaacctgctgtgagtacaagtgtggaatccatacaagaacagaagctggatgctccaaaagaaactgatggcaataccaatgagaggtcaaaggctgtgcatggtggtgctgtctgggatatctttcgaagagaggatgttccaaaacttattcagtttttgaaaaggcacgagcatgagtttcgtcacttcaataacgaacccctggaatccgttattcacccaattcatgaccagactatgttcttgagtgatagccagaagaaacagctgaaagaagaatttgatatagaaccatggacctttgagcaacacctcggcgaagcagtcttcatacctgcaggttgtcctcaccaagtgaggaatagacaggtggcactagactttgtggctcctgaaagcgtcgaagaatgccttaggctaacacaggagttccggagattgcctaaagaccacagttctagcgaggataaattggagcttaagaaaattgcactgtatgctgcgagttcagccataagagaggtaaaagggctaatgcaaagctcccgacgcagtgatacctaa

SEQ ID NO: 1813 - DNA, 3084 bp, Arabidopsis thaliana
  Clone ID: AT_MLP3.C1.o6.tg
atggattctgtggaggaagaaggtgttgttagggttgaagaagagaacggacgcggtggtctccgtaggcatcggagggtttctacgaagctggcgaattacgtagatcctccgactgacgacgaagaagatggaggacccaagcgaaagggcaaaaggggtggaaatagggctccgaaaaagacaccgaagaaagacgaggagatgcaaaagaacgaaattgatgaagcaaaccgagtcactggtctggtgaaggaaaaaagagccgcgactaagattctgaatcgcaaagactccattattgaagtaggagaagcttctggaagcatgcccaaggaagtaaagggaattaggattgggaaaaggaagggagaaatcgatggtgagattccaactaagccgggcaagaagccaaagactacagtagacccgagaatcattggttacagaccggacaatatgtgccatcaatgtcaaaagagcgataggattgttgaacggtgtcagacctgcaatagtaagcgttattgtcatccatgcttggacacttggtacccccttatagcaaaagaagatgttgccaagaaatgcatgttctgctctagtacttgcaattgcagagcatgcttgcgtctagatactaaattgaaagggataaattcgaacctcatagtcagcgaggaagaaaaggtccaagcctctaagtttattctgcagagccttctcccacatctgaaaggaataaatgatgaacaagttgctgagaaggaagttgaggccaaaatatacggactgaagtttgaagaggtgaggccccaagacgctaaagctttccctgatgaaagactatactgtgatatctgcaagacttctatctatgatctccataggaattgcaagtcctgtagttttgatatctgccttagctgttgccttgagatccgcaatggaaaggctctggcatgtaaggaggatgtgtcttggaattatattaaccgaggtttagagtatgaacatggacaagaaggaaaagtgattgaaaagccggcgaataagctagatgataagttgaaagataagctggatggtaagccggatgataagccgaagggtaagccaaagggtaggccaaagggtaagccggatgataagccgaagggtaaactgaagggtaagcaggatgataaaccggatgataagccagatgagaagccggttaatacagaccatatgaagtacccttctctgtggaaagcaaatgaagctgggatcattacttgttgttgtggtgctggggagttagtgctgaaacgactacttccggatggttggatatctgagttggtcaacagagttgaaaaaactgctgaagctggcgagcttttgaatttacctgaaacggttttggagcgatgcccttgttctaactctgacagacatattgacatagacagctgtaatttgttaaaagctgcttgtcgagaaggttcagaagacaattatctttactctccaagtgtatgggatgttcaacaagatgatttgaagcattttcagcaccattgggtaaaaggcgagcctgtgattgtgagaaatgtgcttgaagctacatctggtttaagctgggaaccaatggtaatgcatcgtgcctgccgccagataagccatgtccagcatggatcacttaaggatgttgttgctgttgattgtttggacttctgtgaggtaaaagttaatcttcatgaattttttactggatacacggatggccgatatgatcgaatgggttggccactagttctgaaactgaaagattggcctccagctaaagtcttcaaagataacttgccacgtcatgctgaggagttcttatgtagtttgcctttgaagcattacactcatccggttaatggacctttgaatctcgctgtcaagcttccccaaaattgcttgaagccagacatgggaccaaagacgtacgttgcttctggatttgctcaagaattaggccgtggagattctgttactaagctccactgcgacatgtctgatgcggtgaatattttgacgcacatatctgaagtgcccaatatgcaacctggaattggaaatctgaaaaagaagcatgccgaacaagatctcaaggagctgtatagctcagtagctaacaaggaggaaatgatggagattcttgaaaattccagacaacaagtccaaaatgttgaaactgatgatggagctctttgggacattttccgtagagaagatattcctaaattagaaagttacattgagaaacatcacaaggagttcagacatctctactgctgtcctgtgtctcaggttgttcatcctatacatgaccagaacttctatctgacgcggtatcatataatgaagctgaaagaagaatatggcattgaaccttggaccttcaatcagaagcttggtgatgctgttttgatacctgtaggttgccctcatcaagttagaaatttgaagtcctgcaataaggtagcgcttgacttcgtctcacctgaaaatgtcagcgagtgtttacgcttgacaaaacagtatcgtctacttccaccaaatcattttgcaaaagaagacaagttaggggttaagaagatgatagtccatgcagttgataaagctctcagagacttaagtggagagaagtctccagaacctgaagagaagaaacaaaatatgagagggccgaagaagggggcagccaaggcagttgccaaggctctcaaagacttatctccaagtgaaaagaagtcttcggaagcagctgaagaggagatatcaaatgggatagtcaatgcaatcgataagggtctcaaagacttacctccaagtgaagagaagtcttccgaagccaaagtggagatatcaaatgggatagtcagtgcaatggataaggatctcgaacacatatcttcaagcgaaaagaagtctacggaagaggaaggggtgaaaagaccaaatattgtgaggacatatgagcggagaaaaaagctgggaagtgaagtaaccaacgcatacattgacagattagaaatggagaagatgtag

SEQ ID NO: 1814 - DNA, 2652 bp, Arabidopsis thaliana
  Clone ID: AT_F24O1.C1.o33.tg
atggattctggagttaaattggagcatatgaattgtttccaattatcttatcaatattcgtggacgactaggaagaagagaactctgaaaccattcatgtcaaaaggttctagccctagtagtagtagtgatagtaggaaacggaagctttcgagagctgaagatagcgatgattcagcggttaaacggaatgcgaaacgaaggagaaagatatgcaaagtagaagaatattatgaagatgatgattgcatattaagtgattgggttcagaggaatactgcgaaaaggattgataagcgcaacgaagaagttgaagttatggttaagatagagtcaggtgatgattgcacaataggtaagtggttttctgatgttagtagtaaaaggaaagataaacgacaagtagaagttgatgaagatgaggaatgggaagaagaagttacactgtgttctaagatcaaggcaacgtcgtcgcgaagcagaacccatagtttaagtgctaacagtccagaaaatgttacagatgttattagtccttgtcgttcacggtctccagcttctaatgtatcagattccattcagaaaaatgactgcaccagtagtagaaaacagagtggcccaatttgtcatcagtgcttgaaaggggaaaggataacacttctcatttgtagtgaatgtgagaagacaatgttttgtcttcaatgtataaggaaatggtatccaaatctatctgaggatgatgttgttgagaaatgtcctttatgccgtcaaaattgtaattgtagcaaatgcttgcatttgaatggtttaattgagacatcgaagagggaactcgcgaaatctgaaagacgtcatcatctccagtatttgattacgttgatgcttccttttctgaataagttatccatattccagaagctagagattgaatttgaggcaactgttcaaggaaaactgccttctgaagttgaaataactgcggctataagctacactgatgaacgtgtatactgtgatcattgtgcaacttcaattgttgacttgcatcgaagctgtccaaagtgctcttatgaactttgtttgaagtgctgtcaagagattcgtgaaggatcgctttctgaacgccctgaaatgaagttccattatgttgatagaggacatcgatatatgcatggtttagatgctgcggaaccgagcttgtcttccacttttgaagacgaagaagctaacccatctgacgctaagtggagccttggtgaaaatggaagcatcacttgtgcaccagaaaagctaggtggttgtggtgaacggatgctagagcttaggcggatcctaccactcacgtggatgtcagatttagagcacaaagcagagactttcttatcatcatacaatataagccctagaatgttgaactgtaggtgttcttctttggagacagagctgacaaggaaatcagcttcgaggacaacatcaagtgacaactaccttttctgtcctgaatctctcggtgtcttgaaggaagaagagcttcttcattttcaagagcattgggcaaaaggcgaaccagtaatcgttaggaacgctcttgacaacacacctggtttaagctgggagccgatggttatgtggcgggctttatgcgaaaatgtgaattcaacatcaagctctgagatgtcccaagtcaaagcaattgattgcttagctaattgtgaggtggagatcaatactcgtcagttctttgaaggttatagcaaaggaagaacatatgaaaatttctggcctgagatgttgaagcttaaggactggcctccttctgataagtttgaagatcttctacctcgtcactgtgatgagttcatatccgcgttacctttccaggaatatagtgatcctagaactggaattcttaacattgcaacaaagcttcctgaaggatttatcaaaccagatttaggtccaaaaacttacatcgcctatgggattccagatgagcttggtagaggcgattccgtgactaagcttcactgcgatatgtcagacgcggtgaatattctaacgcatacggccgaagtgaccctaagtcaagaacaaatatcctcagtcaaagcactgaaacagaaacacaagttacagaataaggtcgataaacagagtactgaagactgtaacgaaaaggaagaagaagaagaagaagaattgaacatgccagagatttcgagcaatgaaaatgaagaaacgggcagtgctctttgggacatatttaggagagaagacgttcccaagttagaagagtatctaagaaagcattgcaaagaatttagacacacttattgtagtccagttacaaaggtttatcatccgatacatgaccaatcatgctatttaaccttagagcacaaaagaaaactcaaggcggaatatgggatcgagccatggacatttgtgcaaaagctaggtgaagcggtgtttattcccgcgggttgtcctcatcaagttcggaatctaaagtcgtgcacaaaagtcgcagttgactttgtgtcaccagagaacatccatgagtgtctgcgtttgaccgaagagtttcgccaacttcccaaaaaccacaaggccagagaggacaaactcgaggcaagtcttttatctctttga

SEQ ID NO: 1815 - DNA, 1386 bp, Arabidopsis thaliana
  Clone ID: AT_K14A3.C1.o9.tg
atgttgcaaacaggtacacctctatggagaaacgggccaccagagaagccggtgttgtgcaatgcgtgtggttcgaggtggagaactaaaggatcattagtaaactacacacctcttcatgctcgtgctgaaggtgatgagactgagattgaggatcatagaactcaaacggtgatgattaagggaatgtctttgaacaaaaagattcccaagaggaaaccatatcaagaaaacttcacagtgaaaagagctaacttggaattccataccggtttcaagaggaaggctctggatgaagaagctagcaatagatcgagttcaggatcggttgtatcaaactccgagagctgtgcacaatctaatgcgtgggactcgacttttccttgtaagagaaggacatgtgtgggacgtccaaaggcagcttcttctgttgaaaagctcacaaaggatctttatactattctacaagaacagcaatcttcttgtctctctggtacttcagaggaagatttgctttttgagaatgaaacaccaatgctgttaggacatggtagtgttcttatgagagatcctcactcaggtgctcgagaagaggaatctgaagctagctcactcttagttgagagcagcaagtcttcatcagttcattctgttaaatttggtggaaaagcaatgaagcaggagcaagtgaagaggagcaaatctcaagtcttaggaagacatagttcactactctgtagcatagatttgaaggatgttttcaactttgatgagttcatagaaaatttcacagaggaagaacagcaaaaactgatgaaattacttcctcaagttgactctgttgatcgtcctgatagcctcagaagcatgtttgagagttctcaattcaaagagaacttatccttgtttcagcaacttgtggcagatggtgtttttgagacaaattcgtcttatgcaaaacttgaagacattaagacacttgcaaagcttgctttatcagatcctaacaaatcccatttgttggaaagctattacatgctcaagagaagagagattgaagactgtgttactacaacatcaagggtctcaagcttgagtccatcgaataataatagtcttgtaaccattgaaagaccttgtgaaagcttaaaccaaaacttctcagagacaagaggtgtgatgagaagcccgaaagaagtgatgaagattagatcaaagcacaccgaagagaatttagagaatagtgtatcttcctttaaacctgtgagctgtggtggacctctggtgtttagctatgaagataatgatatttctgatcaggatcttcttcttgatgtgccgtcgaacggctcattccctcaagcagagcttctaaacatgatatga

SEQ ID NO: 1816 - DNA, 948 bp, Arabidopsis thaliana
  Clone ID: AT_T1B3.C1.o14.tg
atgaataacgatttgtggttacctgaagaggacttcaagggtctaccggataatttccttgataatctcgttgatcctaccaatgatgtttctgtagaagatatagagaccggcgatgatgagggagattgggatgccaaatttcaaaagctcgtacctccaccattggatgagctaatgagtttgtcctatgagttcacttgcaatggacagcgtgtgcaagttcagaagcatgtgccaattttgcttgttatcttgagtcaaatgtacatggatttgaatggtttccagtttggcaactgggatgtggtaatagagaagcagtcgagttcttcagaagtcttctctactgttgataactcccctcctaatgtcaaagtctcaaagttgttgcaatctttaagcccagtctcagtcctcaagaacaccaacggttctggctcaccccaaaacccaaacggagatcagaaactggcctttctcgtgaaaggcatcagaagcaagcgcaaacgccccacactactgagagttacattcctcaaatcatttctattagagatgtcacagcagtttgctccggatgaatctgaatcttctgagatttccgccttgaagaaacgcaagaagaacaagagtcgtcgcttgaaatgcactcattgcgagacaaccactaccccgcagtggagggaaggacctaatgggcgtaaaaccctttgcaatgcttgtggaatccgctttagatcgggccgtcttgttttagaataccgtccagcagcaagcccgaccttcatcccaaccgtgcattcaaatttgcacaagaagatcatatatatgagaatgaaagataacgaccagtttgataccagaaagatccgtgctgagacatccggaccagagactagatcaaggcttcgtaacttcggcagaccaatgagttatggtcaatga

SEQ ID NO: 1817 - DNA, 363 bp, Arabidopsis thaliana
  Clone ID: AT_F2P16.C1.o190.tg
atggatccaaggaagctactatcttgttcatcctcttacgtgtcagtgagaatgaaagaagagaaggggacaattaggtgttgcagtgagtgtaagaccaccaagacaccaatgtggagaggtggaccaactggtcctaagtcactttgcaatgcatgtggaattagacacagaaaacagagacgatcagagttattgggtattcatattattcgcagccacaaaagcttagcctccaagaagataaacctattatcatcatcacacggtggcgtggcggtgaagaaacgaaggagtctaaaggaggaagaacaagctgctttgtgtctattgttattgtcttgtagctctgttttggcctaa

SEQ ID NO: 1818 - DNA, 636 bp, Arabidopsis thaliana
  Clone ID: AT_C7A10.C1.o740.tg
atgggtttctcaatgttcttctcccccgaaaacgacgtcagccatcattcctctccatatgcttctgttgactgcactctctcacttggaactccctccactcgcctctgcaacgaggatgatgaacgtagattctcgtctcatacctccgacaccataggctgggacttcttgaacggttccaagaaaggcggtggaggcggcggacataacctcctcgctcgccgttgcgccaactgcgacaccacttctactcctctttggagaaacggtccaagaggtcccaagtcgttgtgtaatgcgtgtggaatccgattcaagaaagaagagagacgtgcatcgaccgccagaaactcgacctccggcggaggatcaactgcagctggagttccaactttggatcatcaagcaagtgcaaattattattataacaataataaccaatatgcttcatcgtcgccttggcaccatcagcataatacgcagagagttccatattactcgccggccaataacgaatactcatacgttgatgatgtcagagttgttgatcatgacgtcacaaccgacccgttcttgtcttggaggcttaacgtcgccgaccggaccggccttgtccacgattttacgatgtga

SEQ ID NO: 1819 - DNA, 420 bp, Arabidopsis thaliana
  Clone ID: AT_K21P3.C1.o18.tg
atgctagatcacagtgaaaaggtcttattggttgattcagaaaccatgaaaacaagagctgaagatatgatcgaacagaacaacactagtgttaacgacaagaagaagacttgtgctgattgtggaaccagtaaaactcctctttggcgtggtggtcctgttggtccaaagtcgttgtgtaacgcgtgtgggatcagaaacagaaagaagagaagaggaggaacagaagataataagaaattaaagaaatcgagttctggcggcggaaaccgtaaatttggtgaatcgttaaaacagagtttgatggatttggggataaggaagagatcaacggtggagaagcaacgacagaagcttggtgaagaagaacaagccgctgtgttactcatggctctttcttatggctctgtttacgcttag

SEQ ID NO: 1820 - DNA, 615 bp, Arabidopsis thaliana
  Clone ID: AT_T14D3.C1.o110.tg
atgtcgggtcgtgaagatgaagaagaagatcttggaactgccatgcagaaaattcccatccctgtcaacgtattcgataaagaacccatggatttggatacggttttcggttttgctgatggagtaagagagatcatagaagattccaatttactacttgaggaatctcgagagtttgatacaaacgattccaaaccgtctcgaaacttctcaaatctgccaaccgcgacaagaggtcgtcttcatgcaccaaaacgatctggaaacaagcgaggaagacaaaaaagactgtctttcaagagtccatcagatctttttgattctaaatttggcattaccgacaagagttgttcacattgcgggacgagaaagactccgctatggagagaaggaccgagaggagcgggaacgctatgtaacgcgtgcgggatgcgatacaggacaggtcggctacttcccgagtaccgccctgcttcaagtccggatttcaaacctaacgttcactccaactttcatcgaaaggttatggaaatcagaagggagaggaagtcatctcctccgaatagcttcggtttctcggagtcgtatcattcaactaggaaattagggttttga

SEQ ID NO: 1821 - DNA, 1197 bp, Arabidopsis thaliana
  Clone ID: AT_MPI10.C1.o2.tg
atggattcaaattttcattactcgatagatcttaacgaagatcaaaaccatcacgaacaaccctttttctatcctcttggatcctcttcctcgcttcatcatcatcatcatcatcatcatcatcaagtcccttctaattcttcatcttcttcttcgtccatttcatcgctctcctcttacctccctttcttgatcaactctcaagaagatcaacatgttgcctacaacaacacttatcacgctgatcatctccatctttctcaacccctcaaggccaagatgtttgtggctaacggtggatcatcagcatgcgatcacatggtgccaaagaaggagacaagactgaaactaacgataaggaaaaaagatcacgaagaccaaccccatcctcttcatcaaaacccgacaaaacccgattcagactccgacaagtggttgatgtccccaaagatgcggttgatcaagaaaacaatcaccaacaataaacagctcattgatcagactaataataataatcataaagaaagtgatcactaccctttgaatcataagactaatttcgacgaggatcaccatgaagatcttaatttcaagaacgtcttgaccaggaagaccacggccgcgaccaccgagaatcgctacaatacaatcaacgagaacggttatagtaataacaatggcgtgattagggtttgttcggattgtaacaccaccaagactcctctttggcgaagtggacctcgaggtcccaagtctctttgtaacgcatgtggtatacggcaaagaaaggcaaggcgagccgctatggccgcggccgctgcagccggcgaccaagaggtggcggtagcgccccgagtgcaacaattaccgctgaaaaagaagttgcaaaataaaaaaaagagatcaaacggaggggaaaaatacaatcactctcctccaatggtggccaaggccaaaaagtgcaagatcaaagaggaagaggagaaggaaatggaagcggaaacggttgccggagattcagagatcagcaaatctacaacttcttctaattcttcgatttcgtcaaacaaattttgcttcgatgatttgacaataatgttgagcaaaagctcagcttatcaacaagtgttcccacaagatgagaaggaggctgctgttttgctcatggctctgtcgtatggaatggttcacggttga

SEQ ID NO: 1822 - DNA, 969 bp, Arabidopsis thaliana
  Clone ID: AT_F28P10.C1.o210.tg
atgattggaacaagcttccccgaggatcttgattgtggcaacttctttgacaacatggatgatctcatggactttcccggtggagatatcgatgtcggtttcggcataggtgactccgactctttccctaccatctggaccactcatcacgacacgtggcctgccgcttctgatcctctcttctcttccaacaccaactctgattcatcacctgagctctatgttccgtttgaggacattgttaaggtggaaagacctccaagctttgtagaggaaacattggttgagaagaaggaagattcgttttcgacaaacactgattcatcatcttctcatagccaattcaggagctcaagtccagtgtcggttctcgagagcagctcctcctcgtctcaaaccaccaacacaacctcccttgttctccctggaaagcacggtcgtccacgcacaaaacgccctcgtccacctgtccaggataaagatagagtcaaagacaatgtgtgcggtggtgactcgcgcctcatcattagaataccgaaacagtttctctctgatcacaacaagatgatcaacaagaagaagaagaagaaggccaagattacttcttcctcttcttcgtccgggattgatcttgaagtcaatggaaacaacgtcgattcgtattcttcagagcaatatccgcttaggaaatgtatgcactgtgaggtcaccaagactccacagtggaggcttggtccaatgggtccaaagacactttgcaatgcgtgcggtgtacgttacaaatcagggaggcttttcccggagtaccgtccagctgctagtccaacatttactccagctcttcactcaaactcacacaagaaagtggctgaaatgagaaacaagagatgcagtgatggtagctacataaccgaagagaatgatctgcaagggctgattccgaacaatgcctacattggcgtagactaa

SEQ ID NO: 1823 - DNA, 939 bp, Arabidopsis thaliana
  Clone ID: AT_F24M12.C1.o120.tg
atggagagtgttgaattgacgttgaagaacagtaacatgaaagacaaaaccctaaccggcggcgctcaaaatggcgatgatttctccgtcgacgacttgcttgacttctcaaaagaagaagaagacgacgacgttttggttgaggatgaggctgaattgaaagtacaacgaaaaagaggagtctctgacgaaaatacccttcaccggagcaacgatttctccaccgctgatttccacactagcgggctttccgttccgatggatgatatagcggaacttgaatggttatcaaatttcgtagatgattcttctttcacgccgtattctgctccgacgaataaaccggtttggttaaccggaaatcggagacatcttgtacaaccggttaaagaggagacctgcttcaaatcccaacatccggccgtcaaaaccagacccaaacgagccagaaccggagtcagagtctggtctcatggttcgcagtcgttaaccgactcatcttcaagctctacaacatcttcgtcgtcctctcctcgtccttcaagccctctatggctcgccagcggtcagtttcttgatgagccaatgactaaaacacaaaagaagaagaaagtttggaaaaacgctggtcagacgcaaacgcaaacgcagacgcagacgcggcagtgtggtcattgtggagttcagaaaacgccgcagtggagagcaggaccattaggagcgaagacgttgtgtaatgcgtgtggtgtgcgttacaaatcgggtcggttactacccgaatatagacccgcttgtagcccaacattttcgagtgagcttcactcaaaccaccacagtaaagtcattgagatgcgtaggaagaaagagacttctgacggtgctgaagaaaccggtttgaaccagccggttcagacggttcaggttgtctcgagtttttga

SEQ ID NO: 1824 - DNA, 927 bp, Arabidopsis thaliana
  Clone ID: AT_F26P21.C1.o10.tg
atggaaaagatagctccggagctcttcctcgtcgccggtaacccggactctttcgtcgtcgacgacctcctcgacttctctaacgacgacggcgaagttgacgacggcttaaacactcttcccgattcttcaacactctccaccggcactctcaccgacagttccaactcctcctcgcttttcaccgacggcactggcttctccgacctatatattccgaatgacgatatagcagaattagaatggttatcaaattttgtggaagaatcattcgcaggagaagaccaagacaagcttcacttattttccggtttaaaaaaccctcaaaccaccgggtcgaccctgacccacttaattaaacccgaacccgaacttgatcatcaattcatcgacatcgatgaatccaacgtcgccgttcctgccaaggccagaagcaagagatcacgttctgcagcctccacgtgggcttcccgtcttttatccttagccgattccgacgaaaccaatcccaagaagaaacaacgaagagtgaaagaacaagacttcgccggagatatggacgtggattgcggagaaagcggaggaggacgacgttgtttgcactgcgcgacggagaagacgccgcaatggaggacgggacctatgggtccgaagacgctttgtaacgcttgcggagtgaggtacaaatcagggaggctcgtgccggagtatagaccggcgtcgagtccgacgttcgtgatggcgaggcactcgaactctcaccggaaagtgatggagctccggcgacagaaggagatgagagacgagcatttgctgagtcagcttaggtgtgagaatctactgatggatatcagatccaacggtgaagatttcttaatgcataataatactaaccacgtggctcctgattttagacacttaatctag

SEQ ID NO: 1825 - DNA, 627 bp, Arabidopsis thaliana
  Clone ID: AT_MOE17.C1.o4.tg
atggagccggaactggacttaacactgaagttgggtttgccaaattcgactgttgagacacatctgaccttaagccctcccaccaccaccactgatcagggaaccaacgtcgtggacggcggagaagttataaaccaccgtcggggtcttttgggagatgatgaagtgatccacaacgaacctacaagaaacaacgtggagttcaacatcagaatctacaattacgtctttcaacagtttgttggtgcccccaacaccttgaactttgctccttatccgatgcctccgtctccggcaccggcacctgagactcctccagtgagtgatgagtatgttctgattgatgttcctgctaggagagctcgtcgtaacaactctacggtgatgacaaactcttggaaggaaaacgcaaccccgaagcggattcgcggttgtggtggattctgcggggggaggattgaagggatgaagaagtgtacgaacatgaattgtaacgcacttaacactcctatgtggcgaagaggtcctcttggtcctaagagtttatgcaatgcttgtgggatcaagttcaggaaggaggaagagaggaaagccaaaagaaatgtagtgattgtattagatgactaa

SEQ ID NO: 1826 - DNA, 411 bp, Arabidopsis thaliana
  Clone ID: AT_F3E22.C1.o12.tg
atggaaagcaaactcacatcagtagatgcgatcgaagaacacagcagcagtagcagtaatgaagctatcagcaacgagaagaagagttgtgccatttgtggtaccagcaaaacccctctttggcgaggcggtcctgccggtcccaagtcgctttgtaacgcatgcgggatcagaaacagaaagaaaagaagaacactgatctcaaatagatcagaagataagaagaagaagagtcataacagaaacccgaagtttggtgactcgttgaagcagcgattaatggaattggggagagaagtgatgatgcagcgatcaacggctgagaatcaacggcggaataagcttggcgaagaagagcaagccgccgtgttactcatggctctctcttatgcttcttccgtttatgcttaa

SEQ ID NO: 1827 - DNA, 573 bp, Arabidopsis thaliana
  Clone ID: AT_MUH15.C1.o3.tg
atgtctgagggatcagaagatacgaaaacaaaactcgactctgccggagagttatcagatgttgataacgagaactgcagtagcagcggaagtggcggtggtagtagttctggtgataccaaaaggacttgcgttgattgcggaactatccgaactcctctttggcgtggtggtcctgccggaccaaagtcattgtgcaatgcttgtgggatcaagagtaggaagaagagacaagcagcacttggtatgagatcagaggagaagaagaagaacagaaaaagcaattgcaataatgatctaaacctcgaccatcgaaacgccaagaaatacaaaatcaacatagttgatgatggcaagatcgacatcgatgatgatccgaaaatttgcaataacaagcgtagtagtagtagtagcagtaacaaaggagtgagtaagtttttggatttagggtttaaagtaccggtgatgaagagatcagcggttgagaagaagaggttatggagaaaactcggtgaggaagaaagagctgctgtgcttctcatggctctctcttgtagctctgtttacgcctaa

SEQ ID NO: 1828 - DNA, 885 bp, Arabidopsis thaliana
  Clone ID: AT_F18B3.C1.o150.tg
atgcagactccgtacactacttcaacgcaggggcaatattgtcattcttgtggaatgttccaccaccatagccaaagctgctgctacaacaacaacaacaactccaacgccggttcttactcgatggtcttctccatgcaaaacggtggcgttttcgagcagaacggtgaggactatcatcactcttcctccctcgttgactgcactctctctcttggaactccttctacgaggctttgtgaggaagatgagaaacgtagacgctctacttcatctggtgcttcttcttgcatctccaacttttgggacttgattcacaccaaaaacaacaactccaaaacggcaccgtacaataacgttccttctttctccgctaacaagccaagtcgcggttgttccggtggtggtggtggcggaggaggcggtggcggaggtgactctcttctcgctagacgctgtgccaactgtgacactacttctactccactatggaggaatggtcctagaggccctaagtccctatgcaacgcatgcggcattcgtttcaagaaggaagagagaagaactactgcggctacaggaaacaccgtcgtcggagctgcaccggttcaaaccgaccagtacgggcatcacaactctggctacaataattaccatgctgccactaataacaacaataataatggtactccgtgggctcatcaccactcgacgcagagggttccgtgtaattatccggcaaatgagatcaggttcatggatgattacggcagtggagtagcaaacaacgttgaatccgacggtgctcacggcggtgttccgttcctttcttggaggcttaatgtagcggatagggcaagtcttgtccatgactttaccagatga

SEQ ID NO: 1829 - DNA, 1059 bp, Arabidopsis thaliana
  Clone ID: AT_F20B18.C1.o260.tg
atgggttccaattttcattacacaatagatctcaatgaagatcaaaaccatcagccttttttcgcttctcttggatcctctcttcatcatcatctacaacaacaacaacaacaacaacaacattttcatcaccaagcttcttctaatccctcttctttgatgtcaccgtctctttcctactttcctttcttgataaactctcgccaagatcaagtatatgttgggtacaacaataacacttttcatgatgttcttgatacccatatctcccaacctctcgagaccaagaactttgtatctgatggtggttcatcatcaagtgatcaaatggtgcccaagaaggagacacgactaaaattgacgataaagaagaaagataatcatcaagaccaaaccgatcttcctcaatccccaataaaagacatgacaggaactaactcgctcaagtggatatcttcgaaggtgagattaatgaagaagaaaaaggcgattattaccaccagcgacagcagcaaacaacacactaataacgaccaatcctcaaacctaagcaattcggaaagacagaatggttataacaacgattgcgtgattaggatttgctccgattgtaacacaaccaagactcctctttggagaagtggtccgagaggtcccaagtctctttgtaacgcttgtggaataaggcaaaggaaggccaggcgggccgctatggccacggcaaccgcaaccgcagtctctggcgtatccccaccggtcatgaagaagaagatgcaaaacaagaacaagatatcaaatggagtttataaaatcttatctcctttgcccctaaaggtaaacacgtgtaagagaatgatcacactagaggagaccgcattagccgaggatttggagacccagagcaactccacgatgttatcatcttcagacaatatctatttcgatgatctagcattactgttgagcaaaagttcagcttatcagcaagttttccctcaagatgagaaggaggctgccattttactaatggctctatcgcacggaatggttcacgggtga

SEQ ID NO: 1830 - DNA, 930 bp, Arabidopsis thaliana
  Clone ID: AT_T22A6.C1.o300.tg
atgtttggtcgccattcgattatcccaaataaccagattggtaccgcctctgcttccgctggtgaagaccatgtctctgcctccgctacgtctggtcacattccttacgacgatatggaagaaatccctcatcctgactctatctatggtgctgcctccgatttgattcccgatggctctcaattggttgctcaccgatccgatggctctgaattacttgtttctcggccaccggaaggggcgaatcagcttacgatctcgttccgtggacaagtttacgtttttgatgccgttggtgctgacaaggtggatgctgtgttgtcgctgttgggtggttctactgagcttgctcctggtccgcaggtgatggaactagctcaacagcagaatcatatgcctgttgtagaatatcagagccgctgtagccttccgcaacgggcacaatccttggataggtttcggaagaagaggaatgctagatgtttcgagaagaaagtaagatacggtgttcgccaagaagttgccttaagaatggcacgtaataaaggtcaattcacctcttcaaagatgacagatggggcttataactctggcacagatcaagattctgcccaagatgatgcccatccagaaatatcgtgtactcattgcggcattagttccaaatgtacaccaatgatgcgacgtggcccttccggccccaggactctctgcaatgcctgtggacttttttgggctaacaggggtacattgagggatctctcaaagaaaacagaagagaatcagttggctttaatgaaaccggatgatggtgggagtgttgctgatgctgctaacaacttaaacactgaagctgcaagtgttgaagaacacacttccatggtttctcttgccaatggggataattctaatctgttaggtgatcactaa

SEQ ID NO: 1831 - DNA, 864 bp, Arabidopsis thaliana
  Clone ID: AT_F13M14.C1.o13.tg
atggatgcagcaattccgatttggaagagggacgatgataagcgttttgagttagctctggttcgattccctgctgagggttcgccggattttttagagaatatcgctcagtttctgcagaaaccgttaaaggaggtgtactcctactaccaagccttggtcgatgatgttacgctgatcgaatcgggtaagtatcctttgcccaagtacccggaagatgattacgtgtcactgccggaagcgactaagtctaaaacccagggcacggggaaaaagaagggaataccttggtcaccagaagaacacagattgtttttggatggactaaacaagtatgggaaaggagattggaagagcatatcgagggaatgtgtgacgtcaaggagcccgatgcaagtggcaagccatgctcagaagtatttcttaaggcaaaaaaataagaaggggaaacgcttcagtatccatgatatgactctgggagatgccgaaaatgtaaccgtccctgtatccaacttgaattctatgggccagcagccacattttgatgaccaaagtcctccggatcattatcaagactacttctcccagagcaatgtaaccatccctggatgcaacatgcactttatgggccagcaaccacgttttggtgaccaaattcctccgggtgaatatcacccctactcccgggacaatgtaaccgtcactggatccaacttgaattctattggccagcagccacattttaatgaccaaatttctccggatcaatatggccgctacttgcaggaaaacttcgggtttttcgatgatgatggtgaagatgatgggagtttagcaagctttcaacaactatacaaggcttaa

SEQ ID NO: 1832 - DNA, 1233 bp, Arabidopsis thaliana
  Clone ID: AT_MGH6.C1.o15.tg
atgtacatcaaagcaatcatgaacagacacaggcttctctcagcggcaacagatgaatgcaataaaaaacttggtcaagcttgctcttcttctttatctccagtccataactttctgaatgtccagccagaacaccggaaaactcctttcataaggtcacaatctccagattcacctggtcagctatggccaaagaatagttctcagagcaccttctctcggtcttccaccttttgcacaaacctctacttgtcatcatcttcaacctctgagactcagaaacatctaggaaacagtcttcctttcctccctgatccctcctcttacacccactcagcttctggtgtggagtctgcaagatctccatctattttcactgaggatttgggcaatcaatgtgatggaggcaactccgggtcgcttctcaaagacttccttaatctttctggagatgcttgttccgatggcgattttcatgattttggctgttcgaatgacagctattgcttatcagatcaaatggaattacagttcctgtctgatgaacttgagctggctatcacagaccgcgctgaaactcccaggcttgatgagatctatgaaacgccattggcgtcaaatccagtgacgagattgagtccaagccaaagctgtgttcctggagcaatgtctgtagacgtagtttcatctcacccttctccgggatcagcagccaatcaaaagtcgagaatgagatggactcctgagctccacgagtcttttgtaaaggcggtgatcaaacttgaagggcctgaaaagaaaaggactgataactcagaagaaaagaaactggctttgagtaagagtgaagctgacgagaagaagaaaggggccatacaattaactgaagcactgcgtatgcagatggaagttcagaagcaattgcatgaacagctggaggtgcaacgggtgcttcagctacgaattgaagagcatgctaaatacttggaaaagatgttggaagaacaacgcaaaacaggaaggtggatttcttcttcttcgcagacagtgttatcacctagtgatgactctataccagattctcaaaacatgtccaaaaccaaagcatcttcgcctcagccgccattacctgcagagaacaaagcgtcggaaaccgaagacgataaatgtgaaagccctcagaaacgtcgcaggcttgagaacatagctgaatctgaagatcctaagaggtag

SEQ ID NO: 1833 - DNA, 603 bp, Arabidopsis thaliana
  Clone ID: AT_T15G18.C1.o130.tg
atggccgcgtttccgcagtggacaagggtcgatgacaaacgttttgagttagctctgcttcaaatcccggagggttcgccgaattttatagagaatatcgcctattatctccagaaaccggtgaaggaggtggagtactactactgcgcgttggtccatgatattgagcggatcgaatcgggtaagtatgttttgcccaaatacccggaagacgattacgtgaaactgacggaagcaggtgagtctaagggcaatgggaaaaagacgggaattccttggtcagaagaggaacagaggttgtttctggaaggactaaataagtttgggaaaggagactggaagaacatatcgaggtattgtgtgaagtcaaggacctcgacgcaagtggcaagccatgctcagaagtattttgcaaggcaaaagcaggagagtacgaatactaaacgcccgagtattcatgacatgactctgggagttgcggtcaatgtccctggatccaacttggagtctactggccagcaaccacattttggtgatcaaattccttcgaatcaatattatccctcccaggaaaactttcggggttttgatcagcgatggtga

SEQ ID NO: 1834 - DNA, 954 bp, Arabidopsis thaliana
  Clone ID: AT_k11j9.C1.o140.tg
atggtgaaggagacggtgacggtggcgaaaacgtgctcacactgtggccataatggccataacgcacggacttgtctcaacggcgttaataaggcaagtgttaaactgttcggcgttaatatatcgtctgatccgattaggccgcctgaggtaacggcgttaaggaagagtcttagtttgggaaaccttgatgctcttctcgctaacgatgaaagtaacggtagcggtgatcctatcgccgccgttgatgataccggttatcattccgatggtcagattcattccaagaagggtaaaactgctcatgagaagaaaaaggggaagccatggacggaagaagaacatcgtaatttcttaatcggtttaaacaaactcggaaaaggagattggagaggcattgcaaagagtttcgtgtcgacaagaacaccaacacaagtcgcaagtcatgctcagaaatattttattaggttaaacgttaacgacaagagaaaaagacgtgctagtctctttgacatctctctcgaagatcagaaggagaaagagaggaactctcaagatgcttcaacaaagactccacctaaacaaccaataaccggaattcaacaaccggtagtacaaggtcatactcaaaccgagatttcgaacaggtttcagaatttatcaatggagtatatgccaatctaccaacccataccaccttactacaactttccacctattatgtaccatccaaattatccaatgtactatgccaaccctcaagtaccggttaggtttgttcatccttctggtatacctgttccaagacatataccgattggtttgcctctgtctcaaccgagtgaagcttctaatatgacaaataaagacggtttggatcttcatatcggtttgcctccacaagctactggagcttctgacttgactggtcatggcgttattcatgtgaaatga

SEQ ID NO: 1835 - DNA, 864 bp, Arabidopsis thaliana
  Clone ID: AT_F22L4.C1.o14.tg
atggtgactgtaaaccctagccaagctcattgtttgcctatgaaaatgagtctaccgggtttcaatactcttccccacacggcaacaacgataccggtttccatacggagcaataggacgatgtcgttttttgaggatccaacaaagaaggttagaaagccttacactatcaccaaatctagagagaactggacggagcaagaacacgacaagttccttgaagcccttcatctatttgaccgggattggaagaaaataaaggcctttgttggatcaaaaacagtgatacagatacgaagccacgcacagaagtactttctcaaagttcagaagaatgggactaaagaacatctcccacctcctcgaccaaagaggaaagccaatcacccatatccacaaaaagctcctaaatttactctttcttcttcaaacgcattatttcaacatgactacttatacaacactaattcacatccggtgattagcaccacccgtaagcatggattagtgcattgcgatgttagtataccaagttctgttatcaaagaggaatttggtgtctcagagaactgttgcagcactagtagtagtagagataagcagaggactagaatcgttacagagacaaatgaccaagaaagttgtggaaagccacatagagtggcgccaaatttcgctgaagtttacaattttataggaagtgtgtttgatcctaaaacaacaggtcatgtcaagagattaaaggaaatggatccaataaatcttgagacggttctcttactgatgaaaaatttatctgtaaacctgacgagtcccgagtttgatgaacaacggaagttgatatcatcttacaacgccagttag

SEQ ID NO: 1836 - DNA, 2076 bp, Arabidopsis thaliana
  Clone ID: AT_mtg10.C1.o130.tg
atgaatgtggaaggcataacaagatcacaaatagccagccatttacagaagtataggaaacacatgagaaggtttaaggttaatgtcacaaaagccgacatatcaaaaaaagccatgaaatccaactttgaatcatctagcaacatcaacccacaatgctcgtataattatctcggtctaactaaggaaaatttgtttaagtcccaaattggtgatactcttggtcaatctagcctccttttgaataacaatgactctatccactccatgtacgatggatccatctatggtttgaacgaacccgaatctaacttgtcgcctatgagagaaagcgtcggattttcgaggggtgtattgcctttaaatgaagaaagtgaatgcgcttttgaaacatctcaaatgtctcaagttcctaggcgtggacaatatggtacaccaagcgacatttcgggtataaactctaatcttggtactggttatatgtgtaatagttatgctggaataagtatagataaaaatggtcacatgcttggacttggtggagcaatagttgatagtaatggcaacgggcatcttggtgaaagtctaggcgccatgaactggaatctcaacaacaatgatgtgaggaactatgagagttcaacttcgaggttttcctctccattttcatcgttcttacacaacaaggttcagccacatcacaatttaatttcacaaacggatggtctgctttctacaagcatccttgatacatctcaagttccttcttttggacaatatggtataccaaatgatgttgtcggtatggaacctgaatttggtactagttacatgcatagtaactacaatggtatcaatactgatcaagttggaaatctggttggacttggtagagaaagagttaatgttaatggtaatgtctctcttggtcaaaatttgggtagtatgaattggaatttcgatgaaaacaacatgagtaatcatggaagttcaacttcgaggttttcttctccattttcatcattcgaggatcagtcactaagtcatttaaacgaggaaacaaatgagttggttcctggattagagaatctaagcctatacaatgatcatcaaagcatcaacccatttcttggcaatacgattaattcccattttgttgagaatcaggatcaaggtttagtgaataatgaaaatcttgaatttgctaacgatgatcaactggaaaggaatgaaattcttactacttattctgttgaggatattaataatttgagcattaataacgtgaagttaaactctaatggggaaacattgaattctactgctgctaatttggaaatgctttttcctactcttgacatgaacattgtaaatcagcatcaaggtcaagtgttgagtggtggaaatcttgaatttgccaacgataatcaacttgaaaggaatgcaattcttgctggttattctattgaggatattaataatttgagcattaataaccatcaaggtcaagtgttgagtggtgtaaattttgaatttgccaacgataatcaattcgaaaggaatgcaattcttgctggttattctattgaggatattaataatttgagcattaataacgtgaatgacaactctaatgaagaaacattgaactctattgctgctaataatgaaatgaattttactattctcgacgtgaacactataaatcaggtgaatggcaactctaatgaagaaacattgaactctattgttgctaattctgaaataaattttactactctcgacgtaaacactataaatcaggtggataacaactttaatgaagaaacattgaactctattgctgctaattctgaaatgaattttactactctcgacgtgaacattataaatgaggaagaacaaggtgctgtagatatgatggatattgtaattacatttgatgaggaggaagaagatgttgcagctttgactgatattccagaacaagatgttgagattttgactgatgttcctgaacaaggtgttacagatttgactgatgttccattgacatttgatcaggtaatcttttaa

SEQ ID NO: 1837 - DNA, 1041 bp, Arabidopsis thaliana
  Clone ID: AT_K13E13.C1.o20.tg
atgactaatcttgatgagtttcttgaagagctaagttctattgaatcacattctcagaaaatcgtgaagatagatgagcatttaaaaaagttggatgaagagacgaaagaagatgaagatgaagatgcggcgaagataattcaagatcggagtaccgcgagagaagcagaaattgctctacttatggatctccgtcagaactttcttccaccaccatcgatgtcatcctcctctcttcaaccaccgtcatcgtcaactctcgcaccatcgtcatcatcctctcttcaaccacccgcaccgttgatagacttctttcggtcatcagtgtcatactctcatcaaccaccgtcatcttcaactctcgcaacatcatcgtcaccgtctcttcaaccaccgtcgatgtcatcctcctctcttcaaccacccgcatctttgagggaattctttacgtcgtcagtgtcatactctcatcagccatcttcatcttcaactctcgcaacatcttcgttctttccgtcgtcaatgccatactctgttcgacctcccgattcgtctgatcgaccatctttgagggaattctttccgtcgtcaccatcatcctctattcagccacccgaatcatcatcatctaagcgagcacggcttagtaacatctttccgtcacctttatcctcctctccgtcaccgtttgttaacccgtttctccgtccgcaggcccaagaaccaacaataccaaatttcataaacccaataccacagatctctccaggcctacctgctctattcccaaaccctaaccctaatcctaaccctaacccaatcccaaacccaatccgaaacccagacttggtgtggacaaataggcttcaactagtgtttgatgacgcagttgtcagacttgggggattattcagtgcaacacccaaagccataaacgaactaatttctgaagagggtctcactggtgaccagatccgtagccacttacaagtcttgcgggatcgtcaaaaggctattgcagacaaattagccttggagtga

SEQ ID NO: 1838 - DNA, 1452 bp, Arabidopsis thaliana
  Clone ID: AT_T6K21.C1.o200.tg
atggtcattaccgctaacgatttatcaaaatgggaaaattttcctaaaggacttaaggttcttcttctcctcaacggctgtgacagcgacggagatggctcctcagccgccgagactcgatcagagctcgaatcaatggactatatcgttactacattcaccgatgaaactgaagcactctctgcggttgtcaagaacccggagagcttccacattgccatcgtcgaggtgaatatgagcgctgagagtgagagtttcaagtttcttgaggctgccaaagacgttcttcctactataatgatttcaaccgatcattgcatcactactacaatgaaatgcatagcgcttggtgcagttgagttcctacaaaaaccgctctcaccggagaaattaaagaacatttggcagcatgttgttcataaggcattcaatgatggtggaagtaatgtttcgatatcacttaagccagtgaaagaatccgttgtctcgatgcttcatcttgagaccgacatgacaatcgaggagaaagatccagcgccatcaacaccgcaattgaaacaagattcacggttactagacggtgattgccaagagaacataaatttctcgatggaaaatgtaaattcctcgaccgagaaagataacatggaagatcatcaagacatcggtgaatctaaatcagtcgacactacaaaccgcaaattagatgacgacaaagtggttgtcaaagaagagagaggagacagtgaaaaagaagaagaaggtgaaaccggagatctcataagcgagaagacagattcagttgatattcataagaaagaagatgagactaaaccgattaataaatcatccgggatcaagaacgtgtctggtaacaaaactagtcgaaagaaggtggattggacaccagagctgcacaagaagtttgtgcaagcagttgagcaactcggcgttgatcaagcgataccctcgcggattcttgagttgatgaaagtaggcaccttaacaagacacaatgtagctagtcaccttcagcataggaagaatattcttccaaaggatgatcataaccatagatggatacaatctagagagaaccatagaccaaatcaacgtaattataacgtttttcaacagcaacaccgtcccgtgatggcttatcccgtttggggtcttcccggtgtttatccgccaggagcgattccacctttgtggccaccgccgctgcagtccattggtcaaccacctccgtggcattggaaaccaccttatccaacggtgagcggtaatgcatggggttgtccggttggaccgcctgtgaccggatcatatattactccttcgaatactaccgccggcggatttcaatatcccaacggagctgaaaccggcttcaaaataatgccggcgagtcagccggttagtgtcaacaattctctattttctttttaa

SEQ ID NO: 1839 - DNA, 1014 bp, Arabidopsis thaliana
  Clone ID: AT_T6J4.C1.o6.tg
atggattacaaccagaaacgagagagatgtgggcaatacatcgaagccctcgaagaggaacgtcgcaagattcatgtatttcaacgtgaacttcctctttgcttagaccttgtaactcaagcgatcgaggcatgtaagagggagttaccggagatgacgacggagaatatgtacggacaaccagagtgctcggagcagacgaccggagaatgtgggccggtcttggagcagtttctaactattaaagattcatcgacatccaacgaagaagaagatgaagaattcgacgatgagcatggaaatcacgatccagacaatgattccgaggacaagaacacgaaatctgattggcttaagtctgttcaactctggaatcaacccgaccacccacttcttccaaaagaggaaaggttgcagcaggagacgatgacaagagatgagagtatgagaaaagatccgatggtgaacggtggcgaagggaggaagagagaggcggagaaagacggaggaggagggagaaagcaaagaaggtgttggtcgtcgcaattgcatagacgcttcttgaacgctcttcaacacttaggtggacctcatgtagctacgccaaagcaaatcagggagtttatgaaggttgatgggttaaccaatgatgaagttaaaagccatttacagaaatatagactgcatacaagaaggccacgccaaacagtccctaacaacggaaactctcaaacgcaacatttcgtagtcgtcggtggtttatgggtaccacaatcggactactctacgggcaagactaccggaggagccaccaccagcagtaccaccacaaccaccggcatctatggaaccatggccgcaccgccacctccacaatggcctagccattccaattatagaccgtcgattattgtggacgaaggatcgggaagtcatagtgaaggggtcgtggtccggtgtagctcgccggcgatgtcttcttctacccgtaatcattacgtcaagaataattaa

SEQ ID NO: 1840 - DNA, 1026 bp, Arabidopsis thaliana
  Clone ID: AT_F11A3.C1.o5.tg
atgatcccgaatgatgatgatgatgcaaattctatgaagaattatccgttaaatgatgatgatgcaaattctatgaagaattatccgttaaatgatgatgatgcaaattctatggagaattatccgttaaggtcaattccgacggagctttcacacacttgttcattgataccaccttctttaccaaacccttcagaagcagcagcagacatgtccttcaattcagaactcaatcaaatcatggcaaggccttgtgatatgctccctgccaatggtggagctgttggtcataacccttttttggaaccaggattcaactgccccgagacaacagattggattccctctccactcccccatatttattttccttcgggttctcccaatctaataatggaggatggtgtcattgatgagattcacaaacaaagtgacttgccactttggtatgacgacttgattaccactgatgaagatccactcatgtctagtatcttgggcgatcttctccttgacactaatttcaactcagcttcaaaggtccagcaaccaagtatgcaatcgcagattcaacaaccccaagctgttctgcagcagccttcttcttgtgtggaattgcgcccacttgataggacagtatcctcaaacagcaacaacaatagcaacagtaataatgcagcagcagcagctaagggacgtatgcgttggacgcctgaacttcatgaggtttttgttgacgctgttaaccagctcggtggcagtaatgaagcaactcctaaaggtgtcctgaagcatatgaaagtcgaaggtttgactatttttcatgtcaaaagtcatttgcagagtctaagaacaatgcaacttcggatagaagagcaaggaaaggcgctgttgatgatgattgagaagcaaaatatgggtttcggcggaccagaacaaggagagaaaacaagtgcgaaaacgcctgaaaatggttcagaggagtcggaatccccgcggccaaagcgtccgagaaatgaagaatga

SEQ ID NO: 1841 - DNA, 1209 bp, Arabidopsis thaliana
  Clone ID: AT_MRG7.C1.o20.tg
atgtattaccacaaccagcaccaaggaaagagcatcctctcttcatcgagaatgcccatttcttctgaaaggcatccgttcctcagaggaaatggcacaggagattctggactcattctctccactgatgcaaagccacgactaaaatggactccagatcttcacgagagatttgttgaagcggtcaaccagcttggaggaggagataaggctactcctaagacaatcatgaaagtcatgggcattccaggccttaccttataccatctcaagagtcatcttcagaaatataggctaagcaagaatcttaatggacaagctaacagcagtttaaacaagacaagtgtgatgaccatggtagaagaaaacccccctgaagtagacgaaagtcacagtgagagtttaagcattggaccacagccgagcatgaacttacccataagtgatgcccttcaaatgcaaatagaggtccagagacggctacacgagcaacttgaggtacagcgacatttgcagctcaggatagaggctcaaggaaagtacctgcaatcgattctggagaaagcacaagagactcttggaagacagaacctaggtgcagctgggattgaagcaacaaaagctcaactctcagaattagtatctaaagtatcagcagactatccagactctagtttcctcgaaccgaaagaactgcagaatctacaccatcaacagatgcaaaaaacgtatccacctaactcctccctggacagttgcctaacctcaagtgaaggaactcagaaagccccaaagatgcttgacaacagactgggattaagaacatatattggagattcaacttcagagcagaaagagataatggaagagccattcttccatagaatggagctcacatgggcagaagaagaaagcctcagagagaatcacaacaggccatatctttcaacaatggttaacaacgcagaaccgagaatctcgtcttcaagaagaagtcctggaagattgtcaataggagtgggattacatgaacacagaggaaggagtagcaacaacagtgagtatacagaagaaagattcaacgagaataatgaagattgcaagcttgaaacacacacaagaacagctctagatcttaacacacacgacgaaaactatggcacaacgcgtcctaaacagtttgatttaaatggtttcagctggaattga

SEQ ID NO: 1842 - DNA, 747 bp, Arabidopsis thaliana
  Clone ID: AT_T20B5.C1.o17.tg
atgagagaagataatccaaattggttccttagatgggaagaagagcttccatctccagaagaactcatccctatctctcaaaccttaatcactcctcatctagctctcgctttccaaatcggaagtcctaatcatcatctcggatcaaagagaaccaccgcgatttatcaccagaagcttcaatcctccaccactccaacaactccaactccaactcctccaccgatgatgatgaattctgatttcggcggtggcgattccacggatcttggttcaggatcaataggaggagagccagcaagaacgttgaaacggccgcgtctagtgtggacgcctcagctacacaaacgtttcgtggatgcggttggacacttagggatcaaaaacgcagttccaaagactataatgcagcttatgagcgttgaaggattgactagagagaacgttgcgagtcatcttcagaaatatcgtctttaccttaggagaatgcaaggcgggaacggtaacggaatcactggaggacacgtcatcgtctctgattcggctactgatcggctatttgctagctcaccggttccagctcatttcttgagcccggattacttgatgccgccattagagcattcgtatatggggaaacatgtgattacgcagcaaaaccaagtggttcgtaatctgaggtatgaagattcggaatatggtcatggtagtatgaagatgcttaagctcttccctgccggaaattaa

SEQ ID NO: 1843 - DNA, 831 bp, Arabidopsis thaliana
  Clone ID: AT_MFO20.C1.o5.tg
atgatgatgttagagtcaagaaacagtatgagagcttcaaactcagtcccagatctgtctcttcagatcagtcttcctaactatcacgccggaaaacctcttcacggcggtgaccggagctccacaagcagtgattctggaagcagcctcagtgacctgagccatgagaacaacttcttcaacaaacctctcttgagcttaggatttgaccatcatcatcaaaggcgctcaaacatgttccaacctcaaatctacggtcgagatttcaagagaagctcatcatcaatggttggtcttaaacgaagcattcgtgctccaagaatgagatggacttctactcttcatgctcacttcgtccatgctgttcaacttcttggcggccatgaaagagcaacgcctaaatcagtgttggagctcatgaatgtgaaggatctaaccctagctcatgtcaagagtcacttgcagatgtatagaacagtgaaatgcactgataaaggatcaccaggagaaggaaaggtagagaaagaggcagagcagaggatagaggacaataataataatgaagaagctgatgaaggaactgacacaaattcgccaaactcatcatctgtgcaaaagacccaaagagcttcatggtcatcgacaaaggaagtatctaggagcatatctacacaagcatattctcacttgggaacaactcatcacactaaggacaatgaagagaaagaggataccaacattcatctcaatttggatttcacattggggcggcctagttgggggatggaatatgcggaaccctccagtgatttaacccttctcaagtgctaa

SEQ ID NO: 1844 - DNA, 876 bp, Arabidopsis thaliana
  Clone ID: AT_MUJ8.C1.o3.tg
atgtactcagcgattcgctcgcttccactcgatggtggacacgttggtggtgactaccatggacctcttgacggaaccaatcttcccggtgacgcttgtttggttttaacgactgaccctaaacctcgtctccggtggacaactgagcttcatgagagattcgttgacgccgttactcagctcggtggtcctgacaaagcgactcccaaaactattatgagaacaatgggagtgaagggtctcactctctaccacctcaaatcacatcttcagaaattccgcctagggaggcaagctggcaaagaatcaactgagaactctaaagatggggagagtcaggacacaggttcatcttcgacatcatcaatgagaatggcgcagcaggagcagaacgagggttaccaagtcaccgaagctctacgtgctcagatggaagtccaaagaagactacacgatcaattggaggtgcaacggaggctccagctgaggatagaggcacaaggaaaatacctgcaatcgattcttgaaaaagcttgcaaggcctttgacgagcaagctgctacttttgctggacttgaggctgctagggaagagctatcagagctagccatcaaagtctccaatagctctcaaggaacatcagtcccgtacttcgatgcaacaaagatgatgatgatgccatcgttgtcagagcttgcagtagcaatagacaacaaaaacaacatcacaaccaactgttcagtagaaagctctctgacttccatcacacatgggagctctatatctgctgcatcaatgaagaagcgtcaacgtggagacaatttgggcgtagggtatgaatcaggctggattatgcctagtagcaccattggataa

SEQ ID NO: 1845 - DNA, 1125 bp, Arabidopsis thaliana
  Clone ID: AT_MPH15.C1.o16.tg
atggataacatcaactttgaattctcaaacgcttcacaaggaagccggctacagttgcagcaacaaccgccccagccgtttaatttacaagacttgaatatgattcaatacaatcaaccatcatctccttggactacggagaccttctctggtctaactccgtacgattgcacagccaatcaatcttttcccgtacaatgttcatcttcaaaaccctacccttcctcgtttcatccgtaccatcatcaatcttctgattctccatcattagaccaatctgtatcgatgattcctatgcagcctcttccggatcaatatatgaagccattatatcaaagatcttgctcgaacgattttgccgcaacaaatgcttcatcagcctcttactcgctttcttttgaagcaagtcatgatccacaagaactatgcagaaggacctatagtaattctaatgtaacacatcttaatttcacatcatcacaacatcaacctaaacagagtcatccaagattttcttctcctccttcattctcaatccatggagggtctatggctcctaactgtgtgaacaagacacggataagatggactcaagatcttcatgagaagtttgtggagtgcgttaatcgtcttggtggcgctgataaggcgacgcccaaggcgatattgaagcggatggattctgatggactcacaatatttcacgttaaaagccacttacagaagtatagaattgcgaaatacatgcctgagtctcaagaaggcaagtttgagaaaagagcttgtgcaaaagagctgtctcagcttgacacaagaactggagtgcaaattaaagaggcacttcagcttcaactagatgttcagaggcatcttcatgaacaactagagattcaacgaaacctacaactaagaatcgaagaacaagggaaacaactgaaaatgatgatggaacaacaacaaaaaaacaaagagagtcttctgaagaagctaccagacgctgaagcatcattgtctcttctcgatccccatattcactctcctccttcgcctttcttggtacacgacgctgaagccctgatgctaacaagttatgaagacactcaactccagtccaccaaaagttga

SEQ ID NO: 1846 - DNA, 1233 bp, Arabidopsis thaliana
  Clone ID: AT_T3G21.C1.o3.tg
atgagatcaagcagccaaaattctgaaaactccaagacttgtctatctaacaacatcaaagcaaccaccaagaatgaagaagataaagatgaagaggatgatgaagaaggcgaagaggatgaagaagagagatctggagatcagagcccatctagcaatagctatgaggaagagagtgggagtcaccaccatgatcagaacaagaagaatggaggatccgtgaggccgtacaaccgctcaaagactccgaggctgcgatggacgccggagctccatatttgctttcttcaagctgtggagagattgggtggcccagatagagcaacaccgaagcttgttctccaattgatgaacgtcaaggggctaagtattgcccatgttaagagtcatcttcagatgtacagaagcaagaagaccgatgagcctaatgaaggagatcaaggattttcgtttgaacacggagctggttacacttacaaccttagccaacttccaatgctacaaagttttgatcaaaggccttcttctagtttaggatatggtggtggttcgtggactgaccacagacgacagatctaccgtagcccttggagaggattaacgacacgagaaaatacaagaacaagacaaacaatgtttagctcacagcctggtgagagatatcacggagttagcaatagtattcttaacgataagaacaaaactatttcatttcgaatcaattctcatgaaggggttcatgataacaatggagtagctggagctgttccaagaattcatagaagttttcttgaaggtatgaaaacgtttaacaaatcatggggacagagcctctcttccaatcttaagtcctccaccgcaacaataccacaagatcatattgctacaacgctaaattcttatcaatgggagaatgctggagtggcagaaggatcagagaatgttttgaagaggaagaggttattattttctgatgactgcaataagtcagaccaagatttggatctaagcttgtcccttaaggtacctcggacacacgacaatcttggagaatgcttgttagaagatgaagtaaaagaacatgatgatcatcaagatatcaagagtttgtctctttcgttatcatcttcaggttcatcaaaactcgaccgaaccattaggaaagaagatcaaactgatcacaaaaagagaaagatttcggtcttggcaagtccccttgatctcactctgtga

SEQ ID NO: 1847 - DNA, 1317 bp, Arabidopsis thaliana
  Clone ID: AT_T27C4.C1.o10.tg
atgacacttgctagcgattttggttttccatccgctatatcttcatcttttacaattctagaagagagataccacaataactttcctaacactttgtgtgtttcatcaggacaggaatcgatgaataacaaccccgtcccctgtcaggtgtttcctctggtctctggtggtagttctggtgggaatttgttttcatcttcttccggattctgcaatggtgtctatgtttcatcttcctcccaggcacggccatctgtttctaccgtgccaagagacagaattactgttgctcacgtctctggtgaagggcagaggcaggaatgccctgtggaaacacattccttgcaattgatcaatcaacctcaagaacagaaaattatgacttggtcttcagaccagattcggggcttcttcgattttcctgttccagatccacaagcagcgagcagcagaactatggtttcatccaaggaagtgctttcaaaatgcgaatggccagactgggcggatcagttgatctctgatgatagtcttgaaccaaattggtcggagcttctaggtgatcctaatgtactcaatctatattcaaaggttcaaacacagtcttctgatatagcaaggcaagagatcgtctttagaaatcagcatcaggtggatccatcaatggagccgtttaatgccaaaagcccaccagctagttcaatgacatctaagcaaagaatgcgttggacaccagaacttcatgaagcatttgtcgaagctatcaatcagctcggtggtagtgaacgagccacccctaaggctgttttgaagctcatcaatagccctgggttgaccgtttatcatgtcaaaagccatttgcagaaatacagaactgcaaggtataaaccagagctttccaaagatacagtaaagaatttgaaaaccattgaagatatcaaatctcttgacttgaagacgagcattgaaatcactgaagctctccggttacagatgaaagttcaaaaacaactccacgagcaacttgagatccaaagatcactgcagttacaaatcgaagaacaaggtcggtatcttcagatgatgattgagaaacaacagaagatgcaagagaacaaaaaagactctacttcctcatcatcaatgccagaagctgacccttcagctccatcaccaaacctttcacaacctttcctccataaagcaaccaattcagaaccatcaataactcagaaactgcagaatggttctagcacaatggatcaaagtgaatctacttctgggactagtaatagaaaacgggttagagaagattag

SEQ ID NO: 1848 - DNA, 1332 bp, Arabidopsis thaliana
  Clone ID: AT_T4M8.C1.o7.tg
atggcgtcctcatcagaactaagcttggattgcaagccacaaagctactctatgcttttgaaatcctttggagataactttcagagcgatccaaccacacataagcttgaagatcttctctctcgcctagaacaagaacgtctcaagatcgatgccttcaaacgcgagcttcccctttgcatgcaactccttaacaatgctgtggaagtttacaaacaacaactagaagcatatagagcaaatagtaataacaataaccaaagtgttggtacaagaccagttctcgaagagttcatacccttaaggaaccaacccgaaaagacaaacaacaaaggaagtaattggatgacgactgctcagctatggagccaatccgaaaccaaaccaaaaaacattgattcaactactgatcaatctcttcccaaagacgagattaatagtagtccgaaactcggacattttgatgcaaaacaaagaaatggcagcggtgcttttcttcccttctctaaggaacaatctttgcctgaattagctctatccacggaggtcaagagggtctctccgaccaacgaacatactaatggccaagacggtaatgatgagagcatgatcaacaatgataataactataataataataataataacaattcgaacagcaatggagtttcttctacaacgagtcaaagtaatagaaaggcacgacgttgctggtcgccggacttgcaccggagatttgtccaagctcttcaaatgcttggtggctcgcaagtggctacacctaaacaaataagggaactcatgaaagttgatggtttgaccaatgatgaagtcaaaagccatctccagtactttactggtgtgttgattttaaacaaacagaagtatcggcttcacactagaagaccaagcccaagcccacaaacgtcaggtgggccaggtccacatttggtggtcctaggtggcatatgggttccaccggagtacacctccgcacatggtggcactccgactctctaccaccaccaagtccaccaccaccataccaacacggcagggccgcctccaccacacttttgctcctctcaagaattctacacaactccaccgcctcctcagccgctccaccaccaccactttcaaacgtttaacggttcatccggtggcaccgcctctaccgattctactcatcatcaggtgacggacagtcccacagttgaagggaagtcaccggagagtggtggtggagagagaaaagggttggctgctcttagggaagaatgtgaagatcacagcaatattaatggaagtgaaataactctcaaattctaa

SEQ ID NO: 1849 - DNA, 972 bp, Arabidopsis thaliana
  Clone ID: AT_F12A12.C1.o160.tg
atgggagaggaagtacaaatgagcgattacgatgtttccggcgacggagatagggtttctgaatgggagatgggattaccaagcgacgaagatctagcatctctttcttactctctgattccaccgaatttggcgatggcgtttagtatcacaccggagagaagccgtacgattcaggatgtgaatcgtgcatcggagacgacgctctcgtcgctacgtggtggatcttcaggtccaaatacctcgtcgtcgaataataacgtggaggaggaagatcgagttggatctagcagtcctggatcggattcgaagaagcaaaagacatcaaacggtgatggagatgacggtggcggtgtggatccggattcggcgatggcggcggaagaaggagattcaggaactgaagatctatctgggaaaacacttaaacgaccgcgtttagtgtggacaccgcagctacacaagagattcgttgacgttgtagctcacttagggatcaaaaacgctgttccgaagacgattatgcagctgatgaacgttgaaggattaactcgtgagaacgttgcgtctcatcttcaaaagtataggctttacctcaaaaggatgcagggattgactaatgaaggtccctctgcttcggataagctcttctcttcaacacctgttcctccacagagcttccaagatatcggtggcggtggcggtagcagcggtaatgttggagtgccgattccgggggcgtatggaacgcaacagatgatgcagatgccagtttatgcacatcatatgggtatgcaaggatatcatcatcaaaatcataatcatgatccttatcatcagaatcatcgtcatcatcatggagctggtggaaatggtgcgtttgagtcaaatccttatatgatgcagcagaataagtttggatccatggcttcttatccttctgttggaggtggaagcgcaaatgagaattaa

SEQ ID NO: 1850 - DNA, 927 bp, Arabidopsis thaliana
  Clone ID: AT_K2N11.C1.o5.tg
atggaaagagtgaatctcggaggtttaggttacgataatggcggagttatgatgactagagatcccaaacctaggctcagatggacagccgatcttcatgatcgcttcgtcgacgccgtcgctaagctcggtggcgctgacaaagcaactcctaaatcggttctgaagctgatgggattaaaaggtttaacactgtaccatctcaagagccatttacagaagtatagacttggtcaacaacaaggcaaaaaacaaaatagaacagaacaaaacaaagaaaatgctggaagttcatatgtgcatttcgacaattgttctcaaggaggaatctccaatgattcaagatttgataaccatcaaaggtatattatatatgaatttgccttctctcgacataatggatttgtaaagcttgagtttgacataatgttaatgaacacacgtagacaaagcgggaatgtaccttttgctgaggcaatgagacatcaggtcgatgcgcaacaacggtttcaagaacaactcgaggtgcagaaaaaactgcagatgagaatggaggcacaaggaaaatatttgttgacattactagagaaagcacagaagagcttaccttgtggtaatgcaggggaaacagacaagggtcaattctcggatttcaatctcgcactttcgggacttgtaggaagtgatcgtaagaacgagaaggcgggtttggttactgatatctcacaccttaatggtggtgattcctctcaagagtttcggttatgtggagaacaagagaaaatagaaaccggagatgcatgtgttaaaccagaatccgggtttgtgcattttgatttgaactccaaaagtgggtatgatctcttgaattgtgggaaatatgggattgaagtgaagccaaatgtgattggagatagacttcaatag

SEQ ID NO: 1851 - DNA, 768 bp, Arabidopsis thaliana
  Clone ID: AT_F7D19.C1.o34.tg
atggccgggagatcttcgccgggaaaatgctccacgtggcttgacctgaacagagaagaaacagtggagaagaacaatgaagaagagtcatcagtggaagacgaagaccaaatcacgaataacgttagacagtatattcggtccaacatgcctcggcttcgttggacgcctgatcttcatctctccttcgttcgtgctgtccaacgactaggcggtccagacagagcgacgccgaaattggttcttgagatgatgaatctaaaaggattgagtattgcacatgtcaagagtcatttacagatgtatcgaagtaagaagctcgagccgtcttctcgccctggatttggagctttcatgagtggacaaagaagctatttgatggacatgatcgactctcgatgtatccctcatagcgatttaagacatgcctataactctaaaaccgttccttcgagggtactcaatcaagacgcggtcgttacaaatcttggaggtaactttcttatgcgaccttcgagctggtttagcgggttatgcagaaatgaccgagacagcacagagaacaagactctgcctctactcgagattaggaagaagaacaatgagaaaagagtccgagatgaagaagtatcatcagtcaaacgattgaaatcaatgtccggaggtgggatacagttgcctgagtttggaaattgcaggcaaaaaccaacagatgatatcaacacaatgctctcgctctctctgttgtcgacatcatcagaaccgtaa

SEQ ID NO: 1852 - DNA, 684 bp, Arabidopsis thaliana
  Clone ID: AT_MBK21.C1.o9.tg
atgcagtcgagagaggagatcagagatgattcatcatcaggtctcgtcctcaccactgaccctaagcctcgccttcgctggaccacagagcttcacgaacgcttcgttgacgccgtcactcaccttggaggccctgaaaaggctacaccaaagacaataatgagagttatgggtgtgaagggtctcactctttatcatctcaagagccatctccagaagttcagacttgggaagcagcctcacaaggagcatagtcaaaatcactccatttcttccatgttggatcttcgaaggaatgctgttttcacgactagtccgctcatcattggtcgcaatatgaacgagatgcaaatggaggtgcaaagaaggatagaggaagaggtagtaatagaaagacaggtgaatcaaaggatagcggcacaagggaaatacatggagagcatgttagagaaagcatgtgaaacccaagaagcaagcctcactaaagactactctactctatttttcgaccgcaccaatatttgtaacaacacatcgtccatcccaatcccatggttcgaggatcattttccttcctcttcctccatggactctacgttgattctccccgacatcaattccaacttctccctacaagattctaggagttccatcactaagggccgtacggtttgtctcggttag

SEQ ID NO: 1853 - DNA, 1104 bp, Arabidopsis thaliana
  Clone ID: AT_T8K14.C1.o15.tg
atgttccatgctaagaaaccttcaagtatgaatggttcatatgagaacagagctatgtgcgttcaaggcgattcaggccttgtcctcaccaccgaccctaaaccgcgtttgcgttggaccgtcgaactccacgagcgttttgtggacgccgtcgctcagctcggcggccccgacaaagcgaccccaaagacgattatgagagttatgggtgtgaagggtcttactctttaccacctaaagagccatcttcagaaattcaggcttggaaagcagccgcacaaggagtacggagatcactccacaaaggaaggttcaagagcttctgccatggatattcagcgcaacgtagcttcttcttctggcatgatgagtcgcaacatgaatgacaactcacaccaggttggtttgatcaggatgcaaatggaagtgcagagaaggttgcatgaacagctagaggtgcaaagacatctgcaactgaggattgaagcacaaggaaagtacatgcaatctatcttggagagagcttgccaaaccctagccggtgagaacatggcagccgccaccgcagcagccgccgtcggaggaggatacaagggtaatctgggaagttcgagtctttcagcagcggtgggcccacctcctcatcctcttagtttcccgccgtttcaagacctaaacatctatggaaacacaaccgaccaagtcctcgaccatcacaacttccatcatcaaaacatagagaaccatttcacgggtaacaatgctgcagacaccaacatttacttggggaagaagcgacctaatcctaattttggtaacgatgtaaggaaaggactattgatgtggtctgatcaagatcacgatctttccgcaaaccaatcgatcgatgatgagcatagaattcagatacagatggctacacatgtctccacggatttggattctttgtcggagatctacgaaaggaaatcaggtttatcaggtgatgaagggaataatggtgggaaattactggaaaggccatcgcctaggagatcaccattgagtcctatgatgaaccctaatggtggattaatacaaggaagaaactcgccatttgggtga

SEQ ID NO: 1854 - DNA, 1866 bp, Arabidopsis thaliana
  Clone ID: AT_T28J14.C1.o150.tg
atggcttctgctcaatctttctacaaccaaagctctgtcttgaaaatcaatgtcatggttgtggacgatgatcatgttttccttgatatcatgtcacgcatgcttcaacactccaaatacagagatccatcagttatggagatcgcagttatagctgtagacgatccgaagaaagcattatctactctaaaaattcaacgagacaatatagatctcataatcacagattattatatgcctggtatgaacggtttacaactcaaaaaacaaatcactcaggaatttggaaatttaccggtcttagttatgtcatcggacaccaacaaagaagaggagagtttaagttgtggagcgatgggtttcattccaaaacccatacatcctactgacttaacaaagatttaccagtttgctttaagcaacaagaggaacggtaagtcaacactatcgaccgagcaaaaccacaaggacgcagatgttagtgtccctcagcaaatcacgttggttcctgagcaagctgacgtcttaaagaccaagaggaagaactgctcatttaaatcggattcaagaaccgtgaacagtacaaatggaagttgtgttagtacggatggttcaagaaaaaatcgaaaaagaaaacccaacggtggtcctagtgatgatggcgagtctatgtcgcaacccgcgaaaaagaaaaagattcagtggacggattctcttcacgacctattcttacaggctatccgacatattggtcttgataaggcggtgccaaaaaagatcctagcgttcatgagcgtaccatacttgacaagagagaacgtagccagccatttacagaaatatcggatattcttgagaagagttgcggagcagggtttgtatagcatgttgtcggatagaggcatagactcgatgtttcgacaaactcacattaaggagccgtacttcaactattacacaccatctacttcttggtatgacacaaggcttaacaatagatcattctattccaaacccgtacatggctttggacagtctaaactcttgtccacaacacgtgagcccgtctgcttcaaccagatgccttacaactacatgaaccggtcatccacctatgagccgcaccgtattggatctggatcaaacttgacgctgcccatccagagcaacctcagtttcccaaaccaaccatctcaaaacgaagaaagaagaagctttttcgaaccacccgtgatggcaaacaaaatcgcccaaacatctcaagttcttgggtttggacaacttggaccgtcagctatcagtggtcataatttcaacaataacatgacgagtagatatggaagtttgattccgagccaaccgggacctagccacttctcctatgggatgcaatcgttcttaaacaatgagaacgtaacatataaccctcagccacctgccaatgcaactacacagccaaatcttgatgaacttcctcaactggagaatctcaacttatacaatgatttcggcaacactagtgagcttccttacaacataagtaactttcaattcgatgacaacaagcatcaacaaggagaagcggatcccaccaaatttgagctcccagctgcaaaattttcgactgaactgaatcatgaagacgatggtgactggaccttcgtgaacataaaccagggtcaatctaatggagaaacatcgaacactattgcttctccggagactaatactccaattttgaacattaaccataatcagaatcagggacaagatgttccagagtttaacgattggtcgtttttggatccacaggaattggttgatgacgacttcatgaactctctgttcaacaatgacatgaattga

SEQ ID NO: 1855 - DNA, 1881 bp, Arabidopsis thaliana
  Clone ID: AT_F14H20.C1.o13.tg
atgggtaagtctagtggtagaaatggtaacggaagctttaacggcaataaatttcacggagttagaccttacgtacggtctccagttccacggcttagatggacgccggatcttcaccgttgtttcgttcacgccgtcgagattctcggtggtcaacaccgagcaacaccaaaacttgttcttaagatgatggatgtgaagggacttaccatttcacatgtcaaaagccaccttcagatgtatagaggaggttcaaagctcactttggagaaaccagaagaaagctcatcatcttcaataagaagaagacaagacagtgaagaagattattatcttcatgacaacttgtctttacacacaaggaatgattgtcttttgggttttcactcttttcctctttcttcacattcttcatttagaggaggaggaggaggaagaacaaaagagcagcagacttcagagtctggtggttatgatgatgatgctgactttcttcacatcaagaagatgaacgatacgacgacgtttttgtcacatcatttccccaagggaacagaggagtggcgggaacaagaacacgaagaagaagaagaagatttgtcgttgtctctgtcgttaaatcatcatcattggagaagcaatggatcatcggtgatgaatctatcgaaccgttttggctccaattccaagacggcgatactcaacgattcttactccgacgagaatcattcttcctccgccgccgccgccgtaacttccgtcgtaatcccaccgtgctccggcaatgtactccgagccgttctcttgctcttcttcatctgcttctgcttctccctctacagaacttctggttatctccgaatcgtctctgactcttcctccaccctctctcgcattttcccctctgtcaacgattcttcttcgtctccgtctccatctccgtctctgtctccggaggaaattgaggaacctaagctagaagaagtattgcgtagagcagcaactaaagatggtacagtgattttgacaactttgaatgaagcttgggcggctccaggatctgtgattgatcttttctttgagagttttagaattggtaaaggaacaagaaggctattgaaacacttggtgatcattgctttggatgctaaagcttattcacgttgtcaagaactgcataagcattgcttcagacttgaaacagaaggtgttgatttctctggtggtgaagcttatttcatgactccttcttacttgacaatgatgtggagacgaatctctttccttcgctctgttcttgaaaagggttacaactttgttttcacggatgctgatgtgatgtggttcaggaacccttttcgacggttttacgaagacggtgatttccagattgcttgtgaccattacataggaaggccgaatgattttaggaatagaccaaatggaggatttacctttgtgagagccaataaccgaagtataggcttctacaagttctggtatgattcaaggaccaagtaccccaaaaaccacgaccaggatgttctaaacttcatcaagacagatcctttcctttggaaactaaggattaggattaggttcttgaacacagtgtattttggtggattctgtgaaccaagcaaagatttgaatcttgtttgtacaatgcatgcgaattgctgctttggtttggatagtaagcttcatgatcttagaatcatgcttcaagactggagagatttcaagtctttaccacttcatagtaaccaatcctctggtttcacctggagcgtcccacagaattgcagtcttgattcacttaggcctgttgattctaaggatgaagaagagagtgaaccaccaggagaatctacacagtga

SEQ ID NO: 1856 - DNA, 501 bp, Arabidopsis thaliana
  Clone ID: AT_F4H6.C1.o10.tg
atgcaagatccgatggttagatcttacattaggtcagacaatccgcgaatgcactggaccgacgatcttgatatccgttttattcaagttattgaaaaactcggtggcgaagagagtgcaactcctaagagaattttgagtcttatgggtgtgagagacctcacaatatcacatgtcaaaagtcatctccagatgtataggaacaaaaagaaagaagaatctagtaaagaaataaaaatgatgcgggagatgacacagaggcaatctcagcaatatcttcaaatctatgaacgtgctacccaatttatccaaaatcaacaaaggctacaactggataatactgagaagataaccccagttttgggatcaagtaacaagtctctagatcaatcttcaaaggttggactaaatgaaaacagaggcaatgatgttgttgttgttggtggtgcaactggtgaagaagaattgtcccttgaactcactcttggtcgcaagtactaa

SEQ ID NO: 1857 - DNA, 813 bp, Arabidopsis thaliana
  Clone ID: AT_MQK4.C1.o31.tg
atgtctatggaaggtgtttttctagagaaaaccaaaacaaacacaacaactactctccctgatctatctctccacatcagtctcccagatattcatcaataccatcacaatgaatcttctaaagaatcttcaagaagatcctcccaactcgaaaacaacaaccgatcgtccaactttgaactctctttatctcatcataaccatccaacagcaagaatcttccattgtcctgatcgaagaacccttaatcttcctcatcagcagcattacaacaaccctatcatcaatggtgttcatcaaagggtcgatgaatccgagattagtaatctccaccgtccaattagaggcatcccggtctatcacaaccgttcattccctttccaccaacaaaactcttcattaccttctcttggaggaggagacatggatcaaatctcaatcttaaactcatcttccggctacaacaacgcttaccgatcattacaatcttccccgaggcttaaaggtgttcctttgcatcatcatcatcatcataatcagtatggagtcgttggatcttcagattcgtcttctcctcatcaccataaccatcatcatcatgggatgatcagatcaagattcttgcctaagatgccgacaaagcgaagcatgagagctccaaggatgcgttggactagtagcctccacgcgcggtttgttcacgctgttgagcttctaggcggccatgaaagagcaactccaaagtcggttcttgagctcatggatgtaaaagacttaactttagcacatgtgaagagccatttgcaggtataa

SEQ ID NO: 1858 - DNA, 999 bp, Arabidopsis thaliana
  Clone ID: AT_F24J1.C1.o30.tg
atggagatcaacaataatgccaacaatactaatactactattgataatcacaaggcaaagatgagccttgtgttgtcaacggatgctaagccaaggttgaaatggacttgtgatcttcatcacaaattcatcgaagccgttaatcaacttggaggacctaacaaagcaacacctaagggtttgatgaaggttatggagattcctgggcttaccttataccatctcaagagccatttacagaaatatcggttagggaagagcatgaagttcgatgataacaagctagaagtttcctctgcatcagagaatcaagaagttgagagtaaaaacgattcaagagatctccgaggctgcagtgtcaccgaagaaaacagcaatccagctaaagaagggctacaaatcacagaggctttacaaatgcagatggaagttcagaagaaacttcatgaacaaatcgaagttcagaggcatttgcaggtgaagattgaggcacaaggaaagtatctacagtccgttttaatgaaagctcaacaaactctcgctggctactcatcttcaaatctcggcatggattttgcgaggaccgagctctctagattagcttcaatggtgaacagaggctgtccaagcacttcgttctcagagctaacgcaagtagaagaagaagaagaaggtttcttgtggtacaagaaaccagaaaacagaggaattagtcagctgagatgttcagtagagagctcgttgacatcttcagagacctcagagacaaaactggatactgacaataaccttaataaatcgattgaacttccgttgatggagatcaactcggaagtgatgaaggggaagaagagaagcataaacgacgtcgtttgcgtggagcagcctctaatgaagagagcttttggagttgatgatgatgagcatttgaagttgagtttgaatacttacaagaaagacatggaggcgtgtacgaacataggactagggtttaattaa

SEQ ID NO: 1859 - DNA, 438 bp, Arabidopsis thaliana
  Clone ID: AT_mtg10.C1.o140.tg
atgacagcaaaagattcgtcagaaccagttactacgcttactcaattcaacaatatagatgttgtaatcaccgattaccatatgcctggtttgaatggtgttcagctaaaaaagagaattgatgaagaatttgggaatttgcctgttattgatctatacaggaacattgagcacgaggagttgtttcgtcgagctctttgtttcatgcataaaccaatctcacgtcgtgatctcaacagcctcaacgttgtatgtcaacaagctctccgccatagaatgaacggagaaaccaatttaaatggttcgggacaaaatgtgaccgacgatccagatgattggctacggcttcgagaaaagcctaagctcaaatggacaaaacctcttcagcatagattcatgagcgctcttaaaagccttggtgtcgctagtaagtattaa

SEQ ID NO: 1860 - DNA, 879 bp, Arabidopsis thaliana
  Clone ID: AT_K21P3.C1.o12.tg
atgcagccattaaatatggctgagatattggatcaccgtggagtcttgaccgacggtgatgatggtccatttagaaatctaacaaacttctatgatatgttttcaagcaactttcctgaaggtttgcgagtgttagtcttcgatgaagatccatcgtatcttctgatattggagagacatctccaaaagtttcaataccaagtgactatatgcaacgaagtgaacaaagctatgcatacactccgcaaccataggaataggttcgacctcgctatgatacaagtaaataatgcagaaggtgatatattccggtttctctcggaaatcggatcggaaatggatcttccaatcatcataatatctgaagacgattcagtgaagtcggtgaagaaatggatgattaacggtgctgccgactatcttataaaaccgataagacccgaagatctacggatagtattcaaacatttggtaaagaagatgagagaaaggaggagtgtggtgaccggagaggcagagaaagcagcaggtgagaaatcatcctctgtcggagattccaccataagaaaccctaacaagagtaaaagaagtagttgccttgaagcagaagtcaacgaggaggatcgtcatgatcataatgatcgtgcttgtgcttctagtgccaagaaaagacgagtcgtttgggacgaggagcttcaccaaaactttctcaacgccgtggattttcttggactcgaaagagctgttcccaaaaaaatattagatgttatgaaggttgattacatcagtcgagaaaacgtagccagtcatcttcaggtaacgtttcttatatacaacataattgttcattttcaacaacatttttgcttttattcttga

SEQ ID NO: 1861 - DNA, 933 bp, Arabidopsis thaliana
  Clone ID: AT_K13N2.C1.o11.tg
atgatcaagaacttaagtaatatgaagaatgacaatcagaaacgtgaaaaatgttgcgagtacatcgaagctctcgaagaagaacgtcgcaagatcaatgttttccaacgcgagcttcctctttgcgtagagctcgtgactcaagcgattgaggcgtataagagggagatatcagggacgtcgacggataacttatacggacagtcggagtgctcagagcagaccaccggagaatgtgggcgcatcttggatctgttcataccaatcaaacactcttcgacctccatagaagaagaggttgatgacaaagatgatgatgatgaagaacaccagtctcatgaaaccgacatagattttgatgacaagaacatgaaatctgaatggctcaagtctgttcagctctggaaccaatccgacgcagttgtttctaataatagacagagaaagaataggcggtgttggtcgcaagagttacacagacgcttcttgaacgctcttaaacaacttggtggccctcatgtagctacgccgaaacagataagagatataatgaaggttgatgggttaacaaatgatgaagtcaaaagtcatttacagaaatataggctgcatgcaagacggccaagccaaacaacaccgaacaacagaaactctcaaacgcaacatttcgtggtggttggtggaatatgggtcccacagactaaccattcaacggccaacgcagtcaacgccgtcgcatcgggtgagaccaccgggatttatgggcctatggtcagttcgttgccgtccgagtggccgaggcattccaattttggtaggaagatttcggaagatagatcaagatgctctaacaacggattttttcggtgtagctcaccagctatgtcttgttctactcgtacaaagacgaaagatgcaaaaataatatcataa

SEQ ID NO: 1862 - DNA, 1002 bp, Arabidopsis thaliana
  Clone ID: AT_F14J22.C1.o21.tg
atgggttctttaggtgatgagcttagtttgggatcgatctttgggagaggagtttcgatgaatgttgtggcggttgagaaagttgatgaacatgttaagaagcttgaagaagagaagagaaagctcgaaagttgtcaacttgagcttcctctgtctttgcagattttaaacgatgcgattttgtatctgaaggataagagatgttcagagatggagactcaaccattgttgaaagatttcatttctgttaataaacctattcaaggagaaagaggaatagaattgctgaaaagagaggagctaatgagggagaagaagtttcagcaatggaaagctaatgatgatcacactagtaagatcaagagcaagcttgagattaagagaaatgaggagaaatctcctatgttgttgattccaaaggtggaaactggtttaggcctcggtttaagttcgagttcgataagaagaaaagggattgttgcctcatgtggctttacttctaactctatgccacaaccaccaacaccagcagtaccacaacaaccagcatttcttaagcagcaagctttacggaagcaaagaaggtgttggaatccagagttgcatcgccgatttgtcgatgcattgcaacagctaggtggaccgggagtggcaactcctaaacaaattagagaacatatgcaagaagaaggcttaaccaatgatgaagtcaagagtcatttacagaaatacaggttacacatcaggaagccaaattcgaatgcggagaaacaatcagcagttgttttagggtttaacttgtggaattcttcagcacaagatgaagaagagacatgtgaaggaggagaatcattgaagagaagcaatgcgcaatcagattctcctcaaggtcctttgcagttaccgtctacaacaacaacaactggtggagatagtagcatggaagatgttgaagatgctaagtctgagagctttcaactggagagattgagatcaccataa

SEQ ID NO: 1863 - DNA, 906 bp, Arabidopsis thaliana
  Clone ID: AT_F5K7.C1.o22.tg
atgaagaagcaagaaaaaggaaacgaagttgtcactttcgaagaaaatcctagcacttatgttcatcatcacacgaaaaaagcctcaatggttttaagtgagcaagaaatagaggttattctacaaagtaataaggagacatataatgaaaaattagaaaaaaatacgaaagagaatgctgagaaagttggtattgaagaaggaaatggttcatcttcaaagatcacgccatgcattttctacacatctgatgaaaaggcacgattgaggtggtcaagcgaccttcacgattgctttgttaatgctgtggaaaaacttggtggacctaacaaagcgacgccaaaaagtgttaaagaggcaatggaagttgaaggaattgcacttcaccatgtgaagagtcatcttcagaaatttagacttggaaagtgtaacatacggggtggaacaaatcaatatgttagacagtcacaatccatgcctcacaagagtcaacaacaacttcagctcaacaatgattgtgtcaatcatgactcatattgcaatgcaacttttttatcggtcacggtaccaccaacaattgattctcttcatcaggacactttaaacaatacaattctttttccaacgacactacaagcaataccgacatctgtgtcacacaatacgtacatgagttcatatccttcatacaatactgttgaagttgttaaagctcagctcaatgcattacaagattcaagcactagccaaacacaagaaacattttctcgtgaaaccaacttatcgtctatagtcacaagggatgaagcagatccagtggataagtatattgattggaacaaagttggagaaactgatattgaacatgattcagtcgaagtccttgaggctttaggtttgaagtaa

SEQ ID NO: 1864 - DNA, 900 bp, Arabidopsis thaliana
  Clone ID: AT_T19C21.C1.o21.tg
atgattccaagtatggagggaggcgggaagactaacagagaagaagaggaggaggaagaggaagaagaagaagaaggtgaagagagtaaggtttcaagcaatagtacagtggaagagagcgacaagaagactaaggttaggccttatgtgagatctaaagtccctcgactccggtggactcctgatcttcatcttcgctttgtccgcgccgttgagaggcttggaggtcaagaaagagcaactccaaagttggttcgtcagatgatgaacatcaaagggcttagtattgctcatgtcaagagccatctacaggtatttgatctacatacatctaaaacatatggaagtaaaatttcaaatgcttctttgtggaactctagctctcaaggaacagaaaggagtttgatagaccaaattaggcccggtttaatccgcaacgcgtcggttagcaataacatccgtggtagtgattattggactaacaacaagtctttccaaaacatctactcttcttcaatttctaatcactttccgaaactacgacacgatcatcacgaacggaccaattcagtcacattcaacagcattcaaggacactcaagaacttttcaaaagttccataacggtgttgaggagaacactaatcattcttattgtagcaagacaaatggcaaaagagacgcaagtaggagcattgatcttgatctatctcttaagctaagacaaccggagaagacaattttggaagagacagaaacagcagcaacaacaacggatcaaacgttgtccttgtcgctatgtccagggtcgtcttcgtggaaaaagagccgactgatgaaagatgaagaggatcggacggttaagattggtcaggagagtactctggatctgactctatga

SEQ ID NO: 1865 - DNA, 552 bp, Arabidopsis thaliana
  Clone ID: AT_C7A10.C1.o180.tg
atgactccaacatcagagatgatgatggattatagcagaattgagcagagtcatcatcatcatcaattcaataaaccttcttcacagagtcatcacattcagaagaaagagcagagaaggagatggtcacaggaacttcaccgtaaatttgttgatgctcttcataggcttggagggccacaagttgctacaccaaagcagattagagatttgatgaaagttgatggtttaaccaatgatgaagtcaagagccatttacaaaaatatagaatgcatatccgtaagcatccgctgcatccgacaaagactttgtcatcgtcggatcagccaggtgtgttagagagagaatcgcagagcttaataagtttgtcgaggtcggattcgccacaaagcccacttgttgcaagagggttgttcagtagtaatgttggtcatagctcagaggaagatgaggaggaggaggatgaagaggaggagaagtctgatggacgtagtagctgtagaaatgatgaaacaaagaagaagagacaagtgttggatcttgagctttga

SEQ ID NO: 1866 - DNA, 1062 bp, Arabidopsis thaliana
  Clone ID: AT_F24J5.C1.o3.tg
atggtggagatggattacgctaagaaaatgcagaaatgtcatgaatacgttgaagcacttgaagaagaacagaagaaaatccaagtctttcaacgcgagcttcctttatgtttagagcttgtcactcaagcgatcgaagcttgtcggaaggagttatctggtacgacgacaactacatcagaacagtgttcagaacagaccacaagtgtttgtggtggtcctgtctttgaagagtttattcctatcaagaaaattagttccttgtgtgaagaagtacaagaagaagaagaagaagatggtgaacatgaatcttctccagaacttgtgaataataagaaatcagattggcttagatctgttcagctatggaatcattcaccggatctaaatccaaaagaggagcgtgtagctaagaaagcgaaagtggtggaggtgaaaccaaaaagcggtgcgtttcagccgtttcaaaagcgcgttttggagactgatttgcaaccggcggtgaaagtagctagttcgatgccagcgacgacgacgagttctacgacggaaacttgtggtggtaaaagtgatttgattaaagctggagatgaggaaagacggatagagcagcagcaatcgcagtcgcatacgcatagaaaacaaaggcggtgctggtcgccggaattacaccgtcgattcctaaacgcgcttcagcagcttggaggatctcatgttgctacaccaaagcaaatcagggatcacatgaaggttgatggattaacaaacgacgaagttaaaagccatttacagaaatatagacttcacacaagaaggccagcagcaacatccgtggcggcacaaagtaccgggaatcagcaacaaccacaatttgtggtggttggaggcatatgggtaccatcgtcacaagattttccaccaccgtccgatgtagccaacaagggtggtgtatatgctccggttgcggtggcgcaatctccaaaacgttcgttggagagaagttgcaactcgccggcggcatcttcctctacaaatacaaatacttctactcctgtgtcataa

SEQ ID NO: 1867 - DNA, 1167 bp, Arabidopsis thaliana
  Clone ID: AT_F27G20.C1.o7.tg
atggagctgtttcctgctcagcccgatttatccttacaaataagtccaccaaacagtaaaccatcatcgacatggcagagaagaagatcaacaacagatcaagaagatcatgaagaactcgatttagggttttggagaagagctcttgattcaagaacatcttctctcgtctctaattccacctcaaaaacaatcaatcatccattccaagacctctcgctctctaacatctctcatcatcaacaacaacaacaacatcatcatccacaacttctccctaattgcaacagctctaacatcttgacctctttccaatttccgacacagcagcaacaacaacacttacaagggtttcttgctcacgaccttaatactcacttaagaccaataagaggaataccactttaccacaaccctcctccacatcatcatcctcaccgtccgccaccgccatgtttccctttcgacccgtcgtctctaataccctcttcctccacttcctcgccggctctaaccggaaacaacaatagctttaatactagtagcgttagtaaccctaattaccacaatcatcatcaccagactctaaacagagccagattcatgccaagattcccagctaaacgaagcatgagagctcctaggatgcgatggaccaccactcttcatgcccggttcgttcacgccgttgaattactcggtggccatgaaagagcaacacctaaatcagttcttgagctcatggatgtcaaagatctaaccttggctcatgttaagtcccatttacagatgtacagaacagtgaagacaaccgacaaagcagcagcttcgtcaggacaatctgatgtctatgaaaatggatcatcaggagataataactcagacgactggatgttcgatatgaatagaaaatcgagagatagcgaggaattgacgaatcctctagagaaatcaaatggtctatggaccaattcttccggagaagcacgtttgcatgggaagttaatcgataatgttgcagaaattatgctaccttctgagaaggaactagatggaaagtgctcaagttatgagagaatatcatcagaagagatgagctcatcaagcatctcgggaacaagccctttcaagccaaatcttgagtttactctgggtcgatctcactaa

SEQ ID NO: 1868 - DNA, 801 bp, Arabidopsis thaliana
  Clone ID: AT_MUG13.C1.o5.tg
atgagagaagaagattccaattggtttgctaaatgggaagaagagcttccgtcgccggaggaactcatacctttatctcaatctttaatcacgcctgatctcgccatcgccttcgatctccaccgtaacaacaactcaaactccggtcaacctctacctcaaaccacaccgccacaacccaattcctcagccgaaatcgccggagactctaccggagacgaaccagcaagaacgctaaaacgaccgcgtttagtatggacgccacagctacacaaacgtttcgtagacgcggtggctcatctcgggataaaaaacgcggttcctaaaaccatcatgcagcttatgagcgttgatggtttaacaagagaaaacgtcgctagccatttgcaaaaatacagactttacctcaaaagaatgaaatccggcggcggaggaggcggcagcggtgattccgatcatctctttgccagctcacctgttcctccacatttcctccatccgacaagtagacagagctccgaccttttcataccctcttttgtcccaatttcaactcagcagcaacatatcgcagcaccaccgtctcagttcctccaccgacaaatctccgccgttaatttcacttcaccgaccaaagcgaccgaccaagcaatgttcttggctaggcagcagagtgaactacagcaaccagttttcaaaccatcttcattgcatttacatagtcaagtcgctaattacacgcaagatttgaaatcaggagccaaaacggtcttgactctgtttccaactcgagacgattga

SEQ ID NO: 1869 - DNA, 1008 bp, Arabidopsis thaliana
  Clone ID: AT_T7M13.C1.o16.tg
atgagagaagacgattcagactggttcgcaagatgggaagaagaacttccatcaccagaagagctcatgccaatatcacaatctctaatctcacccgatctagctctagccttcgatatacgaaccccaaatcacggaaacggaaactcaaaccaacctcatcatcatcatcatcaccaaaccacacctcctacaccgtctcagcttcagcttccatcttctcaagccaattcctcagccgaattcgctgcagattcagcagatctaggctccggaggagctgccggagacgaaccagctcggactttaaaacgacctcgtcttgtctggacaccgcagctgcataaacgtttcgttgatgctgttgcgcatttagggattaagaacgcagttcctaaaacgattatgcagcttatgagtgttgatggtttaactagagaaaacgttgcgagtcatttgcaaaagtatagactttatcttaagagaatgcaaggtttgtcttctggtggtggtgctggttcagatccagctactgatcgtcttttcgctagctctcctgttcctgctcactttcttcatcctaatcgtgttcccagttctgatcatttcatgccgtcttttgttcctattgctactcttcaacaacaacaacaaatggctgctgctgcggccgctgctgcagcagctaatcctcatttacaaccgcctcagttccaccgtcaaatcgcagctgcgcattttggttcaccgactaatggtggattcagttcaccgacgagtaatggacagtttggatcaccgactagtaatggatttggatcaccgacgactaatgggaagtttgatccttcgttcttggcggtgaggcaaacgcagcagcaaccaattcagagaatgtctacaccatcattgcatagtccagttagtaattacgttgaggatttggaatctgcaaacgctaatggagggagaactgtcttaactttattcccaactcgagacgattaa

SEQ ID NO: 1870 - DNA, 909 bp, Arabidopsis thaliana
  Clone ID: AT_F18A5.C1.o30.tg
atgtactcggcgattcggtcttcgcttcctctagatggcagcttgggagactactctgacggaaccaatcttcccatcgacgcttgtctggtcctaaccactgaccccaagcctcgccttcgttggacctctgagctccatgaaagattcgttgacgccgtcactcagctcggcggacccgacattagtacgaagaatttgacaacgaaagcaacgcctaaaactataatgagaacaatgggagtgaagggtctcactctttaccatctcaaatctcatcttcaggttttgatgctactaccttcaatatcaaattatgcttctttggctacttataacaaacaaatttcttgtgttgcggagagtcaggacactggttcatcttcaacatcatccttaagattggctgctcaagaacagaacgagagttaccaggtcactgaagctttgcgtgcccagatggaagtccaaagaagactacacgagcaactagaggtgcaaaggcgactccagttaaggatcgaggcacaagggaagtacctgcaatcaattctagagaaagcttgcaaggctatagaggagcaagctgttgcatttgctgggttagaggcagctagagaagagctttcagagctagccataaaggcctccatcaccaatgggtgccaaggaacaacaagcaccttcgacacaaccaaaatgatgattccatccttatccgagcttgcagtagcaatagagcacaagaacaactgttcagcagagagctctctgacttccagcactgtaggaagtccggtatcagctgcgttgatgaagaagagacaacgaggagtgtttggaaatggagatagtgtggttgttggtcatgatgctggatgggttatgcctagtagtagcattggatga

SEQ ID NO: 1871 - DNA, 1281 bp, Arabidopsis thaliana
  Clone ID: AT_F26K9.C1.o100.tg
atgtcagttttttcgaacatactcgatgagaactctcgcaacttgcgaaacgaaataccttgtgatgatggaattgcatctcccatcaacgacgacgacgaagagttcttgactaaaagtaatagggttcttttggtcggtgcagattccaattcgtctttgaagaatctcatgacacagtattcctatcaagtaacgaaatatgagagcggagaagaggccatggctttcttgatgaagaataagcatgagatcgatctagtgatttgggatttccatatgcccgatatcaatggactcgacgctctcaatatcattggtaaacagatggatttacccgtagtaatcatgtctcatgaatacaagaaggaaacggtgatggaatcgattaagtacggtgcgtgtgactttcttgtgaagccggtgagcaaagaggtcattgcagttctatggcgacatgtttatcgaaaaaggatgtcaaaatctggtttagataaaccgggtgaatcaggtacggttgaatcagatccggacgaatacgacgatttagagcaagacaatctctatgagagcaacgaagaaggctccaaaaacacttgcgatcacaaagaagagaagtctccgaccaagaaaccgcggatgcaatggactcctgaacttcaccacaaatttgaagtagccgtcgaaaaaatgggcagccttgagaaggcttttccaaagacgattctcaaatatatgcaagaagaattgaatgtccaggggctcactagaaacaacgtagccagtcatctccagaagtaccgtcaaagttccaaaaagacctgcactcctcaggagcctcaagaagattttgtctggggtaatgctgggccagatgtcactcttgcagcctctaaaacgctcctaagctcccatgctacaccatcgtatttgataaacaatcaagctgcgcctagaggatcatatttcatgaacaatatcccgtatccatcaaccagttgcctgccagtgaacaacaacaactgcttcatgaccaacccttccacttatattgaccaattccagcaccagctgcagcagcagcagcaacatcaacagtaccagtctactctaaatagtatatctgccatgctaaccaagcaagaatctagacacgtgccatcatcagccatggaaaattccgagccgctcatgatctataattcaaatctacctttcggtatcgacgagtgtttcccacctgcaggattcaacattttcgatcagattggtcacaattga

SEQ ID NO: 1872 - DNA, 1191 bp, Arabidopsis thaliana
  Clone ID: AT_F3F24.C1.o100.tg
atgactctggctaatgatttcggatattcgaccgctatgtcttcatcttattcagctcttcatactagtgtagaagacagataccacaagttgcctaactctttttgggtttcatcaggtcaggaactgatgaataaccctgtaccgtgtcagtcggtctctggtggcaattctggtggttatttgtttccttcttcctctggatactgcaatgtttcagctgtcttgcctcatggaaggaatttgcaaaaccagccacctgtttccaccgtgcctagagacagattggctatgcaggattgtcctttgatagctcaatcctcgttgattaatcatcaccctcaagagttcatagatccacttcatgagttctttgatttctctgatcatgttcctgttcagaatctacaagcagagagtagtggagtaagggtggactcatccgtggaacttcataagaaaagtgaatggcaagattgggcagatcagctgatttctgttgacgatggttctgagccaaattggtctgaacttcttggagattcaagttcccacaatccaaattcagagatacctacaccatttttggatgtaccaaggctagatataacagctaaccagcagcaacagatggtttcatcagaggaccagctcagcggcagaaactcatcatctagtgtagcaacatctaaacaacgtatgcgttggacaccagaacttcacgaggcattcgttgaagctgttaatcagcttggtggtagtgaacgagccacccctaaggctgttttgaagctcttgaataaccctggcttgaccatttatcatgtaaaaagccatttgcagaaatatagaacggcaaggtataaaccggagacttcggaagttacaggagaacctcaagagaagaagatgacatctattgaagatatcaaatctcttgacatgaaaacgagcgttgagatcacacaagctctacggttacaaatggaagtgcagaaacgtctccacgagcagctcgagatgatgttcgagaaacaacaaaagatacaagacaacaagagctcttcttcagaagcatcaccaaagcaatgcaatggttcatttgcagaagttgaagttggtcttgagacactaacaggggaccaaaatgaatctgcttcagcatcaaggaaacgtgtcagagaagattaa

SEQ ID NO: 1873 - DNA, 1269 bp, Arabidopsis thaliana
  Clone ID: AT_T5F17.C1.o60.tg
atggaggctcgtccagttcatagatcaggttcgagagacctcacacgcacttcttcaatcccatctacacaaaaaccttcaccagtagaagatagtttcatgagatcagataacaacagtcagttaatgtctagaccattaggacaaacctaccatttactttcatctagtaacggtggagctgttggacatatatgttcttcttcatcatctggttttgcaaccaatctccattactcaactatggtatctcatgagaaacaacaacactacacaggaagcagcagtaataatgctgtgcagacaccaagcaacaacgatagtgcttggtgtcatgattcattgccaggagggtttcttgacttccatgaaaccaacccggcgattcaaaacaactgtcagattgaggatggtggcattgcggctgcttttgatgacattcaaaaacgaagtgattggcatgaatgggctgaccatttgatcactgatgatgatcctttgatgtctactaactggaatgatctcttgcttgaaacaaattccaattcagattcaaaggaccagaagacactgcaaattccgcaacctcagattgttcagcagcaaccttctccgtctgtggaattgcgacctgttagcacaacatcttcaaacagcaataacggaacgggcaaggcacgaatgcgttggacgccagagcttcacgaggcttttgttgaggctgtcaacagtcttggcggtagtgaaagagctactcctaaaggggtactgaagattatgaaagttgaaggcttgactatatatcatgttaaaagccatttacagaaatataggacagctagatatcggccagaaccatcagaaactgaattcaatgtaaaaactaaagtttctttgatcactacaggttcgccagaaaggaagttgacaccgcttgaacatataacatctcttgatttgaaaggtgggataggtattacagaggctctacgacttcagatggaagtacagaagcaactccatgagcagctcgagattcaaagaaacctgcaactccgaatagaagaacaaggcaagtacctgcaaatgatgttcgagaagcaaaactctggtcttaccaaagggacagcctcaacatcagattccgcagccaaatctgaacaagaagacaagaagactgctgattcgaaggaggttccagaagaagaaaccaggaaatgtgaggaactagaatctccacagccaaagcgtcccaaaatcgataattga

SEQ ID NO: 1874 - DNA, 252 bp, Arabidopsis thaliana
  Clone ID: AT_T5E21.C1.o4.tg
atgggtaggtgtggaagaagcaacgacggagtaattggtggagtaagaccatacgtacgatctccggtgcctcgtctgagatggacgccggagcttcaccggagtttcgttcacgccgttgatttgctcggcggtcaatataaagcaactccaaaacttgttctgaagataatggatgtcaagggactaaccatatcacacgtcaagagccatctccaggtcaaagaaaatgctaaaaaaatacttttttaa

SEQ ID NO: 1875 - DNA, 1185 bp, Arabidopsis thaliana
  Clone ID: AT_T11I18.C1.o14.tg
atgtattaccaaaaccagcaccaaggaaagaacatcctctcatcttcaagaatgcatataacttctgaaaggcatccattccttagagggaatagtccaggtgattctggacttatcctatcaaccgatgcaaagccacgcctaaaatggactccagatcttcatgagagattcattgaagcagtcaatcaactcggtggagcagataaagctactcctaagacaatcatgaaagtcatggggattccaggccttaccttataccatctcaaaagtcatcttcagaaatacaggctgagcaagaatctcaacggacaagctaacaacagcttcaacaaaataggtataatgaccatgatggaagaaaagactcctgatgcagacgaaattcaaagcgagaatttaagcattggaccacagccaaacaagaattcaccaataggtgaagcactgcaaatgcaaatagaggtccaaagaaggcttcatgagcaacttgaggtacagcgacatttgcagcttaggatagaggctcaagggaagtacctgcaatcggttttggagaaagcacaagagactcttggaagacagaacctcggtgcagctgggatcgaagctgccaaagttcaactctcggaactagtatctaaagtatcagcagagtacccaaactctagtttcctagaaccaaaagaacttcaaaacctatgctcacaacagatgcaaacaaactatccacctgattgctctcttgaaagttgcctgacctcaagcgagggaacgcagaaaaactcgaaaatgctagagaacaacagattaggactaagaacgtatattggtgattcaacatcggagcagaaagagattatggaagaaccattgttccaaagaatggagctcacatggacagaaggtctaagagggaatccatatctttcaacaatggtgagtgaagcagaacaaagaatctcatattcagaaagaagtccaggtagattatcaataggagtaggattgcacggacacaaaagccaacatcaacaaggcaacaatgaggatcataagcttgaaacacgaaaccggaaaggcatggattcaacaacagagctagatctcaacacacatgttgaaaactattgtacaacgcgtacgaaacagttcgacttgaatggtttcagctggaactga

SEQ ID NO: 1876 - DNA, 1161 bp, Arabidopsis thaliana
  Clone ID: AT_MLN1.C1.o11.tg
atgttaactgtttctccggctccagtactcatcggaaacaactcaaaggatacttacatggcggcagatttcgcagattttacgacggaagacttgccggactttacgacggtcggggatttttccgatgatcttcttgatggaatcgattactacgacgatcttttcattggtttcgatggagacgatgttttgccggatttggagatagattcggagattcttggggaatattccggtagcggaagagatgaggaacaagaaatggagggtaacacttcgacggcatcggagacatcggagagagacgttggtgtgtgtaagcaagagggtggtggtggtggtgacggtggttttagggacaaaacggtgcgtcgaggcaaacgtaaagggaagaaaagtaaagattgtttatccgatgagaacgatattaagaaaaaacctaaggtggattggacgccggagttacaccggaaatttgtacaagcggtggagcaattaggggtagacaaggcggtgccgtctcgaatcttggaaattatgaacgttaaatctctcactcgtcacaacgttgctagccatcttcagaaatataggtcacatcggaaacatctactagcgcgtgaagcagaagctgccagctggaatctccggagacatgccacggtggcagtgcccggagtaggaggaggagggaagaagccgtggacagctcctgccttaggctatcctccacacgtggcaccaatgcatcatggtcacttcaggcctttgcacgtatggggtcatcctacgtggccaaaacacaagcctaatactccggcgtctgctcatcggacgtatccaatgccggccattgcggcggctccggcatcttggccaggtcatccaccgtactggcatcagcaaccactctatccacagggatatggtatggcatcatcgaatcattcaagcatcggtgttcccacaagacaattaggacccactaatcctcccatcgacattcatccctcgaatgagagcatagatgcagctattggggacgttatatcaaagccgtggctgccgcttcctttgggactgaaaccgccgtcggttgacggtgttatgacggagttacaacgtcaaggagtttctaatgttcctcctcttccttga

SEQ ID NO: 1877 - DNA, 1221 bp, Arabidopsis thaliana
  Clone ID: AT_F23N11.C1.o11.tg
atgttagctctgtctccggcgacaagagatggttgcgacggagcgtcagagtttcttgatacgtcgtgtggattcacgattataaacccggaggaggaggaggagtttccggatttcgctgaccacggtgatcttcttgacatcattgacttcgacgatatattcggtgtggccggagatgtgcttcctgacttggagatcgaccctgagatcttatccggggatttctccaatcacatgaacgcttcttcaacgattactacgacgtcggataagactgatagtcaaggggagactactaagggtagttcggggaaaggtgaagaagtcgtaagcaaaagagacgatgttgcggcggagacggtgacttatgacggtgacagtgaccggaaaaggaagtattcctcttcagcttcttccaagaacaatcggatcagtaacaacgaagggaagagaaaggtgaaggtggattggacaccagagctacacaggagattcgtggaggcagtggaacagttaggagtggacaaagctgttccttctcgaattctggagcttatgggagtccattgtctcactcgtcacaacgttgctagtcacctccaaaaatataggtctcatcggaaacatttgctagctcgtgaggccgaagcggctaattggacacgcaaaaggcatatctatggagtagacaccggtgctaatcttaatggtcggactaaaaatggatggcttgcaccggcacccactctcgggtttccaccaccaccacccgtggctgttgcaccgccacctgtccaccaccatcattttaggcccctgcatgtgtggggacatcccacggttgatcagtccattatgccgcatgtgtggcccaaacacttacctccgccttctaccgccatgcctaatccgccgttttgggtctccgattctccctattggcatccaagatttagagcaccgccagttgccggaatcccgcatgctctgccgccgcatcacacgatgtacaaaccaaatcttggatttggtggtgctcgtcctccggtagacttacatccgtcaaaagagagcgtggatgcagccataggagatgtattgacgaggccatggctgccacttccgttgggattaaatccgccggctgttgacggtgttatgacagagcttcaccgtcacggtgtctctgaggttcctccgaccgcgtcttgtgcctga

SEQ ID NO: 1878 - DNA, 861 bp, Arabidopsis thaliana
  Clone ID: AT_F23H14.C1.o3.tg
atggaagcagacaacggaggccccaattctagtcatgcatccaaacaacgtctgcgttggacgcatgagctacatgaacgcttcgttgatgccgttgctcaacttggtggccctgatagagctacacccaaaggcgttcttagagtgatgggtgtacaaggcttaactatatatcatgtcaagagtcacttacagaaatatcgacttgcaaagtatcttccagattcgtcttctgaagggaaaaaaactgataagaaagaatctggagatatgctctctgggttggacggctcgtcgggaatgcagataactgaagccctcaagttgcagatggaagttcagaaacgattacacgagcaactagaagtgcaaagacagctgcaactacggatagaagcacaaggaaagtacttgaagaagataattgaagagcaacaacgactcagtggagtactcggcgaaccctcagccccagtaacgggcgattcagatcctgcaacccctgccccaacatctgagtctcctcttcaagacaagtctggcaaggactgtggaccagacaaaagtctctcagttgacgagtctctctcatcttaccgggagcctttaacaccagactcagggtgtaacattgggtctccagatgagagcacaggagaggagagattatcaaagaagcctcgattggtgagaggtgcagctggttatacacctgatattgtagtgggtcacccaatactagaatcaggcttgaacacttcttaccatcagtcagaccatgtcctcgcctttgaccagccatctacatcactgcttggggccgaagaacagttggataaggtttcaggagataatctttga

SEQ ID NO: 1879 - DNA, 1032 bp, Arabidopsis thaliana
  Clone ID: AT_F2J7.C1.o21.tg
atgatgttcaagagcggtgacatggattacacccagaaaatgaagagatgtcacgaatatgtagaagctctagaagaagaacaaaaaaagattcaagtctttcaacgtgagctccctttatgtttagaacttgtaacccaagctatcgagtcatgtcggaaggagttatcggaatcttcagaacatgttggcggccagtcagaatgttctgagcggacaactagtgaatgcggcggtgccgtgtttgaagagtttatgccaatcaagtggagttctgcttcatctgatgaaaccgataaagatgaagaagctgagaaaactgagatgatgaccaatgaaaataacgatggtgataagaagaaatcggattggcttagatctgttcaattgtggaaccaatcaccagatccacaacctaataataagaaaccgatggtaattgaagtcaaacgcagcgctggtgcgtttcaaccgtttcaaaaggagaaacctaaggctgcagattctcaaccacttattaaagcaattactccgacgtcgacgacgacaactagttccacggcggaaaccgtcgggggtggaaaagagtttgaggagcagaaacaatctcattcgaataggaagcaaagacgttgctggtcaccggagttacaccgcagattcttgcacgcgcttcaacaacttggtggatcacatgttgctacgcctaagcagattagagatcttatgaaggtcgatggtttaactaatgacgaagttaaaagtcatttacagaaatatagattgcatacaagaagaccagctactccggtagtaaggaccggtggtgaaaatccacaacaacggcagtttatggtgatggaaggcatttgggtaccttcacacgatacaactaataatagagtttacgctcctgtggcgacacaaccgccgcaatcttcaacgtcgggagagagaagcaatcggggttgcaaatctcccgcaacatcttctactactacacacacaccacaccttcttcctctttcataa

SEQ ID NO: 1880 - DNA, 1233 bp, Arabidopsis thaliana
  Clone ID: AT_T12H1.C1.o18.tg
atggcgaacgaagacgacgacggtgagaaatccagaagtctgcaccaacagattgctagaaaacccaaaacccagatcgtgattggtgtgccatcgtaccaggaagttttggaaagctcacagacgaagtccacgcctccatctctcttcaagccttcccagagtttctctcaggctttcgctttcgtcaagtcgtccgacgtctactctcctcctcctccttcctccgcagccgcctcttcttctcagccgtcgggcgcttctcaggtgccccacagttcaagccaaacgcatcaaactgatggagcctcatcttcttctactcctgtagccactggctctgtaccatcaaacacaactcaaaatcgtaacgctattctcgttagccatcgacagaaaggaaacccgcttcttaaacatatcaggaatgtgaaatgggttttctcagatatcattccagattacgtgcttggtcaaaactcttgcgctttgtatttaagcttgcggtatcatctcctacatccggattacctctatttccgcattagggaactacaaaagaatttcaagctaagtgttgttctttgccatgtcgacgtggaagatacggtgaaaccgttgcttgaagtcacaaaaaccgctctacttcatgattgcactctattgtgtgcctggagcatgacagaatgtgcccgttatttggaaacgataaaagtctatgaaaacaaacctgcagatctcatccaaggccaaatggatacagattacctttcacggctaaaccattctcttacaagcattcgacatgtaaacaagagcgatgtagttacacttggttctacattcgggtctcttgctcatataatcgatgcatccatggaagatttagcacgttgtcccgggattggcgaacgtaaggtgaagcggttgtatgatacattccacgagcctttcaagcgtgcaacttcgagctacccgtctgttgtagaaccaccaatcccggaagctccagttgagaaggatgtgaactcagaggaacctgttgaagaagacgaggattttgtggaggactcgagaaaacgcaagaagaaggagcccgagcccgagaaaactgtgaagaccgcactctctgctgtttttgctcgttactctgatagacttagcaagaaaaaggagaaacagaaggagaaagatacaacaacggcgtcagatgctgaaacccaccaaaattaa

SEQ ID NO: 1881 - DNA, 1020 bp, Arabidopsis thaliana
  Clone ID: AT_F22D1.C1.o20.tg
atggagcagcgtagaaaccagaatgctgtccaacaacaagacgatgaagaaacccagcacggacctttccctgtcgaacagcttcaggcagcaggtattgcttctgttgatgtaaagaagcttagggatgctggtctctgtactgttgaaggtgttgcttatactccgaggaaggatctcttgcagattaaaggaattagtgatgccaaggttgacaagattgtagaagcagcttcaaagctagttcctctggggttcactagtgcgagccagctccatgctcagagacaggaaattattcagattacctctggatcacgggagctcgataaagttctagaaggaggtattgaaactggttccatcacagagttatatggtgagttccgctctggaaagactcagctgtgccatacactgtgtgtgacttgtcaacttcccatggatcaaggaggtggagagggaaaggccatgtacattgatgctgagggaacattcaggccacaaagactcttacagatagctgacaggtttggattaaatggagctgatgtactagaaaacgttgcctatgcgagggcgtataatacagatcatcagtcaaggcttttgcttgaagcagcatcaatgatgattgaaacaaggtttgctctcctgattgtcgatagtgctaccgctctctacagaacagatttctctggaaggggagagctttcggctcgacaaatgcatcttgcaaagttcttgagaagtcttcagaagttagcagatgagtttggtgtggctgttgttataacaaaccaagtagttgcgcaagtagatggttcagctctttttgctggtccccaatttaagccgattggtgggaatatcatggctcatgccaccacaacaaggttggcgttgaggaaaggaagagcagaggagagaatctgtaaagtgataagctcgccatgtttgccagaagcggaagctcgatttcaaatatctacagaaggtgtaacagattgcaaggattga

SEQ ID NO: 1882 - DNA, 951 bp, Arabidopsis thaliana
  Clone ID: AT_T1N24.C1.o9.tg
atggcgactcatcccgaagctctccgacgagagcgaattctcaacagtaaactctacttcgacgttcctctttcaaaggtttcgattatctattcatcgtcttatgatatctcgttcatgggtattgagaaattgcacccatttgattcttccaagtggggtagagtttgcaagttccttgtttcagatgggtttctggaggagaaagcaattgttgagcctcttgaagcttcaaagattgatcttttagtggtacattctgagaactacttaaacagcttgaaaagcagtgccactgtcgctaggatcaccgaggttggtgggacgattctggcagctaaacttgcaacagaacgtggatgggcgataaacattggaggaggttttcatcattgtactgctgaaagaggaggcgggttttgtgctttcgctgatatttctctctgtattcactttgcgtttcttcgtctgagaatctcgagggttatgataatagatcttgatgctcatcaagggaatggccatgaaacagatctcggcgatgacattttgtccatgcttgcttttgaagttagatgtatcttcttacaggattatagagctaggagatttatcgatcagaaagttgaggtcatgagcgggacgaccaccgatgagtatttgaggaaactagatgaagcccttgaggttgcttcgcgaaacttccaaccggagttggtaatttacaatgctggcacagacatattagatggtgaccctctgggacttctaaagataagccccgatggcataacaagtagagacgagaaagtcttcagatttgcaagggagaaaaatattcctcttgtgatgctaacctcaggcgggtacatgaagtcaagcgctagagttattgcggattccattgagaatctctcacggcaagggttgatccagacacgaccggaataa

SEQ ID NO: 1883 - DNA, 1134 bp, Arabidopsis thaliana
  Clone ID: AT_T27G7.C1.o7.tg
atggttaccaatcgcgtagacgtcttctggcacgaaggaatgctccgacacgacgccgtagaaggcgtcttcgacactggatacgaccctggattcctcgacgtattggagaagcacccggagaacgccgatcgcgtcaggaacatgctttcgattctccgacgcggtcccatcgctcctcatgtcaattggtttaccggtcttccagcaatcgtttcggagcttctaatgtttcacacttcagagtacattgagaagctagtggaggcagataaatcaggagaaaggtgtgaaattgccgcaggtactttcatgagcccaggctcgtgggaagctgctcttcttgcagctggaacaactctttcagcaatgcaacatattcttgattgccatgggaaaattgcatatgctctggtacgcccaccaggtcaccactcacagcctactcaggctgatgggtattgcttcctcaacaacgctgctcttgctgtcaagctggcattgaattcgggttcttgttcccgagttgcggttattgacatcgatgtacattatggaaatggcacagctgaagggttttatacatctgataaggttcttacggtgtcactccatatgaaccatggatcatggggatcgtcccacccgcagaaagggtcgattgatgaacttggtgaagacgtgggattgggttacaatctgaatgtccctttaccgaatggcacgggtgaccggggatatgaatatgccatgaatgagctggtggttcctgcagttagaaggtttggacccgatatggttgttctcgttgttggtcaagactctagcgcttttgatccaaacgggagacaaagcctgacaatgaatggatacagaaggattgggcagataatgaggggagttgcagaggagcacagccatggaaggttgcttatggtgcaagaaggcgggtatcatgtaacatatgcagcttactgcctccacgccatgctcgaaggggtgctgaagattccagaaccgcatctatctgatccgatcgcttattatcccgaagaagaagctaatgctgttgctgctgtggagtcaatcaaaacatatcacaccgaatttgttccatttctcagaggaacttga

SEQ ID NO: 1884 - DNA, 1080 bp, Arabidopsis thaliana
  Clone ID: AT_F17M5.C1.o230.tg
atgctcgtctcatatacagtgtatctgcagcattgggaatcacatccagaatgcagcgctagagttcctgccattgttaatgctctcgagatgaatgagctcactcctaagttccgtggctcacagattcttgaactcgcaaatttcaagactgcaactgtagaagacattgcaaatgttcacgacaaggcttatgtctttggcctagaaaaggcaatggatgaggcttcagattcgggactaattttcattgaaggctctggaccaacatatgccacttcaacggtaactgctttgtgctcatccgcaggagccggaatggctttagttgattcagtggtgatgtctcgtctcaccataaacagcgtagatccacccattggttttgcattgataagacctcctgggcaccacgccgtgccaaaaggtccgatggggttctgtgtttttggtaatgtggcaatcgcagctcgtcatgcccaacgcacacatggtctgaagcgcatcttcataattgacttcgatgttcaccacgggaatggcacaaatgatgcatttactgaggaccctgatatattctttttgtcaactcatcaggacggaagctaccctggaacagggaaaatcagtgacataggtaaaggaaaaggtgaaggtaccactctaaatttacctttgcctggaggttcaggtgatattgcaatgagaaccgtttttgaagaaatcattgttccatgtgctcaacggttcaagccagatattattcttgtttctgctgggtatgatgctcatgtcctggatccactagcaaatttacagttcacgaccgcaacatactactcattggcaaaagatataaagcggttagcaaaagaagtatgcggagggcggtgtgtgtttttcttggaaggaggatacaatcttgaatcactttcatcatctgtggcagactcgtttcgagcattgcttggagaagatagcttggcatcagagtttgataacccagcttacttgtacgatgaaccaatgagaaaggtgcgagatgcaattcagagagccaaaagcattcattgcttataa

SEQ ID NO: 1885 - DNA, 429 bp, Arabidopsis thaliana
  Clone ID: AT_T18B22.C1.o60.tg
atggctttctctatgcttttcacaggacatgctgaatgtggaggatacacaaaggagaatgtagctcgttgttggaccgttgagactggcattcttttggatacagaacttcctaatgagattcctgaaaacgactacataaagtattttgcgccggatttttctttgaagataccgggtggtcacattgagaatcttaataccaaatcgtacatcagttcgatcaaagtgcagattttggagaatttgcgatacattcaacacgctccaagcgtacagatgcaggaggttccaccggatttctacataccggattttgatgaagacgaacaaaacccggatgtacgtgtggatcagcgttcacgggataagcagatccaaagggatgatgaatatttcgatggagacaacgataacgatgcgtcgtaa

SEQ ID NO: 1886 - DNA, 477 bp, Arabidopsis thaliana
  Clone ID: AT_F14L2.C1.o40.tg
atggctttctctatgcttttcacaggacatgctgaatgtgttaaattcgtgaagaagttcaatcttcccttactggttacaggaggtggaggatacacaaaggagaatgtagctcgttgttggaccgttgagactggcattcttttggatacagaacttcctaatgagatttctgaaaacgactacataaagtattttgcgccggatttttctttgaagataccgggtggtcacattgagaatcttaataccaaatcatacatcagttccatcaaagtgcagattttggagaatttgcgatacattcaacacgctccaagcgtacagatgcaggaggttccaccggatttctacataccggattttgatgaagacgaacaaaatccggatgtacgtgtggatcagcgttcacgggataagcagatccagagggatgatgaatatttcgatggagacaacgataacgatgcatcgtaa

SEQ ID NO: 1887 - DNA, 1260 bp, Arabidopsis thaliana
  Clone ID: AT_T18B22.C1.o80.tg
atgctgaatgtttttttttgggttgcaggggatgtggggagtgtctattttggtccgaatcacccgatgaaacctcacaggctttgtatgacccatcatcttatccttgcatatggcctgcatagcaagatggaagtttatcgtccacacaaagcatatcctatcgagatggctcagttccattctcctgactatgtagagttcctgcaacgaattaatccagaaaaccagaacttgttccccaatgaaatggctagatataatctgggagaggattgtcctgtctttgaagatttgtttgaattttgtcaactttacgccggcggaaccatagatgctgcacgcaggttaaacaacaaactctgtgacattgctataaattgggcgggcgggttgcaccatgccaaaaaatgtgatgcatctgggttttgctacatcaacgatctcgtgctaggaattcttgagttgttaaaacaccatccccgtgttctatacatagatatagatgttcatcatggtgatggggttgaagaagcgttttacttcactgacagagtaatgactgttagctttcataagtttggggataagttctttccagggacaggcgatgttaaggaaataggagaaagagaagggaaattttacgccattaatgtgccgctgaaggatggtatcgatgacagtagtttcaaccgtcttttcaggactgttgttgagatatatcaaccgggtgcaattgttcttcaatgcggggcagattcactagccagggatcgactaggatgctttaatctctctattgatggacatgctgaatgtgttaaattcgtgaagaagttcaatcttcccttactggttacaggaggtggaggatacacaaaggagaatgtagctcgttgttggaccgttgagactggcattcttttggacacagaacttcctaatgagattcctgaaaacgactacataaagtattttgcgccggatttttctttgaagataccgggtggtcacattgagaatcttaataccaaatcgtacatcagttccatcaaagtgcagattttggagaatttgcgatacattcaacacgctccaagcgtacaaatgcaggaggttccaccggatttctacataccggattttgatgaagacgaacaaaacccggatgtacgtgcggatcagcgttcacgggataagcagatccagagggatgatgaatatttcgatggagacaacgataacgatgcgtcataa

SEQ ID NO: 1888 - DNA, 399 bp, Arabidopsis thaliana
  Clone ID: AT_T22P11.C1.o160.tg
atggcgccgaaggcagagaagaaaccggcggagaaagcaccagcaccaaaggcggagaagaagatcgcgaaagaaggaggaacgagcgagattgtcaagaagaagaagaagacgaagaagagcacagagacgtacaagatctacattttcaaggtattgaaacaggttcatccagatattggaatctctggtaaagcgatgggaatcatgaacagtttcatcaacgacattttcgagaaactcgctcaggaatcgtctcgtctcgctcgttacaataagaaaccgacgatcacgtctcgtgaaatccaaaccgccgtgagacttgttctgcctggtgaattggctaagcatgccgtctctgaaggaaccaaagctgtcaccaaattcacaagctcttaa

SEQ ID NO: 1889 - DNA, 411 bp, Arabidopsis thaliana
  Clone ID: AT_F13B4.C1.o3.tg
atggctcgtacgaagcaatccgcgagaaaatcacacggaggaaaagctccgacgaagcagctcgctaccaaggcggcaaggaaatctgcaccgactaccggaggagtcaagaaacctcaccgtttccgtcctggaaccgtcgctcttcgtgagattcgtaaataccaaaagagcacagagttgttgaaccgtaaacttccattccaacgtcttgttcgtgaaatcgctcaagatttcaagacggatctgagattccaaagccatgcagtgttagctcttcaagaagctgcggaggcatatttggttggtttgtttgaagacacaaatctctgtgccattcatgcaaagagggttaccattatgcctaaagatgttcaattggcaagaaggattcgtgcagagcgtgcttag

SEQ ID NO: 1890 - DNA, 414 bp, Arabidopsis thaliana
  Clone ID: AT_F6F9.C1.o5.tg
atggcacgtacgaagcaaactgcgaggaaatctactggtggaaaaggtccaaggaaggaactcgctaccaaggcggcgaggaaaactagacgaccgtaccgtggtggagtcaagagggctcaccgtttccgtcctggaaccgtcgctcttcgtgagatccgcaaataccagaagagtaccgacttgttgatccgcaaattgcctttccaacgacttgttcgtgaaatcgcccaagattttaaggtggatttaaggttccaaagccatgcggtgctcgcacttcaagaggcagccgaagcatacttggtggggttgttcgaagacacgaatttgtgtgcgattcacgccaaaagggttacgatcatgtccaaggacattcagttggccagacgcattcgtggggaacgtgcttga

SEQ ID NO: 1891 - DNA, 1437 bp, Arabidopsis thaliana
  Clone ID: AT_F16A16.C1.o90.tg
atgcaatttgatgagtctgatgctagggtttggatttggtttgaaattaggcgtgaagatgatatagtggagcttttatggcaaagcggccaagtagttggaaccaaccaaacacatagacaatcctacgatcctcctcccattctccgcggcagcggaagtggcagaggagaagaaaatgctcccctttcacaacctccgcctcacctgcatcagcaaaatctcttcattcaagaaggcgaaatgtattcgtggctacaccattcttaccgccaaaactatttctgctcagaacttctcaactccactccggctactcacccgcaaagttccatctctctggcaccacgtcagactatcgccacgagaagggcggaaaactttatgaacttctcgtggctaagagggaacatatttaccggcggtagagttgatgaagctggaccgtcgttttcggtggtaagagaatcgatgcaggtaggctcgaacacgacccccccttcttcttctgccactgaatcatgtgtaataccagctacagagggcaccgcgagtcgagtgtcgggaactttggcagctcatgatcttggtcggaagggaaaggcggtggcggttgaggcggccggaacaccatcttcaggagtgtgcaaggccgaaacagagccggttcagatacaaccagcaacggagtcgaagctaaaagcgagagaagaaacccatggaactgaagaagctcgtggttcaacgtctagaaagagatcacgaactgcagaaatgcataacctcgccgaaaggagaaggagagaaaagatcaacgagaagatgaagactctgcaacaactcattcctcgctgcaacaaggttgaatctgattctgtttctactctgatcagtctactaaagtttcaacgctggatgatgctatcgagtacgtcaaatcgttacagagccaaatacaagtatgctcttcaaaacagaatgtgttttaaaccaatggttcaacatggaaagagttcatatgtatctagttttgttgagatgatgtcgacgggacagggtatgatgtcgccaatgatgaatgccgggaatacgcaacagttcatgccccatatggccatggatatgaaccgacctcctccattcatacctttccccggcacatcttttcctatgccggctcaaatggcaggtgtaggtccatcatatccagcaccgcgctacccttttcccaacattcagacctttgacccatccagagtccgtttaccaagcccgcagcctaacccggtgtcgaaccagcctcagtttccggcttacatgaatccctatagccagtttgctggtccccaccagttgcaacaacctcctcctcctccatttcaggtaactctttaccatggtatccattgtgttgttgcaggtaatccttatgtatga

SEQ ID NO: 1892 - DNA, 303 bp, Arabidopsis thaliana
  Clone ID: AT_T12C24.C1.o6.tg
atgacattaagcgaaatcatgaaaggagacgatgagccgaagaacaagagagctaaacataaagagcttgagagacaaagaaggcaagaaaacacatctctattcaagattctaagatatttattgccatctcaatacataaagggtaaacgttcctcggcagatcacgttctagaagcagtgaattacatcaaagacttacagaagaagatcaaagaggtcgaggagggaatagaggtttatttctcagagcttcaagaaaagataatcaaaattggaacctcaagagtcactactcgctag

SEQ ID NO: 1893 - DNA, 891 bp, Arabidopsis thaliana
  Clone ID: AT_C17L7.C1.o90.tg
tgacggaagagtttgagatcgcaggaatctccaccggagcttggtggagctcgccaacaaacaccgccgcagtattctctggctactcgctgccatgttccactgagattagccctgatgtcacaaatttcggatggcaaaacttcgataacaagattaacgatcataatgatggttgtatgaacatgcataatagtttcttcgaaggactattaatcgatcctaacgatcaattactaccggatccatggtccaaaagtacaattcctaacgctaaatctgagctccttgaaaacttcccattcttagataacatgttcttggtcgattcagaagctgaatctttgttggatcatgaaatcagaaaccataagtcgtctaaggagcaaattacacaagactacaagaatcttacttcaaaggcacgattagaagagaacagcgatgagtattcaccgcgattactaaaaagaccgagactcgagacactatctccattgccaagcttcaaagttcgtaaagaaaaactcggagatagaatcactgcgcttcagcaactggtttctccatttggcaaggcagatacagcttctgttctcaacgaagctgtagagtacataaagtttcttcaagaacaagtcactgtattgagtaatccagaacagaacaccataggatctgttcaacaacagcagggttcaaacaagaaatctatcaatactcaaggagaagtagaagaagacgaatgtagtccaagaagatatgtagatctttcgagccgtggactatgtctaatgccgatctcagcttcatatcccgtggctgcagctgcggcttcggctgcagagatgaacgtacatctggtttctggcatcttccattctttgtaaa

SEQ ID NO: 1894 - DNA, 723 bp, Arabidopsis thaliana
  Clone ID: AT_F1P2.C1.o190.tg
atggtatcgaaaactccttctacatcgtctgatgaagcaaatgctactgcagatgaaagatgtagaaaaggtaaagtaccgaaaaggatcaacaaggccgttcgtgagaggcttaagcgtgagcatttgaatgagcttttcattgaattagccgatactcttgaactgaatcaacagaacagtgggaaagcttctatactatgcgaagctactcgattcttgaaggacgtgtttggtcaaattgagtctcttagaaaggagcatgcttctctcctatctgaatctagctatgtaaccacagagaagaatgagctcaaggaagaaacatcagtgcttgagactgagatttcgaaactacaaaacgagattgaagctagagcgaatcagtcgaaacctgacttgaacacctctcctgcacccgagtaccatcatcatcattatcaacaacaacatcctgaacgtgtatctcagttcccaggacttcccattttccaaggccccggctttcaacaatctgctacaactcttcatcctcctgcaacagttcttgtccttccaatacaacctgatccccagacacaagatatctcagaaatgactcaagcgcagcagcctttgatgtttaatagctcaaatgtgagtaagccatgtccaaggtatgctagcgcggctgactcgtggtcttctcggctacttggagagcggctgaaagccagtgaatga

SEQ ID NO: 1895 - DNA, 795 bp, Arabidopsis thaliana
  Clone ID: AT_T5I8.C1.o12.tg
atgattatccctgaaactgacagtttcttcttccaagagcaaccgcaacatcagccattgtatcccgacgaagctctttcaccgtctctcttcgggtttgatcactatgatcatttctacgagtcgtttcttccatctcaagaaatcttccttcctagccctaagacccgagtcttcaacgagtcacaggaattagattccttccacacgccaaaacaccagaaactcattgactccagcttccatttcaacagtcacgaccctttttcccctagccctgaatctaattacctcttggattcttacatcacagaagcttccaacatttccaagtttcaagctcctgatttctcatcgacgttcaaggttgggtggactgaacaaggcgacaccaagaagcgagagctatctgctcagagcatcgcagcacgaaagaggagaagaagaatcacagagaagactcaagagctgggaaaactaatccctggaagccagaaacacaacactgccgaaatgttcaatgccgcagctaaatatgtcaagttcttgcaggctcaaattgagattctccaactgaagcagaccaaaatgcagactctggatagttcaaaggtgggaagagaaatgcagtttttgcttggttctcaagaaatccaggagaagctatctacagaagaagtgtgtgtggttccaagggaaatggttcaagtcctaaaagccgaagaatgcatcttgacaaaccctaagatttctcgagacattaacaaattgttgtcaacaaatctgatgaattag

SEQ ID NO: 1896 - DNA, 1143 bp, Arabidopsis thaliana
  Clone ID: AT_T13M11.C1.o21.tg
atggcggaggagtttaaagctacggcatcgatttgtggtggcggaggtggcgcgtggtggaactcgccaaggagcgttatgtctccttcggatcatttcttgtcaccatgcttcggagcggctatcacttccaatgattttagctcgcaagagaatcatctcaaatctaggatgacttgtacggacaacaacaacatcgttttcgggcagcgagaggcggattctgacagtggaggaagtaccgtgacgatggactcgacgttgcagatgatgggtctaggacaagaagacttaaactcaagcttcataaggagctcacaagatcaagatcatggccaaggattcttatccacaactacttcaccttatatacttaatccagcttgttcttcatctccatcaacttcttcgtcctcaagcttgatacgaaccttttacgatcccgaaccaagtccatacaactttgtctccaccacaagtggttcaatcaacgatcctcaactttcttgggctaataagacaaatcctcatcatcaagtagcttatggactaattaacagcttctctaacaacgcaaactctcgacccttttggaattcttcatcaaccactaacttaaacaacacgacgccgagcaattttgtaaccactccgcagataatatctactcgtttggaggacaaaaccaagaagaatctgaagacaagagctcagagtgagtctttgaagagagcaaaggataatgaatctgcggcgaagaaaccgagagtcaccacgccttcaccgttgccaactttcaaggtgagaaaagagaatctaagggaccagataacttcattacaacaactagtttcacctttcggaaagacagatactgcatctgttctccaagaagctatagagtacatcaagttccttcacgaccaagtcactgttctaagcactccatacatgaaacaaggtgcctcgaaccaacaacaacagcagatatctggtaaatcgaagagtcaagatgaaaatgagaatcacgaactaagaggacatggtctatgtctcgtcccaatatcaagcacgtttccggtggctaacgaaacaacagccgatttttggacaccaacgtttgggggcaacaatttcaggtga

SEQ ID NO: 1897 - DNA, 801 bp, Arabidopsis thaliana
  Clone ID: AT_F19I3.C1.o5.tg
atggatatgattatccctgaaaccgatagtttcttcttccaatctcaaccgcaactggagtttcatcagccattgtttcaagaagaagctccttcacagacccactttgaccctttctgcgaccagtttctttctccgcaagaaatctttctccctaaccctaaaaacgaaatcttcaacgaaacacacgacctcgatttctttctccccacgccaaaacgccagagacttgttaactccagctacaattgtaacactcaaaaccatttccagagccgtaacccgaatttcttcgaccctttcggcgacactgatttcgttccagaatcttgtaccttccaggagtttcgagttccggatttctctttagctttcaaggtaggccggggagatcaagatgactcaaagaaaccgacgctttcatctcagagcatcgcggctagagggaggagaagaagaattgcagagaagactcacgagctcggaaaactcatccccggtggcaataaacttaacaccgccgagatgttccaagccgccgctaagtatgtcaagtttttgcagagtcaagttgggattctccaactgatgcagaccacaaagaagggtagctctaatgtgcaaatggaaactcagtatttgcttgaatcgcaagcaatccaggagaagttatcaacagaggaagtgtgtttggtaccgtgtgaaatggttcaagatctaacaactgaagaaaccatttgcagaaccccgaatatttctcgagaaatcaacaagttactgtctaaacatctggctaactag

SEQ ID NO: 1898 - DNA, 282 bp, Arabidopsis thaliana
  Clone ID: AT_F1M20.C1.o18.tg
atgtcgggaagaagatcacgttcgaggcaatcatcaggaacttcaaggatctcagaagatcaaatcaatgatctgattatcaagttgcaacagcttcttcctgagctcagggacagtcgtcgttccgacaaggtttcagcagcgagggtgttacaagatacgtgcaactacatacggaatctgcatagagaggttgatgatctaagtgagaggctatctgagttactagcaaactcagacactgcacaagctgctttaatcagaagcttacttacccaataa

SEQ ID NO: 1899 - DNA, 1365 bp, Arabidopsis thaliana
  Clone ID: AT_F3H11.C1.o2.tg
atgggagatcatcatgatttcatcaactcaggaagctggtggaaagtatcttcttcttcttcaccatcttcttcttcttccatgagagcaagctctattgaatctggtggttctgctgttttccatgataagcttcatcatcattctttagctactgatcaccatcttcagatgattggtttaggactttcttcacaatcacctgttgatcaatggaaccaatctctcttacgaggagatagtaaagcggagacaagctttggtgtgatgcttcaagagaatctcaatttagatgccacttcaaacgcaaacgctaacacaacgtcatccacatcttcttaccagctgcaagaatctgattcctctcaccatcatcaagctttgtggcgagatccacaaagcgatttcaaaccgcagattttaacgagtggtggtaatcgcgggtttttcttagatcatcagttcagtcctcatggtagctcaagtaccgacagtagcacagtaacatgtcaaggtttcgctgttgacaactcgtcaaacgccatgtacgcagcaacaacaacaactcctaattcatcttccggtatgtttcatcatcagcaagcaggtggttttggctcttctgatcaacaaccgtcgaggaatcatcaacagtcatctcttggctattctcagtttggatcatccaccggaaactatgatcaaatggcgtcagcgttaccatcgacttggtttttaagatcttctccgccgccaaaaccacacagtcctttgagattctctaataacgcaacgttttggaaccccgcggctgcgggaaacgccggtgctcctcctcctcatgacgcgtcttctaactttttcccggcgttacaaccgccgcagattcatccgcagagttttgacgaacaaccaaagaatatatcggagattagagattcaagtagcaacgaagtaaagagaggaggaaacgatcatcagccggcggcgaaaagagctaagagcgaagcagcgtctccgtcaccagctttcaagaggaaagagaaaatgggggacagaatcgctgcgctccaacaattggtttcacctttcggaaagactgatgcagcctcagtgctctctgaagccattgaatacattaagttcttacaccaacaagtttctgctctgagcaacccatacatgaaaagtggagcttctttacaacatcaacagagtgatcattccacagagctagaagtatcagaagaaccagatcttagaagtcgaggtttatgcttagtgccagtttcaagcacatttccagtgacacacgatactacagtagatttctggactcctacatttggtgggacttttagatag

SEQ ID NO: 1900 - DNA, 759 bp, Arabidopsis thaliana
  Clone ID: AT_MZN24.C1.o29.tg
atggagacaccagcttacgatttcgactcactcactgacttaccaccgcttcctccttccgatttcactccttccaacgccttcaccttccccgaccacaacctcgacttttccttcctcgactccactctgtctctcctcaatcggcaccatctctctgagtccactcgcttggaacagattttttacgactccactcacactcagctctttcacaacgacgacaccaccaccaccaccacaccgtttctccaccttcctgatctcaaatccatcgacgccgttgaagaaccgacgacgatgaagctgtttccatctctctctcctcctcttcccgccgccaaacgtcagaagcttaactcaacttcctcttcaacaacctctggatctccaactgcgtcaaacgacggtggtattattaccaaacgacggaagatctcagacaaaatcagatccctggagaaactcatgccgtgggagagaaagatgaacttagcgatgactctagaagaatctcacaaatacatcaagtttcttcaatctcagattgcttcactccgttggatgcctctcgaatctgtctacaacaccgccggtgaagtaggagaaacagatttgctcaaatctctgacacgtcaacagattcttcaggttcttgcgaattctccaggctcacgaaacgtactctcctctcgtggtgtttgtgtcttctcttatgaacagcttctctctctcaagacaatgtcgagaaacctctga

SEQ ID NO: 1901 - DNA, 504 bp, Arabidopsis thaliana
  Clone ID: AT_T13K14.C1.o130.tg
atggagccgagccattcaaacacaggtcaatcaagatctgtagatcgcaaaacggttgagaaaaatagaaggatgcaaatgaagtctctctactcagaactcatctctcttcttcctcatcattcttctacggagcctttaacactacctgatcagctagatgaagctgcaaactacatcaagaagctacaagtgaacgtggagaaaaagagagaaaggaaaaggaacctcgttgcgactacaactttggagaaactgaattccgtcggatcttcatcggtttcgtcgagcgtcgatgtctccgtgccaagaaagctgccaaaaatcgagattcaagaaactggttccatttttcacatctttcttgtgacaagcttggaacacaagtttatgttttgtgagatcattcgtgttctcaccgaggaattaggagctgagatcactcatgctggatactccattgttgatgatgctgtcttccacacccttcactgcaaggtataa

SEQ ID NO: 1902 - DNA, 840 bp, Arabidopsis thaliana
  Clone ID: AT_T1P2.C1.o2.tg
atgtgcattgttggaaacaagaagggaaaccgatcattgaaggaaataggaacttttatgatgactacatgtttcattgctaattaccaatccgttcaagtttgccagaacaatcagtttcctcacttctcagatgaagtgggtgacagaaatatgcacaacccgtatgcatcagggtcatcctatgatgctttgttcccaccatgtgcaaagttgccataccatggtgttgaacttcaaccgtctgcggtctgtccaaagaactttgtcatcttcgatcaaacatatgaccgcagccaactgactcataagctcatgaataccccttcgttgaacaatttagcttcgacgtttcagaacgagtatgttgggggaagttatggtaactatggtaactatgagcaagaagtatcctcttcttatcaagaagatccaaatgagatcgatgctctcttgagcgcagatgaagattatgaagagaatgatgataatgaaggtgaagaggatggtggtgattcagaagaagtcagcactgctcgtacttcttccagggattatggaaacaccacagcagaatcttgttgttccagttatggttacaacaacaacaacaacaacaactcaaggaagcagagtttatcgggcagtgctagtagtagtaacaatgatgggaaaggacgtaaaaagatgaagaagatgatgggagtattgaggagaattgtccctggaggagaacagatgaatacagcttgcgttcttgatgaagctgttcagtatctcaagtcacttaaaatcgaagctcagaaacttggcgttggacatttctcaaaccaatcttga

SEQ ID NO: 1903 - DNA, 1362 bp, Arabidopsis thaliana
  Clone ID: AT_T22C5.C1.o11.tg
atggactctgctaatctccatcagcttcaagatcaattacagcttgtggggtcttcttcatcttcttcttccttagacaataactctgacccttcttgctatggagcttcatctgcccatcaatggagcccaggaggtatttctttgaatagtgtgagcttgagtcataattataacaatgagatgttaaacacaagagctcacaacaacaacaacaacaacaacacaagtgaatgtatgagtctctccagcatccacaatcactccttgatccaacaacaagactttcctttacaatggcctcatgaccaatcttcatatcaacatcatgaaggacttctcaagatcaaagaagagctttcctcatcaactatctcagaccatcaagaaggcatatccaagttcacagacatgttaaatagtccagtgataacaaactatttgaagatcaatgaacataaggactacactgagaagcttcttctcaagagtatgtcttctggattcccgatcaatggagactatggtagcagccttccctcttcttcttcttcctcttcaccttcgtctcagtcgcatagaggcaacttcagtcagatttacccaagcgtaaacatatcgagtttgagcgaatctcggaagatgagcatggacgacatgagtaacatctcaagaccatttgatataaacatgcaggtttttgatggaagattgtttgaaggaaatgtattagttcctccttttaacgctcaagagattagtagtcttgggatgagcagaggaagccttccttcttttggcctcccttttcatcatcatctgcagcaaacacttccccacctttcttcttcccctactcatcaaatggaaatgttcagcaatgaacctcaaacaagtgaagggaagaggcataacttcttgatggcaacaaaagcaggagaaaatgcttccaagaaaccgcgcgtggaatcacgctcctcttgcccacccttcaaggtgaggaaagaaaagttaggagacagaatagcagctctgcagcagttggtttcaccctttgggaagacagatacagcatctgtgttaatggaagcaattggatacatcaaattcctacagagccagatcgagactttaagcgtcccctacatgagagcatctaggaaccgacccggaaaagcctcccagctggtctcacaatcacaagaaggggatgaggaagagacgagagatcttagaagccgtgggctatgtctagtgccgttatcatgcatgacttatgttaccggagatggtggggatggaggaggcggtgttggtactggtttttggccaacgccacctggttttggtggcggaacttag

SEQ ID NO: 1904 - DNA, 768 bp, Arabidopsis thaliana
  Clone ID: AT_F23N20.C1.o19.tg
atgtcttctcaaccgaatcatcagacttcaatatcaagtttactccatgatcgcttgcatatccctcctgcagaaacaatcgttgagaaagagtctgcagagaaggacacttgtcaatcacaaagaaaaaggaaagaaccagttttgcatgaggttgatggctcaagtagtggtgcagcaaagaaacaagaccataacgctaaggagcgtttaaggaggatgagacttcatgcctcttacctcactcttggcactcttcttcctgaccattcttcttcttcttcaaaggttttgttttcactgttattattacaagttaggtatgttctgcttgttgttgagctatatataacttttcttgctgattggcagaagaaatggtctgcaccatctataatcgataatgtaatcacttacattcccaagctacagaatgaagttggagagctaactctaagaaagcagaagcttgtggagttagagagacgaggtccttctattcgagcaatctcggttcttgaattgggggaatcaggttatgaggctgttgtacagatatgcttgaagaaagaaaacgaagatgagttctccaacttgcttcatgtaatggaggtgcaaggtttgagtgttttaagtgcttctacttctcaagtttgccgagagcaaagggtggtttgctacaacttccatgtcaaggtactgtgtctcatcttatcttcttcatttctctttagtttatgttttgatagaatggagacaatgtgctag

SEQ ID NO: 1905 - DNA, 666 bp, Arabidopsis thaliana
  Clone ID: AT_T30C3.C1.o80.tg
atggatccttataagaatcttaatccaaaaggttaccagagacagagaccgtttagctcagccggcgagagtggcggcagcggcggctccggtacggcccatgaaacagatgacaataagaagaagaagaagcttctccaccgcgacatcgaacgccaaagaagacaagaaatggctacactctttgctactcttcgtactcacttacctcttaaatacatcaagggaaaaagagctgtgtcggatcatgtaaatggagcggtaaatttcattaaggacacggaagcacggattaaagaacttagtgcaagaagagacgagttaagtagagaaaccggccaaggatataaatcgaatccggatccaggaaaaactggatccgatgtaggcaaatcggagccggcgactgtgatggtgcaaccacacgtgagcggtttagaagtggtagtgagcagcaactcctcaggccccgaagctttgccactatcaaaagtgctcgagacaattcaggagaaagggcttgaagtcatgagctccttcactacaagagtcaatgataggctcatgcacactattcaagtagaggttaatagtttcggatgcatagacttattatggttgcagcagaagctagttgaggatttgatactttcgacggggtactaa

SEQ ID NO: 1906 - DNA, 960 bp, Arabidopsis thaliana
  Clone ID: AT_F17F8.C1.o3.tg
atggatcatcatcatcacatagcatcaagaaattcatcaacaacatcagaattaccatcattcgagccagcgtgccataacggtaatggtaacggttggatctatgacccaaatcaagttaggtacgatcaaagtagtgaccaacggctgtcaaagttgacggatcttgtaggcaagcactggtcaattgcaccaccgaataatcccgacatgaaccataaccttcatcatcacttcgatcatgatcattctcaaaacgacgacatttctatgtacagacaagccttggaggtgaaaaatgaggaagatctttgttacaataatggctcaagtggtggtggttccttgttccatgatcctatagaaagttctagaagtttccttgatataaggttaagtaggccattaacggatattaatccgtcatttaagccatgctttaaggccttaaacgtatccgagtttaacaagaaagaacatcaaacggcatctctggcagcagtgagactgggaacaacaaacgctggaaaaaagaagagatgtgaagaaatttccgatgaggtttcaaagaaggccaagtgcagtgagggctctacactttcgccagagaaggaactacccaaagccaaacttcgagacaagatcacgactctacagcaaattgtgtctccctttggaaagactgatactgcttctgtgcttcaagaggccatcacttacataaatttttatcaagagcaagttaagctgctaagcactccttatatgaagaattcatcaatgaaggatccatgggggggatgggacagagaagatcacaacaaaaggggaccgaagcatcttgatctaaggagtagagggctttgtttggttcctatttcatataccccaatcgcataccgcgataacagtgcaactgactactggaatcccacgtatagaggttctttgtatcgttag

SEQ ID NO: 1907 - DNA, 666 bp, Arabidopsis thaliana
  Clone ID: AT_F5E6.C1.o8.tg
atggcgtctctgatctcagatattgaaccgccgacgagtactacttcagatctcgttcggagaaagaagagatcctctgcttcatccgccgcatcgtctcgttcaagcgcatcttccgtctccggtgagattcacgcgcgatggcgatcggagaagcaacaacggatctactcagccaaactgttccaagcgctccaacaagtccgcctcaactcttccgcctcaacatcatcatctccaacggctcagaaacgaggaaaggccgtccgtgaagccgccgatcgagctcttgccgtttccgctcggggaagaacactctggagcagagcgatcttagctaatcggatcaaactgaaatttcgtaaacagagacgtcctcgagctacgatggcgattccggccatgactacggtggttagtagcagcagcaacagatcgagaaaacggagagtgtcggtgttgagattgaataagaagagtataccggatgttaaccggaaagtacgtgttctaggccggttagttcccggttgcggtaaacaatccgtaccggtgattctagaagaagcaactgattatattcaggctctggagatgcaagtgagagccatgaactctttagttcagcttctctcctcctacggctcagctcctccaccgatttga

SEQ ID NO: 1908 - DNA, 396 bp, Arabidopsis thaliana
  Clone ID: AT_F4F7.C1.o16.tg
atgaacaaggacgaagtatttcttcggcaatggtttgagatactatactcgctcactaatccagaggcgaatagtgacttgcgtaggatcaacaacgaaaaaggtgtagagaaagtagggcaaaagaggtcagctgagtcgaggagagaaggaaagaagaagcgagttaagacacagtgcgtgattaaatcttcagacaaatctgatcatgataccttgttgaagaagaaacggcgggaacgtataagaaggcaactagaaacacttaaggaaattacacccaactgcccacagtctgatatcaacgccatccttgattgcgttatcgagtacacgaacaacttgcgccttgcagttcttttcggagcattacaagggttcgcagggaatatgtga

SEQ ID NO: 1909 - DNA, 813 bp, Arabidopsis thaliana
  Clone ID: AT_MLD14.C1.o22.tg
atgggagataccgcagaggatcaggacgaccgagctatgatggaagctgaaggagtaacgagcttctccgaacttcttatgttctctgacggcgttctcagctcctcttccgaccaccaacctgagggtaatgtcggcgatggtggagaagacagtttaggttttgtattctccggcaaaactggctcaagaatgctctgttttagtggaggctatcaaaacgacgacgagtcactcttcctagaaccttctgttccaacctccggagtctctgatcttgacccttcatgcattaagattgattgcaggaactcaaacgacgcgtgtacggtcgataaatctactaaatcatcaaccaagaagagaaccggaacgggtaatgggcaagagtcggatcaaaatcgaaaaccgggcaagaaagggaaacgaaatcaagagaaatcatcagttggaattgcaaaggtcaggaaagaaaggttaggggaaagaattgcagcgttgcagcagttggtttctccatacggcaagacagatgcagcttctgtgttgcatgaagcgatgggttacatcaaattcttacaagatcagattcaagtcctttgctctccttatctaatcaaccattctctcgacggtggagttgtcaccggagatgtaatggcggcgatgaaagcgaaagacttgagaagcagaggattatgtctagtacctgtctcatccaccgtacacgtggaaaattccaacggtgctgatttctggtcacctgctactatgggtcacactacgtcaccgtcgttacctcaaggattttaa

SEQ ID NO: 1910 - DNA, 1224 bp, Arabidopsis thaliana
  Clone ID: AT_F19B15.C1.o130.tg
atgaatagaggtgtgttggagagttcgccggttcagcagctgatggcagccggaaaccctaattggtggaacgtaagcggcggcatgaggccaccaccaccgttgatgggtcatcagcaggcgccgttgccaccacatatgactcctaataacaattatctccgaccacggatgatgcccactcccttcccgcacttcttgccatctccggcgacttcttcttcttcctcttcttcttcaccgtctttgcctaataaccctaatctctcttcttggcttgaaagcaatgatctccctcctgagtcttggagccttagccaacttcttttgggtggattgatgatgggagaggaagagagattggagatgatgaaccatcataatcatcatgatgaacaacaacaccatggttttcaagggaagataagattggagaattgggaagaacaagtgttaagccaccaacaagcttccatggtggctgttgacatcaaacaagagggtaacattaacaacaacaatggctatgtcatatcttccccgaactcacctcctaacaaatcttgtgttacaacaactaccacaacaagcctcaatagtaacgacgataacatcaacaacaataataatatgttggatttctctagcaatcacaatggtcttcacttgtcagaagggagacacactcctccggatcgatcctctgagtgtaacagcttagagattggtgggtctactaataagaagccaaggctccaaccttctccttcgtcacaatcaaccctcaaggtgagaaaggagaaactaggaggccgaatcgcagcgcttcatcagctagtatctccatttggaaagactgacacagcctctgtcctgtcggaagctattggatacattagattccttcagagtcaaattgaggctctgagtcatccatactttggtacgactgcctcggggaatatgaggcaccaacaacatttgcaaggagataggagttgcatatttcctgaggaccctggtcagctcgtgaacgatcagtgcatgaagagaagaggagcttcgtcgtcatctacggacaatcaaaatgcaagtgaagagcctaagaaagatctgagaagtcgaggtttatgtcttgtcccaatctcatgcacactccaagtaggcagcgacaacggcgcggactattgggctccagcacttggctccgccggtttccattga

SEQ ID NO: 1911 - DNA, 2172 bp, Arabidopsis thaliana
  Clone ID: AT_F16D14.C1.o12.tg
atgggtaagaggcaaatatcacaagatgaagtaggtccgcccataaaaccaagagctggtttacgaagggaacaagctggaagaggttcttacagagagatactgaagagcttttgctttaacacggactgggactatgctgtgttctggcaacttaatcatcgaggatctcgaatggtacttaccttggaggatgcttactatgaccatcatgggacgaatatgcatggagcacatgacccccttgggttagctgtggcaaagatgtcttatcatgtctattctctaggggaagggattgtaggacaagttgcagtttctggagaacaccaatgggtatttcccgaaaattataacaactgtaactcagcatttgagaccattcttgtagtagctgttggtccatgtggagttgttcagctaggctctttgtgtaaaccaaaaatgccttctgaaggtttacatgctgaggctttccctgattgctctggagaagttgacaaagctatggacgtggaagagtccaatattctaactcaatacaaaactagaagaagtgatagcatgccttacaatactccttcgtcatgtcttgtcatggagaaggcagcccaagttgttggtggtcgtgaagttgtgcaaggatctacttgtgggagttatagtggtgttacgtttggctttccagttgacttggttggtgccaaacatgagaatcaagtaggtactaatataatcagggatgcacctcatgtgggaatgactagtggctgcaaagattcaagggatttagatcctaatttacatctgtatatgaagaatcatgtgctcaatgatacaagcacatctgctttagcaattgaggctgaaagattgataacaagccaatcatatccacgcctggactcaacttttcaggctacctcgagaacagataaagaaagttcttaccataatgaagtgttccaactatctgagaaccaaggaaataaatacataaaagagactgagcgtatgctggggaggaactgcgagtctagtcaatttgatgctttgatctcatctgggtatacttttgctggcagcgagctactagaagcgttaggctctgctttcaagcaaacgaacactggtcaggaggagctactgaagtctgaacatggttcaacaatgagaccaacagacgatatgagtcatagccagctcacgtttgaccctggccctgagaatcttctagatgctgtggttgctaatgtgtgtcaaagagatggtaatgcgagggatgatatgatgtcgagcagatcggtacaatcattgcttactaacatggaactggcagaaccctcaggtcagaagaagcataatattgttaacccaattaatagtgctatgaatcagccaccaatggcagaggtggatacccaacaaaattcatcagatatttgtggagcgttttcttcaattggattctcatctacgtaccccagctcctctagtgatcagtttcagacatccctggacatacccaagaagaacaaaaagagggccaaacctggtgaaagttctcgacctcgcccaagagacaggcaacttattcaagatcgaatcaaggaacttagagaacttgtgcctaatggatctaagtgcagtatcgattctttgctagaacgaacgatcaaacacatgctctttttgcagaatgttactaagcatgctgaaaagctcagtaaaagtgctaatgaaaagatgcaacaaaaggaaactggtatgcaaggttcaagctgcgcagtggaggttggaggtcatcttcaagtaagctcgatcatcgtggagaatctgaacaagcaggggatggtgcttatcgagtttaatctttgtttgaactcgagtcccaagttctgcgagtgtgtattaaaagtatttttgggtattggacagatgttatgtgaagaatgtggccattttcttgagatagcaaacgtcataaggagcttagacctcgtcatcctaagaggtttcaccgagactcagggcgagaaaacatggatatgctttgtaactgaggtaggaagtcgaattacccaattcatgaaagagattccaaagcaaatcaaagtattttccttggttttgattgaactttggattagtatgatatatatgactgactaa

SEQ ID NO: 1912 - DNA, 630 bp, Arabidopsis thaliana
  Clone ID: AT_MIO24.C1.o8.tg
atgaatccttctaacaatcctaaaaagacaaggcaccagagtcatatgcctcaagaaagagatgaaacgaagaaggagaagaagcttctccaccgcaacatcgaacgacaaagaagacaagaaatggcgatccttttcgcctctcttcgtagtcagctacctctaaaatacatcaaggctctttcttcgcagggaaagagagccatgtcagatcatgtaaacggagcagtaagtttcatcaaagacacgcaaacaaggataaaagatctctccgcaagaagagacgagctaaagcgagagattggtgaccctactagtctaactggatccggatccggatctggatcaagtagatcggaaccagctagtgtcatggtgcaaccgtgtgtgagcggcttcgaggtggttgtgagcagcttagcatcaggtctcgaggcttggccactctcaagagttcttgaagttcttcacgggcaaggacttgaagtcatcagctctttaacagcacgagtcaacgagaggctcatgtacactatacaagtcgaggtaaatagctttgattgcttcgacttagcttggttgcagcagaagctaattgagcagttagtactttccacgactaggcactga

SEQ ID NO: 1913 - DNA, 3867 bp, Arabidopsis thaliana
  Clone ID: AT_T21E18.C1.o17.tg
atgggttataccttgcaacagatactgaggagcatctgctccaacacggattggaactacgccgtgttctggaaacttaatcaccactcgccaatggttcttactttggaggatgtgtactgtgttaatcatgagcgcggtttgatgccggaaagcttgcatggagggcgccatgctcatgaccctcttgggttagctgtggctaagatgtcatatcatgttcacaacggttgggagagtcaaatttctgctggaattaagacaattcttatagtagctgttggttcttgcggagttgtgcagcttggctctttgtgtaaagttgaagaagacccggctttggtgactcatatcaggcatttatttttggcacttacggatccactagcagaccatgcatcaaatttaatgcaatgtgatattaacagtccatcggatcggccaaaaataccttccaaatgcttacatgaggcatcccctgatttctcaggagaatttgacaaagctatggatatggaagggttaaatattgtatctcaaaacacaagtaatagaagtaacgaccttccatacaatttcactccaacatattttcacatggagaggactgctcaagtaattggtgggcttgaagcagtccaaccttccatgtttggaagcaatgattgtgttacaagtggtttttcagttggtgtggttgatactaaacacaagaatcaagtggatataagtgatatgagtaaggtgatttatgatgaggaaacaggtggataccgatactcaagagaattagatcccaatttccaacactactcgaggaatcatgtgcgtaatagtggaggcacatctgctttagctatggagagtgataggctaaaagcaggttcatcatatccacaacttgattcaactgtacttactgcgttgaaaacagataaagattattctcgtcgaaatgaggttttccaaccatctgagagccaaggaagtatatttgtgaaagatacagaacataggcaggaggaaaaaagtgagtcaagtcagttggatgctttaactgcatctttgtgttctttttctggcagtgagctgttagaggcattagggccagcgttcagtaaaacaagcactgattatggggagctagcaaagtttgaatctgctgcagctataagacgaacaaatgatatgagccatagtcacctgacatttgaatccagctccgagaatcttctagatgccgttgttgctagtatgagtaatggtgatggtaatgtcaggcgtgaaatatcttcaagcaggtcaacacagtcattgcttacaactgctgaaatggcacaggcagaaccttttggtcataataagcaaaatattgttagcacagttgatagtgtgattagccagccgcctctagcagatgggcttatccaacagaatccatcaaatatctgcggagcattttcttccattgggttttcatcaacatgtctcagttcatccagcgaccagtttccgacgtccctggaaattcccaagaagaacaaaaagagagctaaacctggtgaaagttctcggcctcgtccaagggacaggcaacttattcaggatcgtatcaaagaactaagggagcttgtgcctaatggatctaagtgcagtattgattccttgctagagtgcacgatcaagcacatgctcttcctgcagagtgtctctcagcatgctgacaagctcactaaaagtgcaagttcaaagatgcaacacaaggataccggcaccctaggaatatcaagcactgaacaaggttcgagctgggcagtggagattggaggccatctgcaagtgtgctcaatcatggtggagaatctggacaaagaaggagtgatgcttattgagatgctatgcgaagaatgtagccactttctcgagatagcgaacgtgataaggagcttggaactcatcatcctcagaggcaccactgagaaacaaggcgagaaaacatggatatgttttgtagtggagggacaaaacaacaaagtaatgcacaggatggacatcctgtggtctcttgtgcaaatatttcaacccaaggctacaaacagtctgcatctttatcgacaatctcaaattctttacatgaatgctttcgccaatgtgcatagtcttcgggtaccttctcaccatcttcgagatttctcagcgtcactctctctggctcctccaaatttaaagaaaatcatcaagcaatgctcgacgcccaagcttctggagtctgctttagccgccatgatcaagacgagcctaaaccaagactgtcgcttaatgaaccaattcatcactgcctgcacttcctttaaacgtcttgacctcgcagtttccaccatgacccagatgcaggaacctaatgttttcgtctacaacgcgttgtttaaaggcttcgttacttgttctcacccgattcgatctctggaattgtatgttcgtatgctcagggactcggtttctccatcaagctacacgtactcttcactagtaaaggcgtcttctttcgcttctaggtttggggaatcactccaggcgcacatctggaaatttggatttggtttccatgttaaaattcagacgactcttattgatttttattcagccactggtagaatcagggaagccaggaaagtgtttgatgaaatgcctgaaagagatgatattgcttggaccacaatggtttctgcttatcgtcgggttttggatatggactctgcgaattctttagctaaccaaatgtcggagaagaatgaggctacgtcgaactgtttgattaatggatatatgggattaggcaatctggaacaagcagagtcattgtttaatcagatgcctgtgaaggacataatctcatggaccactatgatcaagggttactcgcagaataaaagatatagagaagcaattgcagtgttctacaaaatgatggaggagggcatcattcctgatgaggttactatgtcaactgttatttcagcttgtgcccatctcggcgtgctggaaataggtaaggaggttcatatgtacacgttacagaacggttttgttcttgatgtctacattggttctgcactggtagatatgtattccaaatgtggtagcttagagcgggcgcttctggtgttcttcaatttgcccaaaaagaatctattttgttggaattcgatcattgaaggactggcggctcatggttttgcacaagaagcactgaaaatgtttgccaagatggagatggagtcggtgaaacctaacgcagtcacttttgtgagtgtttttactgcgtgtactcacgcaggtcttgttgacgaaggtcggaggatatatcgcagcatgattgatgactattccattgtctctaatgttgaacattacggaggcatggttcatctattcagcaaagctgggttgatctatgaggctcttgaattgattggaaatatggaatttgaaccaaatgcggttatctggggggccttgcttgatgggtgcagaattcacaagaatctcgtgatagctgaaatagcgtttaacaaactgatggttttggagccgatgaatagtgggtattatttccttttagttagcatgtatgcagaacaaaacaggtggagagatgttgcagagattaggggaaggatgagagagttgggtatagaaaagatatgtcctgggacaagttcgattcggatagataaacgagaccatctgtttgctgcagctgataagtctcactcagcttcagatgaggtttgcttgctgcttgatgagatatatgatcagatgggattagctggatatgtgcaggaaactgagaatgtatattaa

SEQ ID NO: 1914 - DNA, 645 bp, Arabidopsis thaliana
  Clone ID: AT_T6K22.C1.o70.tg
atgacagaagaattcgacactacgggagtttgtaccggaacatggtggagctcctccaacggcatgttctcaggctgttctctgccacgttccgcggagattgttgtcgattttggtgagattgaatggcaaaacattgatacccttgatgccaaaacttacaacgagaactaccttagtacttccacattcttaggcaatgcaaatcttgataccacatcacaaatctacgtttcgagtccatctaacatccatgaagaagaacgatacaatcagataaatagttttctagaaggattgtttgattctagtgagcaattattggttcctaactgtcccaaaccagaactattcgaaagctttcacttctttgatgacgttttcccgaacgaatcaagaatgatatcagtatttgatcaccaaaaacccaaggaagacatgcaagcttgcaagagtctgactacatgcaagagagcaagtgagaaaagtggagaactcgaagatattgagtcatcacagccattaaaaaggccaagacttgagacaccatctcattttccgagcttcaaaacagacactgcttctgtcctccatgatgctatagattacatcaagtttctacaagaacaaatcactgtaagttga

SEQ ID NO: 1915 - DNA, 744 bp, Arabidopsis thaliana
  Clone ID: AT_K9D7.C1.o15.tg
atggataacttttttctaggtttgagttgtcaagaagaaaacaacttctgggatctaatcgtggccgacatctcgggtgatagaagcgtcagtgtacctatcagaagcgcctttaggtcatatatgaaggacacggaactgaggatgatgtcgccgaagatatcttcttcgaaggtgaacgtgaagaagagaatggtcaatcttctgagaaagaattgggaggagaagaaaaatacggtggctccagagaaggaaagaagccggcgacatatgttgaaagaaaggacgagaagagagaaacaaaaacagagttacttagctctccattctctactaccatttgccactaagaatgacaaaaattcgattgtcgaaaaagccgtggatgagattgcgaaattacaaagattaaagaaagaactagtgagaagaattaaagtgattgaggaaaaatcagcaaaggatggtcatgatgaaatgagtgaaacaaaggttagggttaatctaaaagaacctttgtctggactagattcaatgcttgaagcgcttcattatcttaaatcaatgggaacaaaactgaaaacagtccatgccaatttctctcctcaagagttttctgcgaccatgaccatcgagactcagattagaggagaggaggttgaaaagagagtggaaagaagactccaggaaactgaatggaaacttctctttctcccagaagcttccttttacaaagactactaa

SEQ ID NO: 1916 - DNA, 858 bp, Arabidopsis thaliana
  Clone ID: AT_T6A9.C1.o13.tg
atggaattgggatggagaaacgacgtcggatcacttgctgtgaaagatcagggcatgatgtcagaaagagcaagaagtgatgaagatcgtctaatcaacggtctaaaatggggctacggctactttgatcatgatcaaactgataattatcttcagattgttccagagattcataaagaagtagaaaatgcgaaggaggatttattggttgttgtccctgatgaacattctgaaactgatgatcatcatcatattaaagatttttcagagagatcagatcatcgattttatctgagaaacaaacatgagaaccccaaaaaacgtcgtatccaggtcttaagtagtgatgatgaatcggaggagtttacaagagaagttccttcagttactcgaaaaggttccaagagaagaagaagagacgagaagatgagtaataagatgcgtaagctacagcaactcgtacctaattgtcacaagacggacaaggtttcggttctcgacaagaccatagagtatatgaaaaaccttcaacttcaacttcagatgatgtcaacagtgggggtgaatccttattttcttccggcgacattaggatttggaatgcacaaccacatgctgacggcaatggcttcggctcacggcctaaatccggcgaatcacatgatgccatcgccgctaattccggcgttaaattggccattaccaccgtttactaatatttcattcccacattcatctagtcaatctctatttcttacaacatcatcaccagcttcttctcctcagtctcttcacggtttggttccttatttcccaagtttcttggatttttcttcccatgcgatgagaagactatga

SEQ ID NO: 1917 - DNA, 1053 bp, Arabidopsis thaliana
  Clone ID: AT_F27D4.C1.o17.tg
atgatgaactcttctcttctaactccttcttcttcatcttcttcccatatccaaactccatcaacaactttcgaccacgaagacttcctcgatcaaatcttttcctcggccccgtggccctccgtcgtcgatgatgctcatcctcttccctccgatggcttccacggccacgatgtcgactcaaggaatcagccgatcatgatgatgcctttgaatgatggctcctccgtccacgctctttataatggcttctccgtcgccggatctcttcctaactttcaaatccctcagggatcgggaggaggattgatgaaccaacaaggacaaacgcaaacgcaaacgcaacctcaggcgagcgcgtctacagctactggtggtacggtggcggctccgccgcagagtaggactaaaatccgagctaggagaggtcaagcaactgatcctcatagtatcgccgaaaggttacgaagagagagaattgcggaaagaatgaaagctcttcaagaactcgttcctaacggcaataagacagacaaggcatcgatgctcgatgagatcatagattatgtcaagtttttacaactccaagtcaaggtactgagcatgagcagattgggaggtgctgcttccgtttcttctcaaatctccgaggctggtggatcccacgggaacgcatcctccgccatggtcggcggtagccagacggccggaaactccaacgacagcgttacaatgacggaacatcaagtggccaaactaatggaagaagacatgggctcggccatgcaatatcttcaagggaaaggtctttgtctcatgccaatctctttagccaccgccatctcaaccgccacgtgtcactcccgtaaccctttgatccctggagctgttgccgacgtcggaggtccttcccctcccaatctttctggcatgaccatacagtcgacgagtacaaaaatgggtagcggtaatgggaaattaaacggtaacggcgtgaccgagaggtcgtcttctatcgccgttaaagaggccgtatccgtttcgaaagcgtga

SEQ ID NO: 1918 - DNA, 633 bp, Arabidopsis thaliana
  Clone ID: AT_K21H1.C1.o7.tg
atgggtgattctgacgtcggtgatcgtcttccccctccatcttcttccgacgaactctcgagctttctccgacagattctttcccgtactcctacagctcaaccttcttcaccaccgaagagtactaatgtttcctccgctgagaccttcttcccttccgtttccggcggagctgtttcttccgtcggttatggagtctctgaaactggccaagacaaatatgctttcgaacacaagagaagtggagctaaacagagaaattcgttgaagagaaacattgatgctcaattccacaacttgtctgaaaagaagaggaggagcaagatcaacgagaaaatgaaagctttgcagaaactcattcccaattccaacaagactgataaagcctcaatgcttgatgaagctatagaatatctgaagcagcttcaacttcaagtccagactttagccgttatgaatggtttaggcttaaaccctatgcgattaccacaggttccacctccaactcatacaaggatcaatgagaccttagagcaagacctgaacctagagactcttctcgctgctcctcactcgctggaaccagctaaaacaagtcaaggaatgtgcttttccacagccactctgctttga

SEQ ID NO: 1919 - DNA, 888 bp, Arabidopsis thaliana
  Clone ID: AT_F14B2.C1.o8.tg
atgtaccctcctaattcctctaagtccaccgctcatgacggcggcggcgatgccgacaccaatcaatatgactcagccgctggagctacccgtgatttctcctctcttggccctcaaacccaccatcatccgccaccgcagcggcagcagcagcatcagcagaatcccaacctcgtcggccattatttaccgggcgagccatcttccatcggattcgattccaacgcttcttcttcgtcttctttgttccgacacagaagctctccggctggattctacgaccaacatcttcccactgatcccaacggtttttctctaggacggccaaacggaggctacggcggaggaggagagcaagggccgtcgaggttgaagtcggagctgagattctctagtgggagtagtagccatcaagaacataattctctaccgcgaatctcggaggttgaagcggctgcagcggctagaaacggtgtcgcatcaagtagtatgagttttggaaataatcgtactaacaattgggacaactcgtcttctcatatcagtttcaccattgatcaacccggaaaacggtccaagaactccgactttttcaccttagaaactcagtatagcatgccgcaaacaactctggaaatggcgacaatggagaacttgatgaacatcccagaggactcggtgccttgtagggctagagccaagcgcggcttcgcgactcacccacgcagcattgctgaaagggagagaagaacgaggataagcgggaagctgaagaagctacaagaacttgtgcctaatatggacaagcaaacgagctacgcagatatgttggatttggctgttgagcatatcaaaggtcttcagcaccaagtagaggtgcgtccttag

SEQ ID NO: 1920 - DNA, 990 bp, Arabidopsis thaliana
  Clone ID: AT_F6N15.C1.o11.tg
atgatactccggcagcagccaccaccaccgtccgctccaccacagccgcagacatccccatactacgaggtagccgagctgacgtgggagaacgggcaactaggcttgcacggcttaggtccaccgcgagtgacggcttcgtcgaccaagtactccacaggcgccggtggaacgttggagtcgatagtggaccaagctactcgcctccctaaccctaagcccacggatgagctcgtcccgtggttccatcatcgctcctccagggccgcgatggcaatggacgcgcttgtcccttgctccaacctagtacacgagcagcagagcaagcctggtggcgttggctccacccgggtggggtcatgtagcgatggtcgtaccatgggcggtggaaaacgagcaagagtggcaccggagtggagcggcggcgggagtcagcggctgaccatggacacttacgacaagaggagagataaaatcaatcaaaggatgaagactttgcaaaaactggttcccaattccagcaagacggataaagcatctatgttggatgaagtgatagagtatttgaagcaacttcaagcacaagtgagcatgatgagcagaatgaatatgccttctatgatgcttcctatggccatgcagcaacaacaacaactacaaatgtctctcatgtccaatcccatgggtttagggatgggcatggggatgcccggtctcggtctcctcgaccttaattctatgaaccgagctgctgcaagcgctcctaatatccatgccaacatgatgccaaacccatttttgcccatgaattgtccatcgtgggatgcttcttccaatgactctcgatttcagtctcctctcatccccgatcctatgtctgcctttcttgcatgctctactcagccaacgacgatggaagcgtatagcaggatggctacattatatcagcaaatgcaacaacaacttcctcctccttcgaatccaaaatga

SEQ ID NO: 1921 - DNA, 1140 bp, Arabidopsis thaliana
  Clone ID: AT_F17A8.C1.o170.tg
atggatgaatcaagtattattccggcagagaaagtggccggagctgagaaaaaagagcttcaagggctgcttaagacggcggttcaatctgtggactggacttatagtgtcttctggcaattttgtcctcaacaacgggtcttggtgtgggggaatggatactacaacggtgcaataaagacgaggaagacaactcaaccagcggaggtgacggcagaagaggcggcgttagagaggagccaacagctcagggagctttatgagacacttttagccggagagtcaacgtcagaagcaagagcatgcaccgcattgtcaccggaggatttgacggagacagaatggttttatctaatgtgcgtctctttctcttttcctcctccatctgggatgccaggaaaagcgtatgcaaggaggaagcacgtatggctaagtggtgcaaatgaagttgacagtaaaactttttctagagctattctcgctaagacagtggtttgcattccaatgcttgatggtgttgtggaactaggcacaacgaaaaagaatggcaaagagcatcagcaagtgaaaacggcgccgtcgtcacaatgggtgctcaaacaaatgatcttcagagttcctttcctccatgacaacactaaagataagaggctaccgcgggaagatctgagccacgtagtagcagagcgacgcaggagggagaagctgaacgagaaattcataacgttgagatcaatggttccatttgtgaccaagatggataaagtctcaatccttggagacaccattgcgtacgtaaatcatcttcgaaagagggtccatgagcttgagaatactcatcatgagcaacagcataagcggacgcgtacttgtaagagaaaaacatcggaggaggtggaggtttccatcatagagaatgatgttttgttagagatgagatgtgagtaccgagatggtttgttgcttgacattcttcaggttcttcatgagcttggtatagagactacggcagttcatacctcggtgaacgaccatgatttcgaggcggagataagggcgaaagtaagagggaagaaagcaagcatcgctgaggtcaaaagagccatccaccaagtcataatacatgatactaatctatag

SEQ ID NO: 1922 - DNA, 1086 bp, Arabidopsis thaliana
  Clone ID: AT_T27I1.C1.o15.tg
atgggtggtgagagtaatgaaggaggagagatgggctttaagcatggagatgatgagagtggtgggatctctagagttggaattacatcaatgcccttgtatgcaaaggcagatcctttcttctcttctgcagattgggatccagttgtcaatgctgctgctgctggcttctccagctctcattaccatccttccatggcgatggataatccagggatgagttgcttctctcattaccaacccggttctgtttccggttttgcagcagacatgcctgctagtcttcttccgtttggtgattgtggtggtggtcaaattggtcattttcttggttcagacaagaaaggggaaagattgatcagagctggagaatcatctcatgaggatcatcatcaggtttcagatgatgctgttcttggtgcttccccagttgggaaaagaaggctacctgaagccgaatcacaatggaacaagaaagctgtggaggaatttcaagaagaccctcaaaggggaaatgatcagagccagaagaagcataaaaatgatcagagtaaagagacggtgaacaaggagagctcacaaagtgaagaagcaccgaaagaaaactacattcatatgagggcaagaagaggtcaagccactaatagtcacagtcttgcagagcgggttagaagagaaaagatcagtgaaaggatgagattgcttcaagaacttgttcccggatgcaacaagatcaccggaaaagcggttatgctcgatgaaataatcaactatgttcagtcattgcaacagcaagttgagtttttgtctatgaaacttgcgacggtgaatccagagatcaatattgatatagacaggattctcgccaaagatcttctgcagtcaagagacagaaacactcctacactcgggctgaatccttttgccggttttcaagggaacataccaaacctttctgccaccacaaatccacaatacaacccactacctcagacaacactagagagtgaactacaaaacctttaccagatgggattcgtctcaaatccatcgactatgtccagtttctcacctaatggtaactaa

SEQ ID NO: 1923 - DNA, 948 bp, Arabidopsis thaliana
  Clone ID: AT_F12B17.C1.o80.tg
atggaaacggaattgacgcaattgagaaaacaagaaagcaacaatctcaacggcgttaatggaggattcatggcgattgaccaattcgtcccaaatgattggaacttcgattacctctgtttcaacaatcttctccaagaagacgacaacattgatcatccttcttcttcttctttgatgaatctaatttctcagccacctccattgcttcatcaaccaccacaaccgtcgtcacctctttatgattctccgccgctctcctccgctttcgactatccttttctcgaggatatcatacactcctcttattctcctcctccattgatccttccggcttcgcaagagaacaccaacaattactcaccattgatggaggaaagcaagagcttcataagcatcggagagactaacaagaaaaggagtaacaagaagcttgaaggtcagccttcgaagaatcttatggcggagagacggcggaggaaacggttaaatgaccgactctccctgctccgatccattgtccctaaaatcaccaagatggataggacatcgatactaggagatgcaatagattacatgaaggagcttttggacaagattaacaagttgcaagaagacgaacaagaacttggaagcaactctcatctaagcaccctcattacaaacgaatctatggtcagaaactccctaaagtttgaagtagatcaaagggaagttaatacgcatattgatatatgttgtcctacgaaaccgggtttggttgtatcaacggttagtacattggagactctaggattagagattgaacaatgtgtcattagctgcttcagtgacttctcattgcaggcttcttgttttgaggttggtgagcagagatacatggttacttcggaagctactaaacaagcactaatcagaaacgcaggttatggaggaagatgtctgtag

SEQ ID NO: 1924 - DNA, 2424 bp, Arabidopsis thaliana
  Clone ID: AT_T20M3.C1.o6.tg
atggcggccaaagtcttcactcagaaccctatctattctcaatctctagttagagacaaaactcctcaacagaaacacaatcttgaccatttctctatatcccagcacacctctaaaagactcgttgtctcttcttctacaatgtcccctccgatttcatcttctccactctctcttccttcttcttcttcttctcaggccattcctccttctcgagcacctgcagtgactctaccgttgtctcgggtttggagagagatacaagggagcaataactgggaaaatctcattgaacctctaagccctattctccaacaagagatcactcgctacgggaacttactctccgcttcttacaaagggtttgatctaaaccctaactccaaacgttacttgagttgcaagtatggaaaaaagaacttgcttaaagaatccggaatccatgaccctgatggctaccaagtcaccaagtatatctacgccacaccagacatcaacctcaaccctatcaagaacgagcctaaccgtgcacgttggatcggttatgtagcggtttcttctgatgaatcggtgaaacgtttgggaaggagggatattttggtgacgtttcgtggcactgtcaccaaccatgagtggttagctaacctaaagagctctttgactccggctaggcttgatcctcataaccctcgtcctgatgtcaaggtcgaatccgggttcttaggtttatacacatccggtgagagcgagagcaaattcgggctagaaagctgccgtgagcagcttctctccgagatctcgaggcttatgaacaagcacaaaggcgaggaaataagcataacacttgcgggacatagtatggggagttctctagctcagcttctagcttacgacatagcggaactcggtatgaaccagagaagggacgaaaaacctgttccggtgaccgtgttttcgtttgctggtcctagagttggtaacttggggttcaaaaaacggtgtgaggagctaggagttaaagtcttgaggatcacgaatgtaaacgatccgatcaccaaacttccaggtttcttatttaatgagaatttcagatctttaggtggtgtttacgagcttccttggagctgttcttgctacactcacgtgggagtcgaactcaccctcgatttcttcgatgttcaaaacatttcttgtgtccatgacctcgagacttacatcactctagtaaaccgtccgagatgctcgaaattggcggttaatgaagacaattttggcggcgagtttttgaacagaacaagtgaactgatgttcatcatgtaccaatcatcatcctccacgtcatcatcatcgcagagatcatcgcttcccggcggcggaggactgatccgttacggctcagctccgggatcgtttctaaactctgtggttgacgaagtcatcggaggaggctcatcaaacgctcgtgacttcaccggctatcaaccgtcgtcggataacttcatcggtaactttttcaccggagctgctgactcatcctcgctgagatccgattcgacgacttgtggagtcaacaactcatccgacggacagaaacagctaggcaataacaataataataatagtaataaagatatcttcctcgacagatcctacggtggattcaacgagatctcgcaacaacacaagagcaacgacatcggaggaggaaacagctcaggatcttactctctcgctagacaacgtagctctcccgccgatttcttcacctacctcgcctcagataaaaacaatttctcgttgaaccaaccaaccagtgattatagtccgcaaggagggtctaatgggggacgaggacattccagattgaagtctcagctaagcttcacgaatcacgactctctggctcggatcaacgaggtcaatgagaccccagtccacgacggttcaggccattcgttttctgcggctagctttggtgcagccactactgattcttgggatgacggttccggttcgatagggtttaccgtgactaggcccagtaaacgatccaaggacatggactctggtctcttttcgcagtatagtcttccttcagacacttcaatgaactacatggataacttcatgcagcttccagaagattctgtaccctgcaaaatccgggccaaacgcggctgcgccacccatcctagaagcatcgctgagcgggagaggagaacgagaataagtgggaagctaaagaagctacaagatcttgtccccaacatggataagcaaacaagctattcagacatgctggatttagctgtacaacacatcaaaggccttcagcatcaacttcaggttcccttatcttactttttctgtttaggtcagctgaatccatttccagagttctctctagttcatgatccatattga

SEQ ID NO: 1925 - DNA, 1266 bp, Arabidopsis thaliana
  Clone ID: AT_F20B24.C1.o4.tg
atgatgatgatgagaggtggtgagagagtgaaggagtttcttcgaccctttgtcgattccagaacttgggacttatgtgttatctggaaactcggtgatgatccttctaggtttattgaatgggtgggatgctgctgcagtggttgttatattgataagaatataaagcttgaaaactcagaagaaggaggaactgggagaaaaaagaaggcttctttctgtagagatgaccacaacaagcatcgtataagaaccttagcttgtgaagcgctttctcgttttcctctcttcatgcctctctatcccgggattcatggagaagtagtgatgtcaaaatctccaaagtggttggttaattcaggatctaaaatggaaatgttcagcactcgtgttcttgttcctgtgagtgatggtctcgttgagctgttcgctttcgatatgagaccgtttgatgaaagcatggtgcatttgatcatgtcgcgttgtaccaccttctttgaaccattccctgaacaaaggctgcagttcaggatcattccccgagcagaggaatctatgagtagcggtgtgaatctcagcgttgagggcggcggatcatcaagtgtttccaatccctccagtgaaactcagaatcttttcggcaattacccgaatgctagttgtgtggaaattctcagggaggaacaaacaccgtgtttgataatgaacaaggaaaaggatgttgtggtgcaaaatgccaacgattccaaagctaataagaagctgcttcctacggaaaacttcaaatcaaagaaccttcattcagagaggaaaagaagagagagaattaatcaggccatgtatggtctaagagccgtagtccctaaaatcacaaagttgaacaaaattggaattttcagtgatgctgttgattacatcaatgaactgctagtggagaagcagaaacttgaagatgagcttaaaggaatcaatgagatggaatgcaaagaaatcgctgcagaggaacaatctgcaatagctgatccagaagctgaaagagtttcctctaaaagcaacaagagagtgaagaaaaacgaggtgaaaattgaagtccacgagactggtgagcgagatttcttgattcgggttgtgcaggaacataaacaagatggattcaagaggttgatagaagctgtagatttatgtgaacttgagatcattgacgtcaatttcaccagactcgatctcacagtcatgaccgttctcaatgtcaaggtagtaacgtaa

SEQ ID NO: 1926 - DNA, 1371 bp, Arabidopsis thaliana
  Clone ID: AT_F21O3.C1.o5.tg
atggagaacgagctgtttatgaatgcaggagtttcgcatccgccggtgatgacgtcaccgtcttcttcgtcggcgatgcttaagtgggtttcaatggagactcagccagtggatccaagtctcagtcgcaatctgttttgggaaaagtcaacggaacagagcatttttgattcggctctgagctcactcgtctcttctcctacgccgtcaaattcaaacttttcggttggcggagtaggtggagaaaatgtcattatgagagagctcatcgggaaactgggtaatatcggcgatatctatggaattacggcgagcaatggaaactcgtgttacgcaactccgatgagctctccaccgcctggaagtatgatggagacgaaaacgacgacgccgatggcagaactgtccggcgacccgggattcgctgagagagcggcgaggttctcgtgttttggtagccggagttttaacagcagaacaaactcgccgtttccgattaataacgaaccacccatcacaaccaatgagaaaatgccacgtgtatcaagcagcccagtttttaagcctcttgcgtctcatgttcccgccggcgaatcgtccggtgaactttcccggaaaagaaaaactaaatccaagcagaattctccttctgcagtttcatcatcaaaggagattgaagagaaggaagattctgatccaaagagatgcaaaaaatcagaagaaaatggagacaaaactaaatcaattgatccttacaaagattacattcatgttagagctcgacgaggccaagccaccgatagtcacagtctcgccgaacgagttcgaagagagaaaataagcgaaagaatgaagctgcttcaagatcttgtccctggatgcaacaaggttactggaaaagcactgatgttggatgaaattataaactatgtccaatcattgcaacgacaagttgagttcttgtcgatgaagttatcgtcagtgaacaccaggctggactttaacatggacgctctcttgtctaaggatatatttccttcaagcaacaatctaatgcatcatcaacaagtacttcaattagattcttcagcagaaacgttattgggtgatcatcacaacaaaaatttgcaattgaaccctgatatttcttctaataacgtaataaaccctttggaaacttctgaaactagaagcttcatttctcacttaccaacacttgctcatttcactgactctatttctcagtattcaacattttccgaagatgatttacatagcattattcatatgggttttgcgcaaaaccgtctccaagaattgaaccaaggttcatcaaaccaagtaccatcgcacatgaaagctgaactttga

SEQ ID NO: 1927 - DNA, 624 bp, Arabidopsis thaliana
  Clone ID: AT_T6K22.C1.o60.tg
atgggtggaggaagcagatttcaagaaccagtgaggatgagccgtaggaaacaagtaacaaaagagaaggaagaagatgaaaacttcaaatctccaaatcttgaagcagagagacgtagaagagagaagcttcattgtcggcttatggctctgcgatctcatgtccccattgtcaccaacatgactaaagcaagtattgttgaagatgcgattacttacataggagagcttcaaaacaatgttaagaatctcttagagacatttcatgaaatggaagaagctcctcctgagattgatgaagaacaaacggatccaatgataaaacctgaagttgaaactagtgatcttaacgaagagatgaagaaactcggaatcgaggagaatgtgcaattgtgtaagattggggagaggaagttttggttaaagatcataacagagaagagagatgggatctttactaaattcatggaggttatgagatttctcggattcgagattatcgatattagtctaacaacttcaaatggagcaattcttattagtgcctctgttcagacacaggaactctgtgatgttgaacagacaaaagattttcttttggaagttatgagaagcaatccataa

SEQ ID NO: 1928 - DNA, 1263 bp, Arabidopsis thaliana
  Clone ID: AT_F9P14.C1.o2.tg
atgggaggaggaggcatgtttgaagaaattgggtgttttgatccaaatgctccggcagaaatgactgctgagagcagtttctctccgtccgagccaccaccgacgatcacggtcatcggtagcaacagtaacagcaactgcagtctagaagatctctctgcattccacctcagcccacaagactcttctctacctgcctcagcctcagcttatgctcatcagcttcacattaatgctactcctaattgtgatcatcaattccagagttcaatgcaccaaaccctccaagatccatcgtatgcgcaacagtcgaatcattgggacaatggttaccaagattttgtgaatttgggtcctaatcataccactcctgacctactcagtctcttgcaattgccaagatcctcacttccacctttcgcaaaccctagcattcaagacattatcatgacaacatcttcctctgtcgccgcctatgacccgctcttccatctgaattttcctctgcagcctcctaatgggagtttcatgggagtggatcaagatcaaactgagactaaccaaggagtgaacttgatgtatgatgaagaaaacaacaacctcgacgatggtcttaaccgtaaaggcagaggatcgaaaaagcgtaaaattttccctacagaacgcgagagaagagttcacttcaaagaccggtttggtgacttaaagaatctaattccaaatcccaccaagaatgatagagcatcaatcgtcggagaagcgatagattacatcaaagagttgctaaggacgatcgatgagttcaagctgctagtggaaaagaagagagtgaaacagaggaacagagaaggagatgatgttgttgatgagaacttcaaggctcaaagcgaagtagtagaacaatgtttgatcaataagaagaacaatgccttgagatgctcatggctcaagaggaaatcgaaattcactgatgtcgatgtacgtatcatagacgatgaagttaccatcaagatcgtgcagaagaagaaaatcaattgtttgttgttcgtatccaaagtcgttgaccaacttgagcttgatcttcaccatgtagctggtgcacaaatcggagagcaccacagtttcttgttcaacgccaagattagtgaaggatctagtgtttatgcaagtgccatagcagatagagtaatggaagtgttgaagaaacaatacatggaagctctttcggcgaataatggttatcactgttactctagtgattaa

SEQ ID NO: 1929 - DNA, 1272 bp, Arabidopsis thaliana
  Clone ID: AT_MFL8.C1.o13.tg
atggaacaccaaggttggagttttgaggagaattatagtttgtccactaatagaagatctatcaggccacaagatgaactagtggagttattatggcgagatggacaagtggttctgcagagccaaactcatagagaacaaacccaaacccagaaacaagatcatcatgaagaagccctaagatccagcacctttcttgaagatcaagaaactgtctcttggatccaataccctccagatgaagacccattcgaacccgacgacttctcctcccacttcttctcaaccatggatcccctccagagaccaacctcagagacggttaagcctaagtccagtcctgaacctcctcaagtcatggttaagcctaaggcctgtcctgaccctcctcctcaagtcatgcctcctccaaaatttaggttaacaaattcatcatcggggattagggaaacagaaatggaacagtactcggtaacgaccgttggacctagccattgcggaagcaacccatcacagaacgatctcgatgtctcaatgagtcatgatcgaagcaaaaacatagaagaaaagcttaatccgaacgcaagttcctcatcaggtggctcctctggttgcagctttggcaaagatatcaaagaaatggctagtggaagatgcatcacaaccgaccgtaagagaaaacgtataaatcacactgacgaatctgtatctctatcagattcgaaccaacgatcaggatcaaaccgaaggagtcgagcagctgaagttcataatctctccgaaaggaggaggagagataggatcaatgagagaatgaaggctttgcaagaactaatacctcactgcagtaaaactgataaagcttcgattttagacgaagccatagattatttgaaatcacttcagttacagcttcaagtgatgtggatggggagtggaatggcggcggcggcggcttcggctccgatgatgttccccggagttcaacctcagcagttcatacgtcagatacagagcccggtacagttacctcgatttccggttatggatcagtctgcaattcagaacaatcccggtttagtttgccaaaacccggtacaaaaccagatcatctccgaccggtttgctagatacatcggtgggttcccacacatgcaggccgcgactcagccgatggagatgttgagatttagttcaccggcgggacagcaaagtcaacaaccgtcgtctgtgccgacgaagaccaccgacggttctcgtttggaccactag

SEQ ID NO: 1930 - DNA, 1050 bp, Arabidopsis thaliana
  Clone ID: AT_F17I5.C1.o70.tg
atgggagaatggagcaacaacctcggaggaatgtacacttatgcaaccgaggaagccgatttcatgaaccagcttctcgcctcttatgatcatcctggcaccggctcatcctccggcgcagcagccagtggtgaccaccaaggcttgtattggaaccttggttctcatcacaaccaccttagcctcgtgtctgaagccggtagcttctgtttctctcaagagagcagcagctacagcgctgggaacagcggatattacaccgttgttccacccacggttgaagagaaccaaaatgagacaatggactttgggatggaagatgtgaccatcaatacaaactcataccttgttggtgaggagacaagtgagtgtgacgttgagaaatactcttctggaaagactcttatgcctttggaaaccgtagtggagaaccacgatgacgaggaaagcttgttgcaatctgagatctctgtgactactacaaaatctctcaccggctccaaaaagagatcccgtgccacatctactgataaaaacaagagagcaagagtgaataagagggcccagaagaacgtagagatgagtggggataacaatgaaggagaagaggaagaaggagagacgaagttgaagaaaagaaagaatggggcaatgatgagtagacagaactcaagcaccactttctgtacggaggaagaatcaaactgcgctgatcaagacggtggaggagaagactcatcctctaaggaagatgatccctcaaaggccctcaacctcaatggtaaaacaagagccagtcgtggtgcagccaccgatcctcaaagcctctatgcaaggaaaagaagagaaaggattaacgagagactaaggattttacaaaatctcgtccccaatggaacaaaggtcgatattagtacaatgcttgaggaagcagttcattacgtcaaatttttgcagctccaaattaagttattgagctctgatgatctatggatgtatgcgccgattgctttcaatgggatggacattggtctcagctcaccgagatga

SEQ ID NO: 1931 - DNA, 681 bp, Arabidopsis thaliana
  Clone ID: AT_MHK10.C1.o2.tg
atggagcttctccatttcccagattcatcgtcttctcaggccagaaccgttaccagtggtgatatttctcctaccactcttcaccctttcggggctttgacttttccttctaactcgcttctcttggaccgcgccgctcgtttctcggtgattgctacagagcaaaacggtaatttttccggcgagactgctaactctttaccttctaatcccggcgcgaatctggacagagtcaaagccgagcctgctgagaccgattcaatggtggagaatcagaaccagagctactcttctggaaaaaggaaagaacgcgagaagaaggtcaaaagctcgacgaagaagaacaagagctccgtggagtcagacaagttgccatatgttcatgtcagagctcgtcgtggtcaagctactgataaccatagcttagcagagagagtaattcacaatctcacagacatggcaagaagggagaagataaacgcacgaatgaagctgctacaggaactggtcccaggctgtgataagattcagggcactgcattggttctggatgaaatcattaaccatgtgcaaactttacagcgtcaagtggagatgctatctatgagacttgctgcagtaaaccccagaatcgacttcaatctagacagcatactggcttcagaggtaagtatcaactaa

SEQ ID NO: 1932 - DNA, 1116 bp, Arabidopsis thaliana
  Clone ID: AT_F19D11.C1.o9.tg
atgtttgtcctgagagtaagtaaccagagctttaagttacatcagcaagtacaatgtaaagatgaaatcttctgtttggaccaaaaagtgaatgtgagaagaagcctacaagttcaagaaactgtagaggatcatcaaagctttgcccttgaagaggaagaacaacaactctcaactccgagcttgctgcaagacacaacaataccatttctacaaatgctgcaacaaagtgaagacccttcaccgtttttgtcattcaaagacccaagctttctagcactactatctctccagacacttgaaaagccttgggaactcgaaaactacctcccacatgaagttccagagtttcattcaccgatccattctgaaaccaaccactactatcataatccatctttggaaggagtcaatgaagccatctcaaaccaagaacttccattcaacccactagagaatgcgcgttcaagacgcaagcggaaaaacaacaacttggcatcattgatgacaagagaaaagcgaaagagaagaagaactaaaccaacaaagaacatagaagagatagagagtcaaagaatgacacacattgcggttgaacgaaaccgcagacgccaaatgaacgttcatctgaactcactccgctccatcattccatcttcatacatccagaggggagaccaagcgtcaatagtaggaggagcaatagacttcgtaaagatcctagagcaacagttgcaatcccttgaagcacaaaagagaagtcaacagagtgatgataacaaagagcaaattccagaagataacagtctcaggaacatttcgtcgaacaagttgcgtgcgagtaataaagaagaacaaagtagcaaactcaaaatcgaagccacagtgatagagagtcacgtcaacctaaaaattcaatgtacgaggaaacaaggacaacttctcagatcaatcatattgctggagaaacttcgattcactgttcttcatctcaacatcacatctccgaccaatacatctgtctcttattccttcaacctcaagatggaagatgaatgtaatttgggatcagcggatgagataacggcggcgattcgtcagattttcgacagctga

SEQ ID NO: 1933 - DNA, 1056 bp, Arabidopsis thaliana
  Clone ID: AT_K21L13.C1.o16.tg
atggaactgtcgactcaaatgaatgtgttcgaagagcttcttgttccgacaaagcaagaaacaaccgacaacaacatcaacaatctgagctttaatggcggatttgatcatcatcatcatcaattcttcccaaatggatataatattgattacctctgtttcaacaatgaagaagaagacgaaaatacccttttgtatccttcttctttcatggatctaatctctcaacctcctccattgcttcttcaccaaccgccaccgttacaaccactgtcgccgccgttatcctcctccgcgaccgccggagcaacatttgactacccttttcttgaggctttgcaagagataattgactcttcttcctcatcgcctccattgatccttcaaaatggtcaagaagagaactttaataatccgatgtcgtatccctctccattgatggagtctgatcagagcaagagcttcagtgttggttactgtggaggagagacgaacaagaagaagagcaaaaagcttgaaggccaaccttctaagaatctcatggcggagagacgacggagaaaacgacttaacgatcgtctttctatgctccgatccatcgtcccaaaaatcagtaagatggacaggacatcgatattaggagatgccatagattacatgaaagagcttttagacaaaatcaacaaattacaagatgaggaacaagaacttggaaatagcaacaattcacatcactctaagctcttcggtgatctcaaggatcttaatgcgaacgaacctctggtcagaaactcaccaaagtttgaaatagatcgtagagacgaggatactcgagttgatatatgctgctcgccaaaaccgggattgctactatctactgtgaatacattagagactctaggcttggagattgaacaatgtgttataagctgctttagtgatttctctttgcaggcttcttgttctgagggagctgagcagagagatttcataacatcagaagatataaaacaagcattattcagaaacgcaggttatggtggaagctgcttgtaa

SEQ ID NO: 1934 - DNA, 1143 bp, Arabidopsis thaliana
  Clone ID: AT_T24P15.C1.o19.tg
atggattcaaataatcatctctacgacccgaatcccaccgggtcgggtcttcttcgttttagatcagctccgagctctgttctcgccgcttttgttgacgacgacaagattggtttcgactccgataggttgctttcaagattcgtgacctctaatggcgttaacggagatctgggttcacctaaattcgaggataagtctccggtttcgttaacgaacacctctgtttcatacgccgccactctgccgccaccgccgcagcttgagccgtcgagttttctgggtttgccgccgcattacccgaggcagagtaaagggataatgaactcggttggtttggatcagtttctcggtatcaataatcatcacaccaaaccagttgaatctaatcttctccgtcaaagcagctctccagccggaatgtttactaatctctctgaccaaaacgagttaaagcactttggactcaacaaatctaataagtgtttactatatacttacaaatttgcaggttatggttcaatgaggaatttgatgaattacgaagaagatgaagagagtccatctaattccaatggattaagacgccattgcagtctctcttcaaggccaccttcttcacttggaatgctttctcaaatacctgaaatcgcacccgaaactaattttccatatagccattggaatgatccatccagctttattgataacttatcctcacttaaaagagaagccgaggacgatggaaaattgtttctcggagctcagaacggagagtccgggaatcgtatgcagttactgtcgcatcatttgagcctaccaaagtcatcatcgacagcctcggacatggtttcagtggataagtatcttcagctacaagattctgttccttgtaaaatcagagccaaacgtggttgcgctacacatcctcgaagcatcgctgaacgggtaagaagaacgcggataagcgagcgaatgaggaagttacaagagcttgttcctaacatggacaagcaaaccaacacttcggatatgttggatttagctgtggattacatcaaagatttacaaagacagtataagattttaaacgacaacagagctaactgtaagtgtatgaacaaggagaagaagtcaatatag

SEQ ID NO: 1935 - DNA, 777 bp, Arabidopsis thaliana
  Clone ID: AT_F24I3.C1.o60.tg
atgtgtgcattagtacctccattgtttccaaactttgggtggccatcaacgggagagtacgacagctactacctcgccggagatatcctcaacaacggcgggtttcttgattttccggtaccggaggagacttatggagctgttacagcggtgactcaacatcagaatagctttggtgtttctgtttcgtcggagggaaatgaaatagacaacaatccggtggtcgtcaagaagcttaatcacaatgctagtgagcgtgaccgtcgcaggaaaattaactctttgttctcatctctccgttcatgtcttcctgcctctggccaatcgaagaagctaagcattcctgcgacggtttctcgaagcttgaagtacataccagagctgcaagagcaagtgaagaagctaataaaaaagaaggaagagctcttggtgcaaatttcaggtcaaagaaacactgaatgttacgttaagcagccaccaaaggccgtcgcgaattatatctcgaccgtttctgcgactaggcttggtgacaacgaagtgatggtccaaatctcatcgtccaagattcataacttttcgatatctaatgttttaagtgggttagaagaagataggtttgttcttgtggacatgtcatcttcaaggtctcaaggagaaaggcttttctacactttgcatttacaagtggagaagattgaaaattacaagctgaattgcgaagagttaagtcagaggatgttgtacttgtatgaggaatgtggaaactcatatatatga

SEQ ID NO: 1936 - DNA, 915 bp, Arabidopsis thaliana
  Clone ID: AT_F12K8.C1.o16.tg
atgcccttagaggctgtcgtatacccgcaagatccattcggatatctctccaattgcaaagattttatgttccacgacttatactctcaagaagagttcgtagctcaagatacgaagaacaacattgataagttagggcatgaacagagctttgtggaacaaggtaaggaggacgatcatcaatggcgagactatcatcagtatcctttgttgatcccttcgttgggagaagagcttggtcttaccgccattgatgtggagagtcatcctcctccacagcaccggaggaagaggaggagaacgagaaactgcaagaacaaggaagagatcgagaaccagagaatgactcacatcgccgtcgagagaaatcgccggaaacagatgaacgagtatctggctgtgctccgttctctaatgccgtcgtcgtatgctcaaagaggagatcaagcgtcgatagtaggaggagctataaactacgtgaaggagttagagcatattttacaatctatggagccgaagagaactaggactcatgatcccaaaggagacaagactagcactagctcgttagtgggtccattcacagattttttcagcttcccacaatattctacaaagtcatcatcagatgtaccggaaagctcatcttcaccggcggagatagaggttacggtggcagaaagccatgcgaacatcaagataatgacgaagaagaaaccgaggcagcttcttaagctcataacttctttacaaagcctaaggctcactcttcttcatctcaatgtcaccactctccacaactccattctctactccatcagcgtcagggttgaagaaggaagccaactgaataccgtggacgacattgcaacagctttgaatcaaaccataaggaggattcaagaagagacataa

SEQ ID NO: 1937 - DNA, 855 bp, Arabidopsis thaliana
  Clone ID: AT_MPN9.C1.o10.tg
atggacgtttctgctagaaagtcacaaaaagctgggcgcgaaaagttgaggagggaaaaactgaatgagcattttgttgaactgggaaatgtactcgatccagagagacccaagaatgacaaagccacgattctgactgatactgttcagttgttgaaagagctcacatctgaagtcaacaaactgaaatctgagtacaccgcattgacagatgagtcccgcgagttgacacaggagaaaaacgacctgagagaagaaaagacatcgctgaaatcagatatagagaatctcaatcttcaataccagcagagattaaggtcaatgtctccatggggagctgcgatggatcacacagtcatgatggctccaccaccctcctttccataccctatgcctattgctatgcctcccgggtcaatcccaatgcatccatcaatgccatcttacacatactttgggaaccagaaccctagcatgatcccagctccatgtcctacatacatgccctacatgcctcctaatacagtcgttgagcaacaatccgtgcacattccacagaaccccggtaaccgttctcgggaacctagagcaaaggtttcaagagagagcagatctgagaaagcagaggactccaacgaagttgcaacacaactcgaattaaaaacccctggatctacttctgataaggatacattgcaaaggccagagaagacaaagagatgtaagagaaacaacaacaacaactcaatagaagaaagctctcattctagcaagtgttcatcttctccgagcgtacgagaccacagttcttccagtagcgtagctggtggccaaaaacctgatgatgcaaaatga

SEQ ID NO: 1938 - DNA, 1140 bp, Arabidopsis thaliana
  Clone ID: AT_F23H24.C1.o5.tg
atggaatcagaattccagcaacatcacttccttctccacgatcatcaacaccagagaccaagaaactcaggattgattcgttaccaatcagcaccaagttcgtacttttcgagtttcggtgaatcaatcgaagagtttttagatcgacccacaagtcctgaaactgagcgaatcttatctggctttttacaaaccaccgacacaagcgacaacgttgatagtttccttcaccatacttttaacagtgatggaactgagaagaaacctccggaagttaaaacagaggacgaagatgctgaaattccggtgactgcgacggcgacggcgatggaggttgttgtttccggtgatggtgaaatctcagtgaatcctgaagtatcgattgggtatgtggcttcggtttcgaggaataagagaccaagagagaaagatgatcggactccggtgaataatctagctcgtcataatagttcaccggccggattattttcatccattgatgttgaaacagcttatgcagctgtaatgaaaagtatgggaggttttggaggaagtaatgtgatgagtacaagcaatactgaagcttcgtctcttactcctagaagcaagttacttcctcctacttctagagcgatgagtccgatctctgaggttgatgttaaacccggtttctcgtctagattgcctcctcggacgctttccggtgggtttaatcgttcttttgggaatgaagggtctgcttcttccaagcttacagctcttgctaggacccaatctggaggtctagatcaatacaaaaccaaggatgaggattcagcaagtagacgtcctcctttggcacatcacatgagtttgcccaagtctttatcagatattgaacagttactgtcagattctatcccatgtaagatcagagccaagcggggttgtgcaactcatcctcgaagcatagccgagagggtgagaagaaccaagatcagtgaaagaatgaggaagctgcaagaccttgttccaaacatggacacgcaaacaaacacagcagacatgttggatcttgcggttcaatacatcaaggacctgcaagaacaagtgaaggcgctcgaagagagtcgggcaagatgtagatgctctagtgcgtga

SEQ ID NO: 1939 - DNA, 846 bp, Arabidopsis thaliana
  Clone ID: AT_MRG21.C1.o2.tg
atggaccctccactagtgaacgattcctccttctctgcagctaatccttcttcttacactctctccgagatttggcctttccctgtaaacgacgccgttcgctctggtctccgtttagctgttaactccggtcgagtctttactcgctctgaacattccggcaataaagacgtctccgcggctgaggaatctacagtcaccgatctaactgctggctggggaagtagaaagactagagatttgaactctgaggatgattcttcaaagatggtttcttccagcagcagtggtaatgaattgaaagaatcaggggataagaaaagaaaactgtgtggatctgaaagtggaaatggagatggttcgatgagacctgaaggcgaaacaagttcgggtggtggtggaagcaaagcaacggaacagaagaacaaacctgagccaccaaaggattatattcatgtgagagcaagaagaggacaagctactgaccggcatagtttagcagagcgagctagaagagaaaagatcagtgagaagatgacagctcttcaagatataattccaggatgtaataagataatcggaaaagcccttgtgctcgatgagattatcaattatattcagtcattgcagcggcaagttgagtttctatcaatgaagctagaagttgttaactcgggtgcaagtactggtccgacaataggagtttttccttccggtgatctcgggactttaccgattgacgttcatcgaacaatatacgagcaacaagaagctaatgaaacccgagtatctcaaccggagtggctccatatgcaggttgatgggaactttaaccgaaccacataa

SEQ ID NO: 1940 - DNA, 834 bp, Arabidopsis thaliana
  Clone ID: AT_F27B13.C1.o170.tg
atggaagatctcgaccatgagtacaagaattactgggaaaccacaatgttcttccagaatcaagaactcgaatttgacagttggccgatggaggaagcgttttcgggttccggcgagtcgagttcgccagacggagcggcaacgtcgccggcttcttcgaagaacgttgtctccgagagaaacagacggcaaaagcttaatcagagactttttgctctccggtcagttgttcccaatataagcaagttggacaaggcatctgtcatcaaagattctatcgactatatgcaagaacttattgatcaagagaagactctagaagcagagatcagagagctagaatcacggtcaacattgctagaaaatccggtaagagattacgattgcaattttgcggaaactcatctgcaagatttctcagacaataatgacatgagatcaaaaaagtttaagcagatggattacagtactagagtacaacactaccccattgaagttctcgaattaattattccaaattgtttttatataaacatgaaaaaacagatgaaagtgacatggatgggagagaagacggtagtggtatgcataacatgtagcaagaaaagagagacaatggtgcagctttgtaaagtgttggagtctttgaatctcaacattctcactactaacttctcttccttcacctctcgtctctccaccaccctcttcctccaggtcactctctccctctctccctctctcatatctttatttggcaatgtgattactagtacaaactacaaaattctaaatgcatctagagaatactgtacgtgtcttgttttggtttga

SEQ ID NO: 1941 - DNA, 2487 bp, Arabidopsis thaliana
  Clone ID: AT_F13K23.C1.o9.tg
atggagagtagagaggattcattcatatcaaaagagaagaaatcaactatgaaaaaagaaaaacaagcgattgcatcacaaagaaatagaagaagagtaattaaaaatagaggaaacgggaagcgattgattgcatcattatcacaacgaaagagaagaagaatacctagaggaagaggaaacgagaaggcagtgtttgcaccatcatcactaccaaacgatgttgtagaggaaatcttcttacgacttccggtgaaagcaataatccaactaaagtctctctcaaaacaatggagatcgacgatcgagtctcgcagttttgaagagagacacttgaagatcgtcgagcgatcacgcgtggattttccacaggtcatggtcatgtctgaagaatattccttgaaaggaagtaaaggtaatcagcctcgtccagatacagacattggttttagtacaatctgtttggaatcggcttctattctgtcctccactcttatcactttccctcaaggatttcaacaccggatctatgcttctgaaagctgtgacggacttttctgcatccattccctaaaaacacaagccatatatgtagttaacccggccactcggtggtttcgacaacttcctccggctaggtttcagattttgatgcaaaagttataccccactcaagacacttggattgacataaaaccagtagtctgttatacagcattcgtgaaggccaatgattacaaattagtgtggttgtataattctgatgcctcgaatccaaacctgggagttacaaagtgcgaggtttttgattttagggcaaacgcttggaggtacttgacttgcactccaagctatcggatattccctgaccaagtaccagcagctacaaacgggtctatttattggttcacggaaccatataatggcgaaataaaagtggtagctctcgatattcacactgaaacgtttcgtgtgctacctaagattaatccggccattgctagttcagatcctgaccatatcgacatgtgcactttggataatggtttgtgcatgtcgaaaagagaatcggatacgttggtccaagagatatggaggttaaaatcatcagaagactcatgggagaagtttgacatgaacagcgacggtgtttggcttgacggctccggtgaatctccggaagttaataacggtgaagctgcgtcttgggtcagaaacccagatgaagactggttcaataacccaccaccaccacaacacactaatcaaaacgacttcagattcaatggtggctttcctttaaacccctcagagaatctgcttcttcttcttcagcaatcgattgattcttcttcttcttcttctccgttattacatcctttcacactcgacgctgcttcacagcaacaacaacaacaacaacaacaacaggaacagtctttcttagctacgaaagcttgtatagtttctcttctcaacgtcccaaccatcaataacaacactttcgatgacttcggctttgactctggtttcttaggacaacaattccatggaaatcatcaatctccgaactcgatgaatttcactggcttaaaccactcagtaccggattttcttccagctccggaaaacagctcaggatcatgtggattgagtcctctgttctcaaacagagcaaaggttttaaaaccgttacaggtaatggcttcatctggctcgcagccaactctgtttcagaaacgagctgcaatgcgtcagagctcgagtagcaaaatgtgcaattctgagagttcttctgaaatgaggaaatcgagctacgagagagagattgacgatactagtaccggaatcatcgatatctctggattgaattacgaatctgatgaccataatactaataacaacaaaggtaagaagaaaggaatgcctgcaaagaatcttatggctgagagaagaagaaggaagaagcttaatgataggctttacatgcttagatcagttgttcccaagatcagcaaaatggatagagcatcaatacttggagatgctattgattacctcaaagagcttttacaaagaatcaacgatcttcacaccgaacttgaatctactccaccgagttcttcaagcttgcatccgttaacaccgactccacaaacgctgtcttaccgtgttaaggaagagttgtgtccatcttcctccttgccaagtcctaaaggccaacaaccaagagttgaggttagattaagagaaggaaaggcagtgaacatacacatgttctgtggacgtagaccaggtcttttactttccaccatgagagctttggataacttaggattggatgttcaacaagcggtgattagctgtttcaatggttttgctttggatgttttccgcgctgagcaatgtcaagaagaccatgacgtgttacctgaacaaatcaaagcagtgcttttagatacagcaggttacgctggtttggtttga

SEQ ID NO: 1942 - DNA, 897 bp, Arabidopsis thaliana
  Clone ID: AT_F28G11.C1.o9.tg
atggcactcgttaatgaccatcccaacgagaccaattacttgtcaaaacaaaattcctcctcttccgaagatctctcctcgccgggactggatcagccagatgcagcttatgccggtggaggaggaggaggaggctcggcttcgagcagtagcacgatgaattcagatcatcaacaacatcaggggtttgtattttacccatccggtgaagatcatcacaactctttgatggatttcaacggatcatcatttcttaactttgatcatcacgagagctttcctcctccagccataagctgtggtggtagtagcggtgggggcggcttctccttcttggagggcaacaacatgagctacggcttcacaaactggaatcatcaacatcatatggatattattagccctagatccaccgaaactccccaaggccagaaagactggttatattctgattcaactgttgtaaccactggttctagaaacgagtctctttcgcctaaatccgctggaaacaaacgttctcacacgggagagagcactcaaccgtcgaagaaactgagtagcggtgtgaccggaaagaccaagcctaagccaacaacttcacctaaagatccacaaagcctagcagccaagaatcgaagagaaaggataagtgaacgtctcaagatattgcaagaacttgttcccaatggcaccaaggttgatttggtgacaatgcttgaaaaggctattagttatgtcaagttccttcaagtacaagttaaggtattagcgaccgatgagttttggccggctcaaggaggaaaagctcctgacatttctcaagttaaagacgccattgatgccattctctcctcatcacaacgagacaggaattcgaatctgatcaccaattaa

SEQ ID NO: 1943 - DNA, 762 bp, Arabidopsis thaliana
  Clone ID: AT_F24I3.C1.o50.tg
atgtgtgcattagtcccttcatttttcacaaacttcggttggccgtcaacgaatcaatacgaaagctattacggtgccggagataacctaaataacggcacatttcttgaattgacggtaccacagacttatgaagtgactcatcatcagaatagcttgggagtatctgtttcgtcagaaggaaatgagatagacaacaatccggttgtggtcaagaagcttaatcacaatgctagtgaacgtgaccgacgcaagaagatcaacactttgttctcatctctccgttcatgtcttccagcttctgatcaatcgaagaagctaagtattcctgaaacggtttcaaagagcttaaagtacataccagagctgcaacagcaagtgaagaggctaatacaaaagaaggaagaaattttggtacgagtatcgggtcaaagagactttgagctttacgataagcagcaaccaaaggcggtcgcgagttatctctcaacggtttctgccactaggcttggtgacaacgaagtgatggtccaagtctcatcgtccaagattcataacttttcgatatcaaatgtgttgggtgggatagaagaagatgggtttgttcttgtggatgtttcatcatcaagatctcaaggagagaggctcttctacactttgcatcttcaagtggagaatatggatgattacaagattaattgcgaagaattaagtgaaaggatgttgtacttgtacgagaaatgtgaaaactcgtttaactag

SEQ ID NO: 1944 - DNA, 903 bp, Arabidopsis thaliana
  Clone ID: AT_C7A10.C1.o820.tg
atgaccacatggcttaagtggctgcaacagcaacaaatggtttcacctgagtttcttcagatacttggctcagatgggagagaagagctcaaaagagttgagagttacttgggaaacaacaatgatgagctgcagagtttcagacattttcccgaattcggaccggattatgatactactgatggctgcatttctaggacaagtagcttccatatggagccagtgaagaataatggacacagcagagccattaccttgcagaacaagagaaaaccagagggtaagacagaaaagagagagaagaagaagatcaaagcagaggatgaaacagagccaagcatgaaagggaaatcaaacatgagtaacacagagacatcttcagaaattcagaaaccagattacattcatgttagggctagacgaggtgaagccaccgacagacatagcttagcagagagggcaagaagagaaaagataagcaagaagatgaaatgtctacaagatattgttcctggatgcaacaaagttactggaaaagctggtatgcttgatgagatcatcaactatgtccaatctctgcaacaacaagtcgagttcttgtcgatgaaactctctgtcataaatccagaacttgagtgtcatatcgatgatttatccgcaaaacagtttcaggcttacttcacaggtcctccagaaggtgactcgaagcagtcaatcatggcggattttcggtcttttccattacatcagcaaggatctttagattactcagtcataaactcagaccacaccacatctctcggcgctaaagatcatacatcatcaagctgggaaactcactcacagtgtctttacaacagcttgagaaccgattctgtttccaatttcttcagcctcaagtaa

SEQ ID NO: 1945 - DNA, 933 bp, Arabidopsis thaliana
  Clone ID: AT_T10P11.C1.o13.tg
atggctagtaacaaccctcacgacaacctttctgaccaaactccttctgatgatttcttcgagcaaatcctcggccttcctaacttctcagcctcttctgccgccggtttatctggagttgacggaggattaggtggtggagcaccgcctatgatgctgcagttgggttccggagaagaaggaagtcacatgggtggcttaggaggaagtggaccaactgggtttcacaatcagatgtttcctttggggttaagtcttgatcaagggaaaggacctgggtttcttagacctgaaggaggacatggaagtgggaaaagattctcagatgatgttgttgataatcgatgttcttctatgaaacctgttttccacgggcagcctatgcaacagccacctccatcggccccacatcagcctacttcaatccgtcccagggttcgagctaggcgtggtcaggctactgatccacatagcatcgctgagcggctacgtagagaaagaatagcagaacggatcagggcgctgcaggaacttgtacctactgtgaacaagaccgatagagctgctatgatcgatgagattgtcgattatgtaaagtttctcaggctccaagtcaaggttttgagcatgagccgacttggtggagccggtgcggttgctccacttgttactgatatgcctctttcatcatcagttgaggatgaaacgggtgagggtggaaggactccgcaaccagcgtgggagaaatggtctaacgatgggactgaacgtcaagtggctaaactgatggaagagaacgttggagccgcgatgcagcttcttcaatcaaaggctctttgtatgatgccaatctcattggcaatggcaatttaccattctcaacctccggatacatcttcagtggtcaagcctgagaacaatcctccacagtag

SEQ ID NO: 1946 - DNA, 876 bp, Arabidopsis thaliana
  Clone ID: AT_K14B15.C1.o10.tg
atgcaaacaaatgaagataacatatttcaggattttgggtcttgtggtgtgaatctgatgcagccacaacaagaacaatttgattcttttaatggaaatcttgagcaagtttgtagtagctttagaggaggaaacaatggagttgtttatagtagtagcattggatcagcacaattggatttggctgcatcgtttagtggagttttgcagcaagagacacatcaagtctgtggctttagaggacaaaacgacgattctgcagtgcctcatttgcagcagcaacaaggacaggtgtttagtggtgtagtggaaatcaattcttcgtcatctgttggagctgttaaggaagagtttgaggaagaatgttcggggaagaggagacgaactggatcatgtagcaagccaggaaccaaagcctgtcgcgagaaactaagaagggaaaagctaaatgacaagttcatggacttgagctctgttttagagcctggcaggactccaaagacggataaatcagctatactcgacgatgcaatccgggttgtgaatcagcttagaggtgaagctcatgagcttcaagaaaccaaccaaaagcttctagaagagatcaagagtctaaaggcggataaaaacgagctacgagaggaaaagctggtgttgaaggcggagaaggagaagatggagcaacagttaaaatctatggtggttccatcaccaggtttcatgccctcccagcatccagcagctttccattcccataagatggcggtggcttacccttacggctactatcctccaaacatgccaatgtggtcacccttacctcctgctgaccgtgatacgtctcgtgatctcaaaaatcttcctcctgttgcttaa

SEQ ID NO: 1947 - DNA, 1791 bp, Arabidopsis thaliana
  Clone ID: AT_F24D7.C1.o16.tg
atggcaaccggagaaaacagaacggtgccggacaatctaaagaaacagctcgcagtttcagttcgaaacattcaatggagttatggaatcttctggtctgtctctgcttctcaaccaggagtgttggagtggggagatggatattacaatggagacataaagacaaggaagacgattcaagcagcagaagtcaaaattgaccagttaggtcttgagagaagtgagcagcttagagagctttatgaatctctctccctcgctgaatcctcagcttccggtagctctcaggtcactagacgagcttccgccgccgctctctcaccggaggacctcaccgacaccgagtggtactacttagtatgcatgtctttcgtcttcaacatcggtgaaggaatccccggaggagcgttatccaatggagaaccaatatggctttgtaacgctgaaaccgccgatagcaaagtcttcactcgttctcttctagctaaaagtgcttcgcttcagacagtggtttgcttcccgtttcttggaggagtccttgagattggcacgaccgaacatattaaagaggacatgaacgtgatacaaagtgttaagacgttgttccttgaagctcctccatatactacaatatcgacaagatcagactatcaagaaatttttgatcccttaagtgacgataaatacactccggtgtttataaccgaagcttttccaacaacttctactagcgggtttgagcaagaacctgaggatcatgattcgttcatcaacgatggtggtgcgtctcaggtacaaagctggcagtttgtgggtgaagaaatcagtaactgcattcaccaatcgttaaattcaagcgattgcgtttcccaaacgtttgttggaacaaccgggagacttgcttgcgatccaaggaagagtaggattcaacggttaggtcagattcaagaacagagtaaccatgtaaatatggacgacgatgttcattaccaaggcgtgatatcgacgattttcaaaacaacgcatcagctaatactcggaccgcagtttcagaacttcgataagcggtctagcttcacaaggtggaagcgatcatcatctgtgaaaacattgggagagaaatcgcagaagatgataaagaagatactcttcgaggttcctttgatgaacaagaaagaagagttgttaccggacacaccagaggaaaccgggaaccatgccttgtccgagaagaaacgccgcgagaaattgaatgaacggtttatgacattgagatcaatcattccctcaattagtaagattgataaagtgtcgattcttgatgatacaattgagtatcttcaagatttacagaaacgggttcaagagttggaatcttgtagagaatctgctgatacagagacacggataacgatgatgaagaggaagaaaccggatgatgaggaggaaagagcatcagcgaattgtatgaacagcaaaaggaaggggagtgatgtgaatgtaggagaagatgaaccagctgatatcggttatgctggtctaacggataacttaaggatcagttcattaggtaacgaggtggttattgagcttagatgcgcttggagagaagggatattgcttgagataatggatgtgattagtgatctcaacttggattctcactcggttcagtcgtcaaccggagacggtttactctgcttaactgtcaattgcaagcataaagggacaaaaatagcaacaacaggaatgatccaagaggcacttcaaagggttgcatggatatgttaa

SEQ ID NO: 1948 - DNA, 1080 bp, Arabidopsis thaliana
  Clone ID: AT_F21F14.C1.o120.tg
atggaaaggtttcaaggacacatcaacccctgtttcttcgatcgaaaaccggatgtgagaagcctcgaggttcaaggatttgcagaggctcaaagctttgctttcaaagaaaaagaggaagaaagcttacaagatacagttccatttctacagatgctgcaaagtgaagacccctcatcgtttttttcaatcaaagagccaaactttctgacgctactgtctcttcaaaccctcaaggagccttgggaactcgaaagatatctttcacttgaggattcacaatttcattcaccggtccaatctgagaccaaccgcttcatggaaggagccaatcaagctgtgtcaagccaagaaattccctttagccaagcaaacatgacactcccttcttctacctcatcaccactcagtgcacattcaagacgaaagcgcaaaatcaaccacttgctgcctcaagaaatgactagagaaaagagaaagaggaggaaaacaaaaccaagtaaaaacaatgaagagattgagaatcaaagaataaaccacattgctgttgaacgaaacagaagacgtcaaatgaacgaacatatcaactctctccgggcccttctcccaccttcctacatccaacgaggagaccaagcttccatagtaggaggagcaataaactacgtgaaggtcctcgagcaaatcatacaatctctcgaatcgcaaaagagaacgcaacaacaaagtaacagtgaggtagtagaaaacgcacttaatcatctctcaggcatttcgtcgaacgacctgtggacaactcttgaagatcaaacttgtatccccaaaatcgaagctacagtgatacaaaaccatgtcagccttaaagttcaatgtgagaagaaacaaggacaacttctcaaaggaatcatatcacttgaaaagcttaaactcactgttcttcatctcaatatcactacttcgtctcattcctctgtttcttattccttcaacctcaagcagatggaagatgagtgcgacttagagtcagccgacgagattacggcggctgttcatcggattttcgatattccgacaatttga

SEQ ID NO: 1949 - DNA, 1104 bp, Arabidopsis thaliana
  Clone ID: AT_F6I18.C1.o110.tg
atggtaaatttggtaaacgtatttaacatgtcaaagtcaaacccttcaaatctcaaatattacaatctccatccctcttttaaacaccataaagccttaaacctcaaaagacatttcaacaacattcattttcattctcactccccaccaaaaaaaaaaaaaacagaagccatgaactcctcgtctcttctaactccttcatcatctccttctccacatcttcaatctcctgcaacattcgaccacgatgatttcctccaccacatcttctcctccactccttggccctcatccgttctcgacgacactcctccaccaacttccgattgtgcccccgtcactggattccaccaccacgacgccgattcaagaaaccagatcactatgattcctttgtcacataaccatcctaatgacgctctcttcaatggcttctccaccggatctctccctttccacctccctcaaggatcgggaggtcaaacgcaaacgcagtcgcaggcgacggcgtcagccaccaccggtggtgcaacggcgcaacctcagacaaagcctaaagtccgagctaggagaggtcaagccactgatcctcacagtatcgccgaacggttacggagagagaggatagcggaaagaatgaaatctcttcaagaacttgtccctaatggtaacaagacagacaaagcatcaatgctcgatgagattatcgattatgtcaagttcttacagctccaagtcaaggtactaagcatgagtagactgggcggtgctgcttctgcttcttctcaaatctctgaggatgccggtggatcccacgaaaacacctcctcctccggcgaggcgaagatgacggagcaccaagttgcaaagctaatggaagaggacatgggatcagccatgcaatatctacaaggcaaaggtctttgcctcatgcccatctcgttagccaccaccatctccaccgccacgtgtccttctcgtagccccttcgttaaagataccggcgttcctttgtctcctaacctatccactacaatagttgctaacggtaatggctcatcgttggtcaccgttaaagacgctccctccgtttccaagccgtga

SEQ ID NO: 1950 - DNA, 789 bp, Arabidopsis thaliana
  Clone ID: AT_T8A17.C1.o70.tg
atgcaaccaacatccgtcggtagtagcggcggtggtgacgacggaggaggcagaggaggaggaggagggctaagtagaagtggactatctcggatccgttcagctccagcgacttggcttgaagctttacttgaggaagatgaagaagagtctttgaaacctaatcttggtctcaccgatttgcttaccgggaactcgaacgatttaccgacaagtcgcggctcgttcgagttcccgattcctgttgagcaagggttgtatcaacaaggtgggtttcaccgacagaatagtactccggcggattttcttagtggttctgatggatttatccaaagctttgggattcaggcgaattacgattacttatcggggaatatcgatgtttctccgggaagtaagcggtctagagaaatggaagcactcttctcttctcctgagtttacttctcaaatgaaaggagagcaaagcagcggtcaagttcctaccggagtatcaagcatgtcggatatgaacatggagaaccttatggaggactctgttgcttttagggttcgggctaaacgtggttgcgcaactcatccccgcagcattgccgagagggtacgaaggacgcggattagtgatcggataaggaagctacaagagcttgtacctaacatggacaagcaaaccaacactgcagacatgttagaagaagcagtagaatacgtgaaagttcttcaaaggcagatccaggagttaacagaagaacagaagaggtgcacatgcatacctaaggaagaacaataa

SEQ ID NO: 1951 - DNA, 1140 bp, Arabidopsis thaliana
  Clone ID: AT_T10K17.C1.o10.tg
atggatctgactggaggatttggagctagatccggcggtgttggaccgtgccgggaaccaataggccttgaatcgctacatctcggtgacgaatttcggcaactagtgacgactttacctcccgagaaccccggcggttcgttcacggctttgcttgagcttccacctacacaagcagtggagcttctccatttcactgattcttcgtcttctcaacaagcggcagtgacagggatcggtggagagattcctccgccgcttcactctttcggtgggacattggcttttccttctaactcagttctcatggagcgagcagctcgtttctcggtgattgccactgagcaacaaaacggaaatatctccggggagactccgacgagctctgtaccttccaattcaagtgctaatctcgacagagtcaagacggagcctgctgagaccgattcatctcagcggttgatttctgattcagcgattgagaatcaaatcccttgccctaaccagaacaatcgaaatgggaagaggaaagatttcgaaaagaagggtaaaagctcgacgaagaagaacaaaagctctgaagagaacgagaagctgccatatgttcacgttagagctcgtcgtggtcaagcaaccgatagccatagcttagcagaacgagcaagaagagagaagataaatgcacgaatgaagctgttacaggaactggtcccaggctgtgataagattcaaggtaccgcgctggtgctggatgaaatcattaaccatgtccagtcattacaacgtcaagtggagatgctatcaatgagacttgctgcggtaaaccccagaatcgacttcaatctcgacaccatattggcttcagaaaacggttctttaatggatgggagcttcaatgccgcaccaatgcagcttgcttggcctcagcaagccattgagaccgaacagtcctttcatcaccggcaactgcaacaaccaccaacacaacaatggccttttgacggcttgaaccagccggtatggggaagagaagaggatcaagctcatggcaatgataacagcaatttgatggcagtttctgaaaatgtaatggtggcttctgctaatttgcacccaaatcaggtcaaaatggagctgtaa

SEQ ID NO: 1952 - DNA, 1344 bp, Arabidopsis thaliana
  Clone ID: AT_F16D14.C1.o6.tg
atgggttgtttcgatcccaacactccagcagaagttacggtggagagtagcttctctcaagccgaaccaccaccaccaccaccgcaagttctggttgccggaagcacaagcaacagcaactgcagtgttgaggtagaagagctctctgaattccatctcagcccacaagattgtcctcaagcttcttcaacacctctccagtttcacatcaatcctcctcctccaccacctcctccttgtgatcaactccacaacaatttgattcaccaaatggcttcacatcaacaacaacactctaattgggataatgggtatcaggattttgtgaatttgggacctaactctgcaacaactcctgatttgcttagtctcttacacttgcctagatgctcattgcctcctaatcatcatccttcctctatgctacctacctctttctcagacattatgtcttcttcttctgctgctgctgttatgtacgaccctctcttccatttgaatttccctatgcagcctagagatcagaaccagctaagaaacggctcttgtttacttggagttgaagatcaaattcagatggatgctaatggaggaatgaatgttttgtactttgaaggagcaaacaacaacaatggtggatttgagaatgagattcttgagtttaacaatggagttactcgtaaaggaagaggatcaagaaagtcgagaacttcccctacagaacgtgagagacgagttcacttcaatgatcgtttcttcgacttaaagaacctcattccaaatcccacaaagattgatagagcatcgatagttggagaggcgatagattacatcaaagagcttttaaggacaatagaggagtttaagatgcttgtggagaagaagagatgtgggagattcaggagcaagaagagagctagagttggtgaaggaggaggaggagaagatcaagaagaagaagaagacactgtgaattacaagccacagagcgaagtagaccagtcttgcttcaacaagaacaacaacaactcactgagatgttcatggcttaagaggaaatcgaaagtcactgaggtcgatgtacgtataatcgatgatgaagtaaccatcaagcttgttcagaagaagaagattaactgtttgttgttcaccaccaaagttcttgatcagcttcagctagatcttcaccatgttgcaggtggacagattggtgaacattacagcttcttgttcaacactaagatttgtgaaggatcttgtgtgtatgcaagtggaattgcagacacattgatggaggtcgtggagaagcagtacatggaagctgttcctagcaacggctactag

SEQ ID NO: 1953 - DNA, 492 bp, Arabidopsis thaliana
  Clone ID: AT_T30C3.C1.o70.tg
atggagaagttagtacataaagaaattgagaaacgaaggagacaagaaatggcttctctctacgcgtctctccgctctcttctccctttagagttcatccagggaaaacgttcaacgtcagatcaggtgaaaggggcagtgaattacatagactatttgcaaaggaatatcaaagacataaattccaagagagatgacctcgtgttattgtctggacgaagctttaggagtagtaatgaacaagaatggaatgagatttcgaatcatgtcgtgattcgtccgtgtttggtcggcatagagatagtgttgagcattctccaaacgccattctcaagcgttctgcaagtgcttcgtgaacacggtctctatgttcttggctacatctgttccagtgtaaatgatagactcattcatactctacaggctgaggtcaacgatctggctttgatcgacttagcagaccttaaggatacacttaccctgatgaagtaa

SEQ ID NO: 1954 - DNA, 924 bp, Arabidopsis thaliana
  Clone ID: AT_K22F20.C1.o40.tg
atgtcactcattaacgaacattgcaatgagcgtaattacatctcaaccccaaattcttcagaagatctctcttcaccacagaattgcggattagacgaaggagcttcagcttcaagcagtagcaccataaattctgatcatcaaaataatcaagggtttgtgttttacccttccggggaaaccattgaagatcataattctttgatggatttcaatgcttcatcattcttcacctttgataatcaccgaagccttatctctcccgtgaccaacggtggtgccttcccggtcgtggacgggaacatgagttacagctatgatggctggagtcatcatcaagtggatagtattagccctagagtcatcaaaactccaaatagctttgaaacaacgagcagttttggattgacttcaaactccatgagtaaaccggccacaaaccatggaaatggagactggttatactctggttcaactattgtaaacatcggttcaaggcacgagtccacgtcccctaaactggctggcaataaacggcctttcacgggagagaacacacaactttcaaagaagccgagtagcggtacgaatggaaagatcaagcctaaggcaacaacttcacctaaagatccacaaagcctagcagccaagaaccgaagagaaaggataagcgaacgcctcaaggtattgcaagaacttgtaccgaatggtaccaaggtggatttggtaactatgcttgagaaagcaattggctatgtaaagtttcttcaagtacaagttaaggtacttgcagccgatgagttttggccggcacaaggagggaaagctccggacatttctcaagttaaagaagctattgacgcaatcctctcatcatcacaacgagatagtaactcaactagagaaacaagtatagcagaataa

SEQ ID NO: 1955 - DNA, 681 bp, Arabidopsis thaliana
  Clone ID: AT_MUL3.C1.o10.tg
atggaggatatcgtcgaccaagaattaagcaattactgggaacctagctccttcctccaaaacgaagacttcgaatacgacagaagctggcctttggaagaagccatttctgggtcgtatgattcgagttcgccggatggagctgcttcgtcgccggcttctaagaatattgtgtcggagagaaacagaagacagaaacttaaccagagactcttcgctcttcgatcagttgttcccaatatcactaagatggataaagcctcaataatcaaagatgctattagttacatagaaggattacaatatgaagaaaagaagctcgaagctgagatcagagaacttgaatctacaccaaagagtagccttagtttcagcaaagattttgatcgtgatttacttgttcctgtcacatccaagaagatgaagcagcttgattctggttcttccacttctctcatcgaagttctcgaattgaaggtaacattcatgggagagaggacaatggtggtgagtgtaacatgtaataagaggacagatacaatggtgaaactgtgtgaagtctttgagtcattgaatctcaaaatcctcacttccaatctcacctctttctctggcatgatcttccacactgtctttattgaggtcagcatctttctctctctatctctcttgtctctctaa

SEQ ID NO: 1956 - DNA, 1086 bp, Arabidopsis thaliana
  Clone ID: AT_MYM9.C1.o2.tg
atggacaaggaaacagagcaaaccctaaattacttacctttgggtcagagcgatccctttggcaatggcaatgaaggaacaattggagatttccttggaagatactgcaacaaccctcaggagatttcaccgttaactctacaatccttctctctgaattctcagatctccgagaatttcccaatctctggtggaatcagattccctccatatccaggtcaatttggatccgatcgtgaatttgggtcacaaccaacaacgcaggagagtaacaagagctctttgttggatccagattcagtttcggatcgagttcacaccacgaaatctaactctagaaagaggaagtcgattcctagtggtaatggcaaggagtctccagcttcatcgtctcttacagcttccaattcaaaggtttcaggagagaatggtggatctaaaggtgggaagagaagcaagcaagatgtagctgggagtagtaaaaacggagtagagaagtgcgatagtaaaggcgacaataaggacgatgctaagcctcctgaggcgcctaaagattatattcatgtcagagctagaaggggtcaagcaactgatagccatagtcttgctgaaagagcaagaagagaaaagattagtgagagaatgacgttgcttcaggatctggttcctggttgcaaccggattacagggaaagcagtcatgcttgatgaaattataaattatgtgcagtccttgcagagacaagttgagttcttgtccatgaagctggctaccgtaaatccaaggatggagtttaatgctaatgcttctttatccacagagatgattcaaccgggggagtcgttaacgcagtctctttacgcaatggcttgctcagagcaaagacttccatcagcatactattcacttggcaagaacatgccaagattctcagacacacaattcccctcaaacgatggatttgttcacactgagacaccaggattctgggaaaataatgacctgcaaagcattgttcagatgggttttggagatatcctccagcaacagagcaacaacaacaacaacaactgtaagaaaaattag

SEQ ID NO: 1957 - DNA, 885 bp, Arabidopsis thaliana
  Clone ID: AT_K19E1.C1.o1.tg
atgcaggagataataccggattttcttgaagagtgtgaatttgtcgacacttcactagccggagatgatctatttgccatcttagagagtcttgaaggtgccggagagatatctccgacagctgcatctacacctaaagatggaaccacaagttccaaggagttagttaaggatcaagattatgaaaactcatctcctaagaggaaaaagcaaagactagaaaccaggaaagaagaggacgaagaagaagaagacggagacggagaagcagaagaagataataagcaagatgggcaacaaaagatgtctcatgtaaccgtggaacgtaaccggagaaagcaaatgaacgagcacttaaccgttttgcgttctcttatgccttgtttctacgtcaaacggggggaccaagcatcgatcataggaggagttgtggagtacataagcgagttacaacaagttctccaatctttggaagccaagaaacaacgtaaaacctacgccgaagtcctaagcccgagagttgtcccgagccctcgtccttcaccgcctgttctaagcccaagaaaaccgcctcttagcccgcttagtagtaaccatgagagtagtgtgatcaatgagcttgttgctaactcaaaatcggctttggctgatgtggaagtgaagttttcaggagctaacgtgctgctcaaaacggtgtcgcataagatcccgggacaagttatgaagataattgctgctcttgaagatttggctcttgagattcttcaggttaatattaacaccgtcgacgaaaccatgcttaattctttcaccatcaagattggaattgagtgccaactaagtgcagaagaactggctcaacaaattcagcaaacattctgctag

SEQ ID NO: 1958 - DNA, 1248 bp, Arabidopsis thaliana
  Clone ID: AT_C7A10.C1.o430.tg
atgatatcacagagagaagaaagagaagagaagaagcagagagtgatgggagataagaaattgatttcatcttcttcttcttcctcggtttacgatactcgtatcaatcatcatcttcatcatcctccgtcttcttccgacgaaatctctcagtttctccggcatattttcgaccgttcttctcctttaccttcttactactccccggcgacgactacaacgacggcgtctttgattggtgtgcacgggagcggtgacccacatgcagataactcgagaagtctcgtttctcatcatccaccgtcagattctgtgcttatgtcgaaacgtgtcggagatttctctgaggttttaatcggcggaggatcaggctcagccgccgcgtgttttggtttctccggtggtggtaataataacaacgttcaaggaaatagctctgggactcgagtatcgtcttcttccgttggagctagtggcaacgagacagatgagtatgactgtgaaagcgaggaaggaggagaagctgtagttgatgaagctccctcttccaagtcaggtccttcttctcgtagttcatctaaaagatgcagagctgctgaagttcataatctctctgagaagaggaggagaagtagaattaatgaaaaaatgaaagctttacaaagtctcatccctaattcaaataagacggataaggcttcaatgcttgatgaagccattgagtatctgaaacagcttcagctccaagttcagatgttgactatgagaaatggaataaacttgcatcctttgtgtttacctggaactacattacacccattgcaactctctcagattcgaccccctgaagcaaccaatgatcctctgcttaatcataccaatcagtttgcttcgacttctaatgcaccggaaatgatcaatactgtggcttcttcatacgctttggaaccttctattcgcagtcactttggacctttccctctccttacttcacccgtggagatgagtcgggaaggtgggttaactcatccaaggttgaacattggtcattccaacgcaaacataaccgatcatcttcgtattgtatttgagagtttgatactcgatggctttggatatgtaaattaccccgataagcttctagagaagttttcgattctacaagatggatttggtatctttaaggttgaccatgttcttttggtatctcttgttctcaaattgatcatttacaatacaattttttaa

SEQ ID NO: 1959 - DNA, 804 bp, Arabidopsis thaliana
  Clone ID: AT_mfb13.C1.o40.tg
atggaccgatggttcgctgttcaagaggagagccatagagttggccacagcgtcactgcaagtgcgagtggtaccaatatgtcttgggcgtcttttgaatccggtcggagcttgaagacagctagaaccggagacagagactatttccgctctggatcggagatgaacaagagacaagaggagaagcaggtagatctaatggacgacggggacgagcagcagcgattcacaacgagtccgaaagggataaaccagaggatgagaacacttcagaagctgcttcctactgcaagtaaggcggataaagtctcaatcttggatgatgttatcgaacacttgaaacagctacaagcacaagtacagttcatgagcctaagagccaacttgccacaacaaatgatgattccgcaactacctccaccacagtcagttctcagcatccaacaccaacaacaacaacaacaacagcagcagcagcagcaacaacagcagcaacagtttcagatgtcgttgcttgcaacaatggcaagaatgggaatgggaggtggtggaaatggttatggaggtttagttcctcctcctcctcctccaccaatgatggtccctcctatgggtaacagagactgcaccaacggttcttcagccacattatctgatccatacagcgcctttttcgcacagacaatgaatatggatctctacaataaaatggcagcagctatctatagacaacagtctgatcaaacaacaaaggtaaatatcggcatgccttcaagttcttcgaatcatgagaaaagagattag

SEQ ID NO: 1960 - DNA, 1107 bp, Arabidopsis thaliana
  Clone ID: AT_T6L1.C1.o1.tg
atgtgcgctaagaaagaagaagaagaagaagaagaagaagacagttctgaagccatgaacaacatacaaaattaccaaaatgacctcttctttcaccaactcatctctcatcatcaccatcatcatcatgatccttctcaatctgaaactttgggagcatccggtaacgttggatctggtttcactatcttctctcaagattccgtctctccaatatggtctctacctccacctacctcgatccaaccaccatttgatcagtttcctcctccttcttcttctccagcatctttctacggaagtttcttcaacagaagtcgagctcatcatcagggattacagtttgggtacgagggttttggtggagccacgtcagcagcacatcatcatcatgaacaacttcggatcttgtcggaagctttaggtccggtagtacaagccgggtccggtccttttgggttacaagctgagttagggaagatgacagcacaagagatcatggacgctaaagctttggctgcttcaaagagtcatagtgaagctgagagaagaagaagagagagaatcaataatcatctcgctaagctccgtagcatattacccaacaccaccaaaacggataaagcgtcgttactagctgaagtgatccaacatgtgaaagagttgaagagagagacttcagtgatctcagagacaaatcttgtcccaacggaaagcgatgagttaacggtagctttcacggaggaggaagaaaccggagatggcagatttgtaattaaagcgtcgctttgctgtgaagacaggtcggatctcttgcctgacatgattaaaacattgaaagctatgcgtctcaaaacgctcaaggcggagataaccaccgttgggggacgagtcaagaacgttttgtttgttaccggagaagagagctccggtgaggaagtggaggaagagtactgtatagggacgattgaggaagctttgaaagcggtgatggagaagagcaatgtagaggaatcatcttcttctggaaatgctaagagacagagaatgagtagtcacaacactatcactatcgtcgaacaacaacaacaatataatcagaggtaa

SEQ ID NO: 1961 - DNA, 672 bp, Arabidopsis thaliana
  Clone ID: AT_F4F7.C1.o18.tg
atggcacggtttgagccatataactataataatggtcatgatcctttctttgcacacattaaccaaaatccagagctaataaatctggacttaccagcttctaccccttccagtttcatgcttttctccaatggagctttagttgatgccaatcacaataattctcacttcttcccaaatttattgcacggtaatacgagaagaaaaggaaataaagaagagagtgggtcgaagagaagaagaaagaggtcggaagaggaagaagccatgaatggagatgagactcagaagccaaaagatgttgttcatgtccgagctaagagaggtcaagctactgatagccatagtttggctgaaagggtacgaagagagaagatcaatgaaaggctgaaatgcttacaagaccttgttccaggatgctacaaggcaatgggaatggcagtgatgcttgatgtcatcatagattatgtacgatcactccagaatcaaatcgagtttttgtccatgaaactctcagcggcaagtgcatgttacgaccttaattctttggatattgagccaacggatatatttcagggagggaatattcatagtgcagcagagatggaaaggattttaagagaaagcgttggaacacagcctcctaatttcagttcaacattacccttttga

SEQ ID NO: 1962 - DNA, 777 bp, Arabidopsis thaliana
  Clone ID: AT_T22C5.C1.o16.tg
atggacgtttttgttgatggtgaattggagtctctcttggggatgttcaactttgatcaatgttcatcatctaaagaggagagaccgcgagacgagttgcttggcctctctagcctttacaatggtcatcttcatcaacatcaacaccataacaatgtcttatcttctgatcatcatgctttcttgctccctgatatgttcccatttggtgcaatgccgggaggaaatcttccggccatgcttgattcttgggatcaaagtcatcacctccaagaaacgtcttctcttaagaggaaactacttgacgtggagaatctatgcaaaactaactctaactgtgacgtcacaagacaagagcttgcgaaatccaagaaaaaacagagggtaagctcggaaagcaatacagttgacgagagcaacactaattgggtagatggtcagagtttaagcaacagttcagatgatgagaaagcttcggtcacaagtgttaaaggcaaaactagagccaccaaagggacagccactgatcctcaaagcctttatgctcggaaacgaagagagaagattaacgaaaggctcaagacactacaaaaccttgtgccaaacgggacaaaagtcgatataagcacgatgcttgaagaagcggtccattacgtgaagttcttgcagcttcagattaagttgttgagctcggatgatctatggatgtacgcaccattggcttacaacggcctggacatggggttccatcacaaccttttgtctcggcttatgtga

SEQ ID NO: 1963 - DNA, 1473 bp, Arabidopsis thaliana
  Clone ID: AT_T2G17.C1.o2.tg
atgcatcattttgtccctgacttcgataccgatgatgattatgtcaacaaccataattcttctttgaatcatcttcctagaaaatccattactactatgggtgaagatgatgatcttatggagcttttatggcagaacggtcaagttgttgttcaaaaccagagacttcacaccaagaaaccttcttcttctccaccgaagcttcttccttctatggatcctcagcagcaaccttcttcagatcagaatctttttattcaagaagatgaaatgacttcttggcttcattatcctctccgtgacgatgatttctgctcagatcttctcttctccgccgcacctactgcgacggctaccgcgacggtgagtcaagtcaccgccgcgagaccgccagtatcttcgacgaatgagtcgaggccgccggtgaggaacttcatgaatttctcgaggctgagaggggattttaataacggtagaggtggtgaatctggaccgttgctttcgaaggcggttgtgagagaatctacgcaggtaagtcctagcgcaacaccgtcggcggcggcgagtgaatccggtttaacacggcggacggatggtactgacagttccgccgtagctggaggcggcgcgtataatcggaagggaaaagcagtggctatgacggcgccggcgatcgagataaccggtacatcgtcatctgtagtgtcaaagagcgaaatcgaaccggagaagacgaacgtcgatgataggaaacgaaaagagagagaagccaccactactgatgaaactgaatcccgtagcgaggaaacaaaacaagcacgtgtatcaacaacatctaccaagagatctcgtgctgctgaagttcataatctctctgaaagaaaacggagagataggatcaatgagagaatgaaagctttgcaagaacttatacctcgctgcaacaagtcagataaagcttcgatgctagatgaagctattgagtacatgaaatctcttcagcttcaaatacagatgatgtcaatgggatgtggaatgatgccaatgatgtatccgggcatgcaacagtacatgcctcatatggcgatgggtatgggtatgaaccagcctattcctcctccttccttcatgccattccccaacatgttagccgctcaaagacctttgcctacacaaactcacatggccgggtcaggaccgcaataccctgttcatgcttctgacccgtcaagagtctttgtaccgaaccagcagtatgatccaacctcgggccagcctcagtatccagctggttacacggatccatatcagcagttccgcggtctccacccgacccaaccacctcagtttcagaatcaagcaacatcgtacccaagttcgagcagggtgagtagtagtaaggaatctgaggatcacggaaaccacacaacagaatcaagcaacatcgtatccaagttcgagcagggtgagtag

SEQ ID NO: 1964 - DNA, 948 bp, Arabidopsis thaliana
  Clone ID: AT_F14J22.C1.o15.tg
atgactaatgctcaagagttggggcaagagggttttatgtggggcatatccaattctgatgattccggaggtggttgcaaaagaatcgagaaagaaccgcttccatcacatccgtctcatccgtcgccagagatccagactacgacggttaaaaagggaaaaaagagaacgaaaagaaatgataaaaaccatgaagaagaatcacctgatcatgaaatacatatatggaccgaaagagaaaggagaaagaagatgagggacatgttttctaaattacatgctttgcttccccaacttcctcctaaggcagacaaatcaacaattgtagatgaagcagtgagttcaatcaaatcccttgaacaaactttgcaaaaacttgaaatgcaaaagcttgagaagcttcagtattcttctgcctcaacaaacacaactcctactacaacttttgcttatgctccatcatcatcctcttctccaacagctctcctcacaccaatatcaaaccatcccatagacgccaccgcaacagattcttaccctcgcgcagctttcttggccgatcaggtatcttcttccagtgccgctgctgcgaacctgccttacccttgtaatgatccgatcgtgaatttcgatacttggtcctcacgtaacgtggtgctgactatctgtgggaatgaagctttcttcaatttgtgtgtccctaaacacaaaccaggggttttcacttctgtttgttacttgtttgagaagtacaacatggaggttttgtttgctaatgtctcctctaatgttttctggagcacctacgtgatccaagcacaggtaaatccgagttgtgagaatcagttactgggaaatggtcttggagttgtagacgttttcaagcaagtttctcaagaactgtcccaaggcttatgcagagagattagcttggacttttcactttaa

SEQ ID NO: 1965 - DNA, 762 bp, Arabidopsis thaliana
  Clone ID: AT_T3K9.C1.o10.tg
atgcaaccagagacctcagatcagatgttgtactcgtttcttgccggaaacgaagtcggcggtggagggtactgcgtctccggcgactacatgacgactatgcagagcttatgtgggtcttcgtcgtcgacgtcatcgtattacccactggcgatctccggcatcggagaaacgatggctcaagacagagctttagctgctttgaggaaccacaaagaagctgagagaagaaggagagagaggatcaattctcatctcaacaagcttcgtaacgtactctcttgtaattctaagaccgataaagccacactgctcgccaaagtagttcaacgagtcagagaacttaaacagcaaaccctagagacctccgactccgaccaaacattattaccatcagagaccgacgaaattagtgttctacactttggagactattcaaacgacggtcatataatcttcaaagcctctctatgttgtgaagatagatcagatctcttgccggaccttatggagattctcaagtctcttaacatgaagactctccgagctgagatggtaaccattggtggtcggacaagaagtgttcttgtcgtagctgctgacaaagagatgcacggcgtcgagtctgtgcattttttgcaaaatgctctcaagtcgctgcttgagcggtcaagcaagtcgttgatggaacgtagttctggtggtggaggaggagaacggtcaaagcggcgtcgtgcgctggatcacatcataatggtgtga

SEQ ID NO: 1966 - DNA, 147 bp, Arabidopsis thaliana
  Clone ID: AT_MDJ14.C1.o1.tg
atggctgagaggagaaggaggaagaagcttaatgataggctttatatgcttagatcagttgtccccaagatcagcaaaatggatagagcatcaatacttggagatgcaattgattatctgaaggaacttctacaaaggatcaatgat

SEQ ID NO: 1967 - DNA, 1575 bp, Arabidopsis thaliana
  Clone ID: AT_F14J9.C1.o19.tg
atgcctctgtttgagcttttcaggctcaccaaagctaagcttgaatctgctcaagacaggaacccttctccacctgtagatgaagttgtggagctggtgtgggaaaatggtcagatatcaactcaaagtcagtcaagtagatcgaggaacattcctccaccacaagcaaactcttctagagctagagagattggaaatggctcaaagacgactatggtggacgagatccctatgtcagtgccatcactaatgacgggtttgagtcaagacgatgactttgttccatggttgaatcatcatccctcccttgatggatattgctctgatttcttgcgtgatgtgtcgtctcctgttactgtcaacgagcaagagagtgatatggcggtaaaccaaactgctttcccgttgtttcagagaagaaaggatggcaatgaatcagctcctgctgcttcttcgtcgcagtataacggtttccaatcgcattctctgtatggaagtgatagagctagagatcttcctagccaacaaaccaatccggatcggtttactcagacgcaggaaccactaattactagtaacaagcctagtttggtcaacttttcacatttcttacgccctgcaacttttgcgaagactactaataataaccttcatgacactaaagaaaagagtcctcaaagcccgccaaatgtgtttcagaccagagttcttggagctaaagactctgaagataaggttcttaacgagtctgttgcttctgctacgcctaaagataaccaaaaggcttgcctaatatcagaggactcatgtagaaaagaccaagagagtgaaaaagcagttgtatgttcttctgttggctcgggtaatagtctcgatggcccatccgaaagtccttcactttctttaaagagaaagcattcgaatattcaagacattgactgtcatagtgaagatgtggaagaagaatcaggagatggaagaaaggaagcaggtccatctcgaacgggtttgggttcaaagagaagccgctctgcagaagtgcataatctgtctgaaaggagacggcgtgataggatcaacgagaagatgcgtgccctgcaagaactcattccaaactgtaacaaggtggacaaagcttcgatgctagatgaagccatcgagtatctcaagtcactccaacttcaagtgcagatcatgtcaatggcgtctggttactatctgccaccggcggttatgttcccaccgggtatggggcattacccggcagcagctgctgcaatggcaatgggtatgggaatgccttatgcaatgggcttgcctgatttgagccgtggtggttcatcggttaaccacggaccacagttccaagtctcggggatgcaacaacaaccagtggcgatgggtattccacgtgtctctggtggtggtatctttgccggttcttcgacgattggcaatggctcgactagagatttatctggttctaaagatcaaacaacgacgaataacaacagtaacttgaaaccaataaagagaaaacaggggtcttctgatcagttttgtggatcgtcgtga

SEQ ID NO: 1968 - DNA, 1011 bp, Arabidopsis thaliana
  Clone ID: AT_T30D6.C1.o19.tg
atgtctgtacttgaaaggcttaaatgggtacaacagcaacaacagcaactgcaacaagttgtgtcccatagcagtaataattcacctgaacttcttcagatacttcagttccatggaagcaacaatgatgagttgttggagagtagtttcagccaatttcaaatgcttggatctggttttggaccaaactataacatgggttttggtcctccacatgaatccatttcaagaacaagtagctgccatatggaacctgtggatacaatggaggttttgttgaagaccggtgaagaaaccagagccgttgccttgaagaacaagagaaaaccagaggttaagacaagggaagagcaaaagacagagaagaagatcaaagtagaggctgagacagagtcaagcatgaaaggaaaatcaaacatgggaaacactgaagcatcttcagacacttcaaaggagacatcgaaaggagcttcagagaatcagaaattagattatatccacgtgagagctcgtcgaggccaagccactgacagacacagcttagcagaaagggcgagaagagaaaagatcagcaagaaaatgaaatatctgcaagatattgtgcctggatgcaataaggtcacaggaaaagctggtatgcttgatgagatcatcaattatgttcaatgtctccaaagacaagtcgagagaataagtctaattcttaaagagccatactttgcagttcctgtcgatgaaacttgctgtcttgaacccggaactagagcttgccgtggaagatgtatccgtaaaacagaccagcaaggatctctagatttgtctgcgataaacccgaaccaaacgacatctatcgaagctgtaagtacagctttatatgaaactgaaaaacttgtcagagtttttgttccttgtcaccatctggaagctgggaaactcaatcacagagtctctacaacacatctagcctcggttttcattactaagcaagattcattgaaacaacatggttga

SEQ ID NO: 1969 - DNA, 675 bp, Arabidopsis thaliana
  Clone ID: AT_F17I14.C1.o60.tg
atgaataattataatatgaacccatctctcttccaaaattacacttggaacaacatcatcaacagcagcaacaacaacaacaagaatgatgatcatcatcatcaacataataatgatccaatcggtatggccatggaccagtacacacagctccatatcttcaatcctttctcttcttctcatttccctcctctctcttcttccctcacaaccaccactcttctctccggagatcaagaagacgacgaagacgaagaagaacctctagaggaactcggtgctatgaaggaaatgatgtacaagatcgcagccatgcaatcggttgacatcgacccagcaaccgtcaagaaacccaaacgccgtaacgtgaggatctccgacgaccctcagagtgtggcggctagacatcgccgtgagagaatcagtgagaggatcagaattcttcagagactcgtgccaggtggcactaaaatggatacggcttcaatgctcgatgaagctatacgctatgtcaagttcttgaaacggcagatccggctactcaataataataccggatatactcctccgccgccgcaagatcaagcttctcaggcggtgacgacgtcatgggtttcaccgccaccaccgccaagtttcggccgtgggggaagaggagtaggagaattaatctag

SEQ ID NO: 1970 - DNA, 1200 bp, Arabidopsis thaliana
  Clone ID: AT_F16D14.C1.o5.tg
atgtatgaggaaagttcatgttttgatcctaattcgatggtggacaacaacggcggcttctgtgcggcggaaacaacttttacggtaagccaccagtttcaaccaccgcttggaagcacaacaaacagctttgatgacgatcttaagctcccaacaatggatgagttctctgttttcccttctgttatctctctcccaaactcagaaactcagaaccaaaacatcagcaacaacaaccatttgatcaaccaaatgattcaagaatcgaattggggtgtttctgaagacaactctaatttcttcatgaacacttcacatccaaacacaacaacaactccaatccctgatcttctcagcctcttgcatttgcctagatgctctatgtcattaccaagctctgatataatggcgggttcttgcttcacgtatgacccgctctttcacttaaaccttcctccacaacctccattgatcccttctaatgactactcagggtacttgcttggtattgataccaatactactactcaaagagatgagtctaatgttggagatgaaaataacaatgctcagtttgatagcggaatcatcgagtttagcaaagagattaggcgtaaaggaagagggaagcgaaagaacaaaccttttactacagaacgtgagcgaagatgtcacttgaatgagcggtacgaggccttgaaattgctcattcctagcccgagtaagggagatagagcatcaattcttcaagatggaatcgattacatcaacgagttacgcagaagagtaagtgagcttaagtatttggtagagaggaagagatgtggtgggagacacaagaacaatgaagtagacgacaacaataacaacaaaaacttggatgatcatggtaatgaagatgatgatgatgatgatgaaaacatggagaagaagccggagagcgatgtaatagaccaatgttcaagcaacaactcgctgagatgttcatggctgcagaggaaatcaaaagtaacagaagttgatgttaggattgttgatgatgaagtaacaatcaaagttgttcagaagaagaagatcaattgtttgttacttgtctccaaagtacttgatcagcttcagcttgatcttcaccatgttgccggaggacagattggtgagcattacagtttcttgttcaacaccaaggttagtgatcaatga

SEQ ID NO: 1971 - DNA, 1242 bp, Arabidopsis thaliana
  Clone ID: AT_F16A16.C1.o100.tg
atgacttggaaaccgaagatgcttatattatcccatgatctaatctcaccagaaaaatacatcatgggtgaagatgatatcgtggagctcttagggaagagcagccaagtagttacaagtagccagacacaaacaccctcttgcgatcctcctctcattctccggggcagcggaagcggggacggagaaggaaatggtcctctaccgcagcctccgcctcccctgtaccatcagcagagtctctttatccaagaagacgaaatggcttcttggcttcaccagcctaatcgccaagattatctctactcccaacttctttactccggagtagcctcgactcacccgcaaagtttggcctccctagaaccaccaccaccacctagggctcagtacattctggcggcggatagaccgaccggtcatattttggccgagagaagggcggagaattttatgaatatctcgaggcaaagagggaacatatttcttggcggtgttgaagctgtaccgtcgaactcgaccctgttgtcttcagccactgaatcaataccagcgactcacggcaccgagagtcgagcaacagtcactggcggagtatctcgtacttttgcagttcctggtcttggtccgaggggaaaggcggtggcgattgagacggcgggaacacaatcttgggggttgtgcaaggccgaaacagagccggttcagagacaaccagcgacggagacggatatcaccgatgaacggaagagaaaaacgagagaggaaacaaatgtcgaaaaccagggaactgaagaagctcgtgattcgacgtctagtaagaggtcacgagctgcaataatgcataaactctccgaaaggagacggagacaaaagattaacgagatgatgaaggctttgcaagaactccttcctcgctgcacaaagactgatagatcttccatgctggatgatgttatagagtacgtgaaatctctacagagccaaatacagatgttctcaatgggacatgttatgattccaccgatgatgtatgcggggaatatacaacaacagtacatgccccacatggccatgggtatgaatcggcctcctgcattcatacctttccctaggcaggctcatatggcggaaggtgtaggtcctgttgatttatttagagagaatgaagaaacagagcaagagacaatgtctcttctccttagagaagacaaaagaacaaaacagaaaatgttttcttga

SEQ ID NO: 1972 - DNA, 894 bp, Arabidopsis thaliana
  Clone ID: AT_F10O3.C1.o13.tg
atggctaataacaacaacatcccacatgatagcatctccgatccatctcctaccgacgatttcttcgagcagatcctcgggctttccaacttctccggttcttcaggttctggtctctctggaatcggcggcgtgggtccacctccgatgatgcttcagcttggttcaggcaacgaagggaatcataatcatatgggtgccattggaggaggtggacctgtagggtttcataatcagatgtttccgttgggattaagtctcgatcaagggaaaggacatggctttcttaaacctgatgaaactggtaaacgtttccaagacgatgttcttgataatcgatgttcctctatgaaacctccaatgtcacagccagctccaccaatgccgcatcaacagtctactattcggcctagagttagggctaggcgaggtcaagctaccgatccacatagcatcgctgagaggctccgaagggaaagaatagcagaacggatcaggtcgttgcaggaacttgtacctaccgttaacaagacagatagggctgctatgatcgacgagattgtcgattatgtaaagtttctcaggctccaagttaaggtcctgagcatgagccgtcttggtggagccggtgctgtcgcaccactagtcactgaaatgccattatcttcatcagttgaggatgagacgcaggccgtgtgggagaaatggtcaaacgatgggacagagaggcaagtggctaagctgatggaagaaaacgttggagcagcgatgcaacttttgcaatcaaaggctctttgcataatgccgatctcattggcaatggcgatttaccattctcagccaccagacacatcttcttcaatcgtcaaaccagagatgaatcctccaccgtag

SEQ ID NO: 1973 - DNA, 705 bp, Arabidopsis thaliana
  Clone ID: AT_K5F14.C1.o2.tg
atggtgtcacccgaaaacgctaattggatttgtgacttgatcgatgctgattacggaagtttcacaatccaaggtcctggtttctcttggcctgttcagcaacctattggtgtttcttctaactccagtgctggagttgatggctcggctggaaactcagaagctagcaaagaacctggatccaaaaagagggggagatgtgaatcatcctctgccactagctcgaaagcatgtagagagaagcagcgacgggacaggttgaatgacaagtttatggaattgggtgcaattttggagcctggaaatcctcccaaaacagacaaggctgctatcttggttgatgctgtccgcatggtgacacagctacggggcgaggcccagaagctgaaggactccaattcaagtcttcaggacaaaatcaaagagttaaagactgagaaaaacgagctgcgagatgagaaacagaggctgaagacagagaaagaaaagctggagcagcagctgaaagccatgaatgctcctcaaccaagttttttcccagccccacctatgatgcctactgcttttgcttcagcgcaaggccaagctcctggaaacaagatggtgccaatcatcagttacccaggagttgccatgtggcagttcatgcctcctgcttcagtcgatacttctcaggatcatgtccttcgtcctcctgttgcttaa

SEQ ID NO: 1974 - DNA, 963 bp, Arabidopsis thaliana
  Clone ID: AT_T9N14.C1.o4.tg
atggccttggaggctgtagtttacccgcaagatccgttctcctacatctcttgcaaagattttccgttttacgacttatactttcaagaagaagaagatcaagatccacaagatactaagaacaacattaagctagggcaaggacaaggacatggttttgcgagtaataattacaacggtagaaccggagattatagtgatgattataattacaacgaagaggatctccaatggccacgagaccttccttatggatctgccgtcgacaccgagagccagcctccaccgtcggatgtggcggcgggaggagggaggaggaaaaggaggaggacgaggagtagcaagaacaaagaagagatcgagaaccagaggatgactcacatcgccgttgaaagaaatcgccggaaacagatgaacgagtacctcgccgttctccggtctctcatgccaccttattatgctcaaaggggagatcaagcatcgatagtaggcggagccattaactacttaaaggagcttgagcatcatttacaatcaatggaacctccggttaagaccgccacagaagacaccggagccggccacgaccagaccaaaacaacctcggctagttcgtcgggaccattctcggatttctttgcatttcctcagtactcgaaccggcctacctctgcggcggcggctgaggggatggcggagatagaggtaacgatggtagagagccatgcgagtctgaaaatacttgcgaaaaagagaccgagacagcttcttaaactggtctcatcgatacagagcctaaggctcactcttctccatctaaacgtcacaactcgagacgactccgtcctctattccatcagcgtcaaggttgaagaagggagccaattgaatacagtagaagatattgcagcagctgtgaatcaaatcctaaggaggatcgaagaagagtcatcctttagctag

SEQ ID NO: 1975 - DNA, 2739 bp, Arabidopsis thaliana
  Clone ID: AT_T10O8.C1.o20.tg
atggatgatttcaatcttcgtagcgaaaaccctaattcatcatccaccacttcctcatcctcttcctctttccaccgtcacaagagcgaaaccggaaacacaaaacggtcaaggtcaacgtccacgttatcgacggaccctcagagcgtggcggctcgcgacagacggcaccgaattagcgaccgtttcaagattttacaaagcatggtccctggtggtgcgaagatggacactgtatctatgcttgacgaagccattagctacgtcaagttcttgaaggctcagatctggtatcaccaaaacatgcttctcttcataaacgaccacgaaactacatcatcttgtacttactctcccggcgctggagaatttggaccgaaactctttggttatgatgacgattatgcccctataatggacacatattcacaaggcgtgccacttacggttgcggactcgaagtatacgccgtggtttggttcggttgatgatgagcaagaacacgtcacgtatttcaaatacaggcgtgccacacgacacgcattacgagggcactgcaattgtataatcggagaaacagaggaattcgccgatcaacgagagaagatggaagtgcaaattgaagaatctggtaaaaatcaaacctctccggaatcaattgaagcagacaaagcgaagcagatagtggtgcttctgattggtccaccaggaagcggcaaatcgacgttttgtgacaccgcaatgcgttcctctcaccgcccttggtctcgtatctgccaggacattgttaacaatggcaaagctggaacaaaggctcagtgtttaaagatggctacagattctcttagggaaggcaagagcgtctttatagacagatgcaatcttgacagggagcaacgttcagagtttattaagcttggtggtcctgagttcgaagttcatgcagtggttctggagcttcctgctcaggtttgtatatctagatcagttaaaagaactggtcatgaaggaaatctacaaggtggaagagctgcagctgttgtgaataagatgcttcagagtaaggaacttcccaaagtgaatgaagggttttctcggattatgttttgttacagtgacgctgatgttgataatgctgttaacatgtataacaagcttggtccaatggatacccttccttctggctgttttggcgaaaaaaaattagatactaaaagccaacccggtataatgaagttctttaagaaagtcagtgctctgcctgcttcatcttctaatgaagctactaacacaactcggaaagctgatgaaatgacagcaaatgtccgagtttcgccagtcaagcttggttctgctgatattgtacctacactggcattcccatcaatttcgactgcggattttcagtttgatcttgaaaaggcttctgatatcattgtggagaaagcagaggagttcttgtctaaacttgggactgcgcgtctcgtcttggtggacttgagccgcgggtcaaagattctatctctggtcaaggctaaggcttctcagaagaacattgattcagcgaaattcttcacatttgttggggacataactaagcttcgttctgaaggtggtctacactgtaatgtcatagctaatgctactaactggcggcttaaacctggaggtggaggtgtgaatgcagcaatattcaaagctgctggtccagatcttgagactgcgacaagagtacgagcaaacactcttcttcctggaaaagccgtggtagttcctcttccttctacttgtccattacacaatgcagaaggaattacacatgtcatacatgttctaggaccaaacatgaacccaaaccgaccagacaaccttaacaacgactacaccaaggggtgcaaaactctccgggaagcttacacatctctatttgaaggttttctatcagtagtacaggatcaatcgaagttgcccaaacgaagcagtcaaacagctgtgtcagattctggtgaggatattaaggaagactctgagagaaacaaaaagtacaaaggatcacaagataaggccgtaactaataatttggaatcagagtctctggaggacacaagaggcagtggaaagaagatgagtaaaggatggaacacatgggcattggctctccacagcatcgcgatgcacccagagagacacgagaatgtcgtgcttgaatatttagacaacatcgttgtcataaacgaccagtacccaaaggcgcggaaacacgtgctagtactggcgagacaggagagtctagatgggctagaagatgttcgcaaagagaatcttcaacttctgcaggaaatgcacaatgttggtctgaaatgggttgatagattccagaacgaggatgcatctcttatcttccgccttggatatcactcggttccctcgatgcgacaactacacttacacgttataagccaagactttaattcagatagtttgaagaacaagaaacactggaactctttcacgacctcgttcttccgtgactcagttgatgtacttgaagaggtcaacagccaaggcaaggccaatgtggcgagcgaagatctgttgaaaggtgagctgcgttgcaatcggtgtagaagcgcacacccaaatattccaaaacttaaatcacatgtcagaagctgccattctcaatttccagaccatttactccaaaacaatcgccttgtggctagagcagagacgtag

SEQ ID NO: 1976 - DNA, 936 bp, Arabidopsis thaliana
  Clone ID: AT_T6L1.C1.o19.tg
atgagaaccggaaaaggaaatcaagaggaagaagattacggagaagaagactttaactctaaacgtgaaggtccttcttccaacactactgttcatagcaacagagattcaaaggaaaatgataaagctagtgcgatacgttctaaacattcggtcactgagcaacgtagaagaagcaaaatcaatgaaagatttcagatattgagagaactaattcccaacagtgaacaaaaacgtgacactgcttcattccttttagaggtgatagattatgttcagtatttacaagagaaggtgcaaaagtatgaaggatcgtatccaggttggagtcaggaaccaacaaagttgacgccatggaggaataatcattggcgagttcaaagtttggggaaccacccagtagctataaataatggatctggtccagggataccttttcctggaaagtttgaagacaacactgtgacttcgacacctgcaattattgcagaaccgcaaatcccgattgaatctgacaaagcaagagctataaccggcatatcgattgaaagtcaacctgagttagacgacaaaggattaccaccactacaaccaattcttccaatggtacaaggcgaacaagctaatgaatgtcctgcaactagtgatgggctaggccaaagtaatgacctggttattgaaggtggaaccattagcatctctagtgcctactcgcatgagttattgagctcattaacacaagcactccagaatgcaggcattgatctgtcgcaagcaaagctttctgtgcagatcgatcttgggaagcgagccaatcaaggtctaactcatgaagagccatcaagtaagaatccattatcatatgatacgcaaggaagggattcaagcgttgaggaagaatctgaacattctcacaagcggatgaaaacactgtga

SEQ ID NO: 1977 - DNA, 696 bp, Arabidopsis thaliana
  Clone ID: AT_F11C1.C1.o170.tg
atggataactccgacattctaatgaacatgatgatgcagcagatggagaagcttcctgaacacttctctaactcaaaccctaaccctaatccccataacattatgatgctttctgaatccaacacccacccgttcttcttcaaccccactcattctcatctcccatttgaccaaaccatgcctcaccaccaacccggtttaaatttccggtacgccccctccccgtcatcatctctcccggagaagagaggaggctgcagcgacaacgccaacatggcggcgatgagagagatgatctttcgaatagccgtgatgcagcctatacatattgatccggaatccgtaaagccaccaaagagaaagaacgtgaggatctctaaggatccacagagcgtggcagctcggcatcgaagggagaggataagcgagcggattcggattcttcagcggcttgttcccggtgggactaagatggatacggcgtcgatgctcgatgaggctatccattacgttaagtttctcaagaagcaagtgcagtcgctggaggaacatgcggtggttaacggcggaggaatgacggcggtggccggaggagcacttgcgggtactgttggtggaggatatggaggaaaagggtgtggcattatgcggtctgatcatcaccagatgcttggaaatgcacagattcttagatga

SEQ ID NO: 1978 - DNA, 726 bp, Arabidopsis thaliana
  Clone ID: AT_K21H1.C1.o2.tg
atggattctgacataatgaacatgatgatgcatcagatggagaagcttcctgagttttgtaaccctaattcctctttcttctctcccgaccacaacaacacttacccttttctctttaactccactcattaccagtccgatcactcaatgaccaacgaaccaggtttccgctacggttccggtttactcactaacccttcttctatctctcccaacacagcttactcttccgtttttcttgacaaaagaaacaacagtaacaacaacaataatggcacgaacatggcagctatgcgagagatgatcttccgtatcgccgtgatgcaaccgatccatatcgatcccgaggcggttaagccaccgaagaggaggaacgtcaggatctctaaagatcctcaaagcgtggcggctaggcatagaagggagagaataagcgagaggattcggattttgcaacggcttgttcctggtgggacgaagatggatacagcttcgatgctcgatgaagcaattcattatgtgaagtttttaaagaaacaggtgcagtctctggaggagcaggcggtggttactggcggagggggaggaggaggaggaagggttttgatcggtggaggtggaatgacggcggcgagtggtggtggtggcggcgggggagtggttatgaaagggtgtggaacagtggggactcatcagatggtgggcaatgcacagattcttagatga

SEQ ID NO: 1979 - DNA, 765 bp, Arabidopsis thaliana
  Clone ID: AT_T7M7.C1.o8.tg
atggagaattcttacgactcaagcaagtggtctgattctacaactccatatatggtctcgtggtcactacaatctgagtcctctgattctgattggaaccggtttaatcttggcttctcttcttcctccttcggtggtaatttcccggctgatgattgtgtcggtgggatcgaaaaagctgagtcactttcaagaagccaccgtctagcggagaaaagacgccgtgaccggataaattctcacctcactgctctccggaaacttgtccccaattccgacaagttagacaaagcagctctattagcaacagtgattgaacaagtgaaagaactcaaacaaaaagcagcagaatcaccaatcttccaagatcttccaacagaagcagatgaagtaactgtacagcctgaaactatctctgactttgaatcaaacacaaacacaatcatcttcaaagcttctttttgctgcgaagatcaacccgaagcaatctcagagattattagagttctcacaaagcttcaactcgaaacaatccaagcagagataatctctgttgggggaagaatgagaatcaatttcatcttaaaagatagcaactgcaatgagactacaaacatagctgcttcagcaaaagctttgaagcaatctctctgctctgcgttaaatcgaatcacatcttcttctacgactacttcttcagtttgcagaatcagaagtaaaagacagagatggttcctctcttctcattattctcacaatgaataa

SEQ ID NO: 1980 - DNA, 891 bp, Arabidopsis thaliana
  Clone ID: AT_MNA5.C1.o5.tg
atgatgttccaacaagattaccctcatggcttttcactcgtggaaacatccttaagttacgaaatgttggattactttcaaaacatcgtcgtttcgaactctgaagacgtggcgtcacagcaaaattccatttcgtcctcttcttattcatcagcgacactctcctgctccataacagagcaaaaatctcacttaactgaaaagttatctcctctacgagaaagatatggttgcggtgactttctgtcgcggaagaggagaaggagaagtgaaaaaacgattgtagataaagagaatcaaaggatgaatcacattgccgtcgagcgtaaccggagaaaacagatgaatcattttctgtctatcctcaagtctatgatgcctctctcttattctcaacctaatgaccaagcatcaatcatagaagggaccattagctatctgaagaagctagaacaacgtctccaatctctcgaagcccaattaaaagctactaaactcaatcaatcaccaaatatattttccgacttcttcatgttccctcaatactccaccgccactgccactgccaccgccactgcctcctcatcctcctcgagccaccaccatcacaagcgactagaggtggttgctgacgtggaggttacaatggtagaaagacatgccaacattaaagtgttaacgaagacacagccaagattgctcttcaagattatcaatgagtttaactctttaggtttaagtactcttcatctcaacctcacaacttccaaagacatgtctctcttcacttttagcgtcaaggtagaggcagattgtcaattgacgccttctggtaatgaggtcgcaaatacggtgcatgaagtcgttagaagagttcacaaggaacgttga

SEQ ID NO: 1981 - DNA, 1062 bp, Arabidopsis thaliana
  Clone ID: AT_K15E6.C1.o40.tg
atgaactctcatgatatcgatgatcagttagaagcagatgtatacagtaacttgccttctcgaaatgattcttcaacagggaggagaaatcgaaactcgtgtagatcgaaacactcagagactgagcaacgaagaagaagcaaaatcaatgaaagatttcagagtttaatggatattatacctcagaatcagaatgatcagaaacgagataaagcttctttcttgttggaggttatagagtatattcactttcttcaagaaaaagttcacatgtatgaagattctcaccaaatgtggtatcaatccccaaccaaattgattccttggagaaatagtcatgggtctgttgcggaggaaaatgaccatcctcaaatcgttaaaagcttttcaagtaatgataaagttgctgcttcttcgggttttctcttggatacgtacaattcagtaaatcctgatattgactcagcagttagcaccaagattcctgaacacagtcctgtttcagcagtttcatcgtatctacgtaccgagccttcgctgcagtttgttcagcatgacttttggcaaccaaaaacaagttgtggaacaattaactgttttacaaatgaattgttaacatctgacgaaaaaacatcagccagcttgtccactgtctgctcacaaagagagaatgatataatacaaggttccaatgatgcctcagctatttgcggagacttcttgtttgccttggctatgaagttctgtaggatagagtatgagataaatgctgtaaacttgtcattcaaactgaagatcctatctgcttctgtatttggaacagactcaggggtacttaacactctaactgaagcacttaagtcatcgggtgttaacatgtcagagaccatgatatctgtgcagttaagccttcggaaaagagaagatcgcgagtattctgttgctgcgtttgcttctgaggataatggtaatagcatcgctgatgaagaaggggactctcctactgaaactagaagcttctgcaatgatattgatcattcccagaagagaataagacgataa

SEQ ID NO: 1982 - DNA, 1329 bp, Arabidopsis thaliana
  Clone ID: AT_F17J16.C1.o110.tg
atggaacaagtgtttgctgattggaattttgaagataattttcacatgtccactaataaaagatcaatcagaccagaagatgaattagtggagctattgtggagagatggtcaagtggttttacaaagccaagctcgtagagaaccgtcagtccaagtccaaacccacaaacaagaaaccctaagaaaacccaacaatatttttcttgacaaccaagaaacagtacaaaagcctaactacgctgctctagatgatcaagaaaccgtctcctggatacaataccctccggatgacgtcatcgaccctttcgaatccgagttctcctctcatttcttctcttcgatcgatcacctcggaggtcctgagaagccacgaacgatcgaagagacagttaagcatgaggctcaagccatggctcctcctaagtttagatcctcggttataacagtcggaccgagtcattgcggcagcaaccagtcaacaaatattcatcaggccactacacttccggtttctatgagtgatagaagcaagaacgtcgaagaaagacttgacacttcgtcaggtggctcctccggttgcagctatggaaggaacaacaaagaaaccgttagtggaacaagtgtaaccattgaccgtaaaagaaaacatgttatggatgctgatcaagaatctgtgtctcaatcagatataggtttgacctcaaccgatgatcaaaccatgggtaacaaatcgagccaacggtcaggatctactcgaagaagccgtgcagctgaagttcataatctctcagaaaggaggaggagagatcggatcaatgaaagaatgaaagctcttcaagaactcatacctcactgcagcagaacagataaagcttcgatattggatgaagcaattgattacttaaaatcacttcaaatgcaactccaagtgatgtggatgggaagtggaatggcggcggcggcagcagcagcagcaagtccgatgatgtttcccggggtacaatcatctccatacattaatcagatggctatgcaaagtcagatgcaattgtctcaattcccggttatgaaccggtccgctccgcagaaccatcccggtttagtatgtcaaaacccggtacagttgcagctccaagcacagaaccaaatcttatcggagcagctcgctaggtacatgggcgggattccccagatgccgccggcgggaaatcagaccgtgcaacaacaaccagcggacatgttgggatttggatctccggcgggaccgcaaagtcaactgtcggcaccggcgaccaccgacagtcttcatatgggtaaaataggctga

SEQ ID NO: 1983 - DNA, 525 bp, Arabidopsis thaliana
  Clone ID: AT_MIO24.C1.o9.tg
atggagaagatgatgcacagagaaactgagaggcaaaggagacaagaaatggcttctctttatgcctctcttcgttctcttctccctcttcacttcatcaagggtaagcgttcgacgtcagatcaagtcaacgaggcggtgaactacataaagtatctacagaggaagatcaaggagctaagtgtgaggagagatgatctcatggtactgtctagaggaagtttattgggtagtagtaatggtgattttaaggaagatgtggagatgataagtgggaaaaatcatgtggtggttcgtcagtgtttggttggtgtggaaatcatgttgagtagccgctgctgcggtggccaaccgcggttttcgagtgttcttcaagtgcttagtgaatatggtctctgccttcttaactccatctcctctattgttgatgataggctagtttacaccatacaggccgaggtcaacgatatggctttgatgattgacttagcagaacttgaaaagagattaatcagaatgaagtaa

SEQ ID NO: 1984 - DNA, 1497 bp, Arabidopsis thaliana
  Clone ID: AT_K15N18.C1.o2.tg
atggacaacgagctgtttatgaacacagagtttccaccaccgccggagatggcgacgcatttcgaacaccaacagtcttcttcatcggccatgatgcttaattgggctttaatggatccaaatccgcatcaagattcttcctttttatgggaaaagtcaacggaacaacaacaacaacaaagcatctttgactctgctttaagctcattagtctcatcaccgacgccgtcaaattccaacttctccggcggtggcggtgacggttttctcatcagagaactcatcggaaagcttggaaacatcggtaataataataacaactccggtgagatctacggaactccgatgtctcgctccgcctcatgttacgcaactccgatgagctctccaccgccaccgacgaattcgaattctcagatgatgatgaacagaacgacgccgttgacggaattctcagcagatccgggttttgcggagagagcagctagattctcttgttttggtagtcggagctttaacggaagaaccaatacaaatcttccgattaacaacggtaataacatggtcaacaactccgggaagctgacacgtgtctccagcacaccagctcttaaggctcttgtttcaccggaagtcacacccggcggcgaattttcccggaagagaaaatctgtgcctaaaggaaaatccaaagaaaaccccatttctacagcttctccatctcctagtttctcaaagacggcggaaaagaatggtggaaaaggaggaagtaaaagttcagaagaaaaaggaggaaaaaggagaagagaagaagaagatgatgaagaagaagaaggagaaggtgaagggaacaaaagcaataacacaaaaccacctgagcctcctaaagattacattcatgttcgagctcgacgaggccaagcaaccgatagtcacagcctcgccgaacgagttcggagggagaaaattggtgaaaggatgaagcttcttcaagatcttgtgcctggatgcaataaggttactggaaaagcactgatgcttgatgaaattataaactacgtacaatcattgcaaagacaagttgagttcttgtcaatgaagttatcatcagtgaacgacaccaggctggattttaacgtggacgctcttgtgtcaaaggatgttatgattccatcaagtaacaaccgattgcatgaagaaggactccaatcaaagtcttcaagtcatcatcatcaacaacaacttaatatttataacaataattcacaattacttcccaatatttcttccaataacatgatgctccagtctcctatgaactctttggaaacctctaccttagccagaagcttcactcacttaccaacacttacccaatttactgactcaatttctcagtatcaaatgtttagcgaagaagatttacaaagcatagtaggaatgggagtggcagaaaaccccaacaatgaatctcaacacatgaaaattgagctttga

SEQ ID NO: 1985 - DNA, 1401 bp, Arabidopsis thaliana
  Clone ID: AT_MHM17.C1.o7.tg
atgatgcatttgattttgagctgcagctatttaatatcaatggatggatattacaatgaagcttctgaagaaccttcttcgtcttcttcttctggaagtttagctaggagcttgttccatgagtatcgccaatccgttatcccgctccaaaatgggcatgtgccaagcatggcgttcatgaacaatcttccatacgtagaaattcgaccacaagagagtcaaagacttgcttttaacgacacacaacgtctcttctatcagatgaaaattgaagcaagtcttcgagaatggttccctgaagatttcaatagaaagtcttctccggcaaactccgattatctccggccacctcattatccctcttcatcgtcttcttctcttagtcccaacaacatctccgaatattcctctcttttgttcccactcatccctaaaccttcaacgacgactgaggccgttaacgttccggtacttccaccgctagctccgatcaatatgatccatccacagcatcaagagcctttattccgtaaccgtcaacgtgaggaagaagcaatgacgcaagcaatcttagcggttttaacggggccatcaagtcctccgtcaacttcttcctcgccgcagcgtaaaggaagagccaccgcttttaagagatattactccatgattagtgaccgcggtagagccccgcttccgagtgttcggaagcaaagtatgatgacaagagcgatgtccttctacaataggcttaacattaaccagagagagcgttttactagggaaaacgctactacacacggcgagggaagcggtggaagtggagggggtggacgttatactagcgggccaagcgcaacgcaactgcaacatatgatatcggagaggaaacggcgagagaagcttaatgagagctttcaagcattgagatctctccttcctcccggaactaagaaagataaagcatcggtcctctccattgcaagagagcaactatcttctttgcaaggtgagatttcgaaactactagagagaaatcgggaggtagaggcaaagctagcaggagaaagagagattgaaaatgatttacgacccgaagagaggtttaacgttcgtataagacatatacctgaatcaacatctagagagaggactttggatctacgagttgttctaaggggagacatcattagggttgatgatttgatgataagacttctcgaattcttgaagcaaatcaacaatgtgagcttagtgtcaatcgaagctcgaactctagctagagcagagggggatacttcaattgttcttgtgatcagcttaaggctcaagattgagggtgaatgggacgaatcagccttccaagaagcagtcagaagggttgttgctgacttggctcactga

SEQ ID NO: 1986 - DNA, 975 bp, Arabidopsis thaliana
  Clone ID: AT_T4L20.C1.o110.tg
atgaatggagctataggaggtgaccttttgctcaattttcctgacatgtcggtcctagagcgccaaagggctcacctcaagtacctcaatcccacctttgattctcctctcgccggcttctttgccgattcttcaatgattaccggcggcgagatggacagctatctttcgactgccggtttgaatcttccgatgatgtacggtgagacgacggtggaaggtgattcaagactctcaatttcgccggaaacgacgcttgggactggaaatttcaagaaacggaagtttgatacagagactaaggattgtaatgagaagaagaagaagatgacgatgaacagagatgacctagtagaagaaggagaagaagagaagtcgaaaataacagagcaaaacaatgggagcacaaaaagcatcaagaagatgaaacacaaagccaagaaagaagagaacaatttctctaatgattcatctaaagtgacgaaggaattggagaaaacggattatattcatgttcgtgcacgacgaggccaagccactgatagtcacagcatagcagaacgagttagaagagaaaagatcagtgagagaatgaagtttctacaagatttggttcctggatgcgacaagatcacaggcaaagcagggatgcttgatgaaatcattaactatgttcagtctcttcagagacaaatcgagttcttatcgatgaaactagcaattgtgaatccaaggccggattttgatatggatgacatttttgccaaagaggttgcctcaactccaatgactgtggtgccatctcctgaaatggttctttccggttattctcatgagatggttcactctggttattctagtgagatggttaactccggttaccttcatgtcaatccaatgcagcaagtgaataccagttctgatccattgtcatgcttcaacgtaagtcatatttttaatactctttcattatga

SEQ ID NO: 1987 - DNA, 873 bp, Arabidopsis thaliana
  Clone ID: AT_MZA15.C1.o10.tg
atgactctagaagctttatcatcaaacggtcttttaaactttttgctctctgaaactctttcaccaactccattcaagtctctcgtcgatctcgagccattgccggaaaatgatgtcatcatatcgaagaacacaatttcggagatatctaatcaagaaccgccaccacagcgacaaccaccagctacgaatcgagggaagaagcggcggaggaggaagcctagggtttgcaaaaacgaggaagaagctgagaatcaacgaatgactcacattgccgtcgaaagaaatcgaagaagacaaatgaatcaacatctctctgtcttgcgatctctcatgcctcaaccttttgctcacaagggtgatcaagcttcaatagttggtggagccatagatttcatcaaagaacttgaacacaaattactatctcttgaagctcaaaaacatcataatgctaaattaaaccagtcggttacttcttcaacaagtcaagactcaaatggtgaacaagagaatcctcatcaaccatcttcactatctctatcgcagttctttcttcattcatacgatccgagccaagagaataggaacggctcaacaagctcggtgaaaacccctatggaagatcttgaggtgactctaatcgaaactcatgctaacatcagaatcttgtcgagaagaagaggtttccggtggagcacgttggccaccaccaaaccgccgcagctttcgaagctggtggcttctctacaatcgctgtccctctccattcttcaccttagtgtcacaacattggacaattatgctatttactccatcagcgctaaggtaataaaattaaaaccctatcatctgaaccggactaaaccggattag

SEQ ID NO: 1988 - DNA, 945 bp, Arabidopsis thaliana
  Clone ID: AT_T28I19.C1.o130.tg
atgaactcaatagtgggagaggtccaagaagctcaatacatttttccacactctttcacgaccaacaatgatccctcttatgatgatttgatcgaaatgaaaccaccaaagatccttgagacaacttacatatcaccttcttctcatcttcctccaaattcaaagccccatcatattcaccgtcattcttcctcaagaattctctctttcgaagattatggttcaaatgatatggaacacgagtactctcccacctacctaaactcaatctttagcccaaaattagaggctcaagtgcaaccacaccagaagagtgatgagtttaatcgaaaagggaccaagagggctcaaccgttttcaagaaaccaatccaatgctcaggatcacataatagccgaaagaaaacgtagagagaagcttactcaaagattcgtagctctttccgctctagttcctggccttaaaaagatggacaaggcttctgtgttgggagatgcattaaagcatataaagtatctccaagaaagagtgggagagttggaggaacagaagaaagaaagaagattggaatcaatggttcttgtgaagaagtctaagctgatcttggacgataataatcaatcattctcttcttcttgtgaagatggcttctcggacttggatcttcccgagatcgaggtaagattctcggatgaagatgttctaatcaagatcctttgcgagaagcaaaagggtcatcttgccaagattatggccgagattgagaaacttcatatcttgataactaattcaagtgtattgaattttggaccaactcttgatatcaccattatagctaaggtatgcaaatgtatattcaggcatacacttatacatataaatgaagaacttgttcttaattttagagtaacatcgcttgatgtttatttttcagaaggagagtga

SEQ ID NO: 1989 - DNA, 4491 bp, Arabidopsis thaliana
  Clone ID: AT_F20D10.C1.o190.tg
atggagaaggtttatgaagagcttgatgaagtgaaagctgtgaatgagaagcttaggattgactatagaaacaaaacggagcttcttgagaatctaaaaaaggttcagaacgaacaattaatagagattcgagaggcgagactggttaacgagaagcatggttttgagattgaggagaaatctagagaaattgccgagttgaagcgagcgaacgaggaactacaacgttgtttgagagagaaggattctgttgtcaagcgtgtgaatgatgtgaatgataagcttagagctaacggggaagataagtaccgggaatttgaagaggagaaacgaaatatgatgtctggtttggatgaagctagtgagaagaacattgatcttgagcagaaaaataatgtctatagagctgagattgaggggctcaaagggcttttagctgtagcggagacgaaaaggattgaagctgagaaaactgttaaaggtatgaaggaaatgagaggaagagatgatgtagtggttaagatggaggaggagaagagtcaagtagaagagaagctgaaatggaagaaggagcagtttaagcatcttgaggaagcatatgagaagcttaagaatctgtttaaggatagcaagaaagagtgggaggaagaaaaatcaaagcttttagatgaaatctactctcttcagaccaagctggattcagtaactagaatctcagaggatcttcagaagaagttgcagatgtgtaacggtgcgttgacacaggaagagaccagaagaaaacatcttgaaatccaagtttctgaattcaaagccaaatacgaagatgcttttgcagagtgccaagacgcaagaacacagcttgatgatttggctggtaaaagagattgggaagttgcagagttgagacagaccttgagcatgaaagatgcatattttaaggagatgaagtatgagaatggaaaactagaacaagaaaaccgcgagttgctgggttcgttgaaagaactccaggaagctacaattcagggatcaggaaactctgcactatcaaagctgaaaaacaagtttcggaacttggaaaacatacacaagaactgttcagctaatttaagaagtaaagaagctgaatggagctctcaagtggagaagatggtagaagagattaatgattataagttgcagttgcaaagcaaggaggcagccttgaaagaggttgagttggaacttgaaaattgtcgctcttctacagctaaaatgagactacagtatgaagagatctcgattatgtttttagtgctaagtagaacggtctccgaggctcagtcaaggcttgcgaatgctaaggataagcaaatcaaggatgaaaaaagagaaggaaattgctattctctattgatggagcagctagatcaaaagaatgctgcactggccaaggcgcagatggagattaaagaagagcgcgaaagcgttgcgtgtttgctgaaaagaatagaaatgctggatcttttcgaaaaccagaatattcagatgcagaaagaggtagagaggttcaaagaaatggttgaggaatcatctagattccaaactcagatgcaagaaaaaatgaaagaagctgaaaatgattatgaagagaaacttcttcaagtctgtgatgcattggacaacacaaacatagacctcgttgcagaacgcgagaaggtggtgtctttaacaaggcagattgagtcacttggtactgtcaaagagaagaatttagtgatggaaaaagaaactcaggagtataaggagatgctggaggaatcagaaaagtgtcgggtgcttttagaggagcagatttcgcagcttgaaagtgattccaacgagaatattagagagctctgtagcaaggtggacattgcatatgccaagttggcagaagaggttgagaagactgcctcattggttagaaaaagtgagtctattgatctaaacgaagagcataggcaacgggagcttgatcattacaaggaaatgcttgaggagtctaccaaaactcaacttctcttgcaagagaaagttgtagatgtggaaaacgactcgaagaggaaacttgctgacgtttctgaggctctagagatagcaaattctgaattatctgataaaacctctgaagtgttccagattgaattccaattgtgggtctggaaatctattgctaaaaggctaaaagctgaactcgagcaaaaccagaacctgcggaaaagagtagaagcttctcttcttgaacaggttggagttggagaagccattaagcaagagaagaatgagttggtgcataagctaaaggttatcagccatgcaagatcgtctgattcagagaagaaagaatcccttatgagggataaggacgagatgttggaaagtctacagagagaggtagagttgttggaacaagactcacttagaagggagcttgaggatgtcgttcttgcgcatatgattggtgaaagggaattgcagaacgagagagagatttgtgctttacaacagaaagaccaggacttatgtgaagtgaagcatgaattggagggttcattaaagtctgtatctttgctgctgcagcagaagcaaaacgaggttaacatgcttcgcaaaacatgggagaaactcactgctaggcaaattcttactgcggtggaaacagaatcgaaaaagatgatgatcatagagcttgaaggggaaatctctagtctcagccagaaactggaaacgtcgaatgaatctgtttcttgtttcagacaagaagcaacaaagtcaagagccgaattggaaactaagcagacagagttgaaagaagtaaccacacaaatgcaggaaaagctaagaacttcagaagcagagaagacagagttagttaaggaagtcgcgagtttgtcaacagaaaaacgaaatcttttgagttttatcagcgaaatggaggatggaatgttgaagctgtatgatggagacacgaagctgatgaaaactttggagagagttacacaatgttgtgatggatttggtaaagagaacaataatggtgaaactattggttctccaagattggcaatgaagcatgaagaagatgttgtaactgaagacagagaaggtgcttcgcagaaccgcacagcacccgacttaaaaccgatcgaaacgtgccgtaaactcctcaaatcacgtgagtttctcagcgttcggtatatcattcaagtgaatcagctgctaaaaagtaaacggcatgatgatgatgatcagtttgagcaagtggaagccatctgcgaccttctcatcgccgcagaaaaccggcttccaaacggtttaaaggattattacggcatgattcgggcgaaccgattcggaccagttttattggaggacttcgagaaattgacgaaacttcttgataagaagcataactatttcccatttagccaagaagctgctgataaagcctcgctagcttggtctctgctgtctaagccacccatcaaagcccattacgatcttgctatctccgcatttttcggagagtgtagcaaagtaaaacgaaagatctttatccccaagaaacaaattgaggtagtggttatttccgatgacgacgacgaggaggaattttcatgtctgaaaatctctctcaatcgttattattattatgattatctcctctttgtctttatatatatatatatacacaacaaatttaacattccctccaatgtcctactgtctccttctctgtgtgttaccatggttttacttcaccatttagagcaagggatgcgtccgatttcacgatgttacaatccaaccgcgtattcgacaacaatgggaagaagtttcttcgcaggtgcagccacaagcagcaagctattctccagaggtttctcagtcacaaagccaaaatctaaaaccgaatctaaagaagttgctgcaaagaaacatagtgacgcagagagaaggagacggcttcggattaattcccagtttgcaactctccgcaccattcttccaaacttagtcaaaagaagtaacactttttgtattatgttcaatgaaactaaacagcaagataaagcatctgtgcttggagagactgtcaggtacttcaatgaattgaaaaagatggttcaagacataccaaccacaccatctttagaagacaacttgagattggaccactgtaataacaacagagacttggcaagagtcgtgttcagttgtagcgacagagaagggctaatgtcggaggttgcagagtcaatgaaagcagtgaaagcaaaggcggtgagagctgagatcatgacagtaggtggaagaaccaagtgtgccttgtttgttcaaggtgtcaatgggaatgaaggattggtgaagctcaagaaatcgttgaaacttgtagtgaatggtaaatcatcatcagaggcgaaaaacaacaacaatggaggatcgttgttaattcagcagcaatga

SEQ ID NO: 1990 - DNA, 1461 bp, Arabidopsis thaliana
  Clone ID: AT_T6L1.C1.o10.tg
atggatttaagtgcgaaagatgagttttcagcagagaagaggaatcctgataactatgattctgttaataatccgtctggagattggcgagttgattcatatccttcagagaatctgatttcagctggtcctgcgtcttgttctccttctcagatgatggattcatttgggcaaactctttggtatgatcccacgagtgttcaggctgttggttatgccggttttaatggtggtaatgcttcgtcttcttcgtttaggggtagtattgatagatctcttgaaatgggttggaatctgcctaatttgttgcctcctaaaggcaatggtcttttcttaccgaatgcgagtagtttccttcctccgagtatggctcagttcccggctgattcaggttttatagagcgtgcagcgaggttttcgctctttagcggtgggaattttagtgatatggtgaatcaaccacttgggaattctgaggctattggtttgtttcttcaaggtggtggaacaatgcaagggcagtgtcaaagtaatgaacttaatgttggtgaacctcacaatgatgtatctgtagcagtgaaagaatcaactgttagatctagtgaacaagctaaaccgaatgttcctggatcgggcaatgtatccgaggatactcagtctagtggtggtaatggtcagaaaggcagagaaacctcttccaacacaaagaagaggaaaagaaatgggcagaagaactctgaagcagctcaatcacacagatcccagcagtctgaggaagaaccagacaacaatggtgatgaaaagcgcaatgatgagcaaagtccaaattcacctggaaagaagtcaaacagtgggaaacaacagggcaaacaaagttctgatcctccaaaagatggatatattcatgtacgggcacgaagaggccaggccacaaatagccatagtcttgcagaaagagttaggagagaaaaaattagtgaaaggatgaagtttcttcaagatctagtaccgggttgcaacaaggtgactgggaaggcagttatgcttgacgaaatcataaactacgtacaatcactacaacgccaagttgagtttttatcgatgaaacttgcaactgtgaacccacaaatggactttaaccttgaaggtcttcttgcaaaagatgcacttcaactacgagctggttcttcatctacaacaccattcccaccaaatatgtcaatggcttatcctcctctacctcatggattcatgcaacaaactctttccagcattggaaggaccattacctctccattgtctcctatgaatggtggattcaagcgacaggaaacaaatggatgggagggtgatttgcaaaatgtgatccacattaactatggagctggtgatgtcacacctgaccctcaagcagcagctacagcatctcttccagctgcaaatatgaaggttgagccatga

SEQ ID NO: 1991 - DNA, 894 bp, Arabidopsis thaliana
  Clone ID: AT_f2c19.C1.o10.tg
atggaaaatggaaatggagaaggaaaaggagaattcataaaccaaaacaatgacttcttccttgattccatgtcaatgctctcctctctccctccttgttgggatccatctcttcctcctcctcctcctccgccacaatctcttttccacgctctagccgtcgacgcccccttccccgaccagttccatcatcctcaggagtcaggaggtccaacaatgggtagccaagaagggttacagccacaaggtacagtgtcgaccacgagcgcacctgttgttcgtcaaaagccaagagttcgagccaggagaggccaagccaccgatcctcacagtatcgctgagaggcttagaagggaacgcatcgcagagcgtatgaagtctctccaagaactggttcccaacaccaacaagacggataaggcatcaatgttggacgagatcatcgagtatgttaggttccttcagcttcaagtcaaagtactaagcatgagcagattgggaggtgcaggatcagttggtccacgcctcaatggtctctccgcagaggcaggaggacggctcaatgccctcactgcaccgtgcaatggcttaaatgggaatggaaacgctacaggatcgtccaatgagagcctaaggtcaacagaacaaagagtggcgaaactgatggaggaagacatgggatcagcaatgcaataccttcaagggaaggggctttgcttaatgccaatatctctcgcaaccgcgatatcatcatcaactactcactctcgtggatccctctttaaccccatctccagtgctgtagcagcagaggattcaaatgtaacagcaactgcagttgctgcacctgaagcctcgtctactatggatgatgtatctgcttccaaggcctga

SEQ ID NO: 1992 - DNA, 729 bp, Arabidopsis thaliana
  Clone ID: AT_F13H10.C1.o21.tg
atgtgtgcacttgtccctccattatatcccaatttcggctggccttgcggagatcatagcttctatgaaaccgacgacgtatccaacacgtttcttgattttccgttgccggacttgacggtgactcatgagaatgtgtcgtctgagaataacagaacattactagacaatcccgtggtgatgaagaagcttaatcacaacgcgagtgaacgtgagcgtcgcaagaagatcaacacaatgttctcatctcttcgttcttgtcttcctcccaccaatcaaacgaagaagttaagtgtttcggcaacagtttcacaagcattgaagtacataccagagctgcaagagcaagttaaaaagctcatgaagaagaaagaagagctctcgtttcaaatttcgggtcaaagagatctcgtttacaccgaccaaaacagtaagtcagaggaaggggttacaagctatgcgtcgacagtttcttcgactaggctcagtgagactgaagtgatggtccaaatttcatcgttacagactgaaaaatgttcgtttgggaatgtcttgagtggtgtagaagaagatgggttggttcttgtgggtgcttcatcttcaaggtctcatggagagcgactcttttactctatgcatcttcagataaaaaatggccaggtgaattccgaagaattaggtgatagattgttgtacttgtacgagaaatgtggacactcgtttacatga

SEQ ID NO: 1993 - DNA, 1122 bp, Arabidopsis thaliana
  Clone ID: AT_MHC9.C1.o1.tg
atggaaggattggaatctgtgtacgctcaagctatgtatggaatgacacgagagagcaaaatcatggagcatcaaggatcagatttgatttggggaggaaatgagctaatggctcgagaactctgttcttcttcttcttatcaccaccaactcattaatccgaatcttagcagctgtttcatgtctgatcttggagtcttaggtgagattcaacagcagcaacatgttggcaacagagctagctcgatagatccatcatcactcgattgtttgttatctgcgacgtcgaatagcaacaacacctcgacggaggacgatgaaggaatatctgtgcttttctcagattgtcagactctttggagctttggtggagtctcatctgcagagtctgagaacagagagatcactactgagacgacaacaacgataaagcctaagcctttgaagagaaacagaggaggagatggaggaactactgagactacaacaacaacaacaaaacctaagtctttgaagagaaacagaggagacgagacaggaagtcactttagtcttgttcatcctcaagatgattcggagaaaggaggtttcaagcttatatacgatgagaatcaatcgaaatcaaagaaaccaagaacagagaaagaacgaggcggttcttcgaacattagtttccaacattcaacttgtttgtctgacaatgtcgagcccgatgctgaggcgattgcacaaatgaaggagatgatatacagagcggctgcatttagaccggtgaatttcgggttagagattgtggagaagcctaagaggaagaacgtcaagatatcgacggatcctcaaacggttgcagcgagacagagaagggagaggataagtgagaagattagggttttacaaacattggttccaggtgggacgaagatggatactgcatcaatgcttgatgaagctgctaattatctcaagttccttagagcacaagtaaaagctttagaaaacttgagacccaagcttgaccaaaccaatctctctttctcttctgctcctacatcgtttccattattccacccatcttttcttccattgcaaaatcctaatcaaatccatcatccagagtgttga

SEQ ID NO: 1994 - DNA, 1020 bp, Arabidopsis thaliana
  Clone ID: AT_T22N4.C1.o4.tg
atgtcttctgcgattgttgtttctcaagatgcggaatcgcttggtctgcaaatttatagccgcaaggagaaatctcttggggttctcgtctccaatttcctgagactgtataaccgagacgatgtggatctcattgggctcgatgatgccgctgggcaattaggagttgaaaggcggcgtatctatgatgtggtcaatatattggagagtattgggattgtggcaagaagagggaagaatcaatactcgtggaaaggttttggagagattcctcgttctctagatgaactcaaggaagaagggatgagagagaggttaggttactcaagttcaaacaattcagacaaggtttcaaatggttgtgaaagagaagaacctttaactttaacacctgatgatcaggagaactcatcatcctctaaaatggaccaaaagaaggaaaaatctctctggcttctcgcacagaattttgtgaagatgtttctatgttctgatgatgatctcatcacacttgatagtgctgcaaaagccttgctgagcgactctccagattcagtccatatgcgaactaaagttagaagactttacgacattgcaaatgtatttgcctcgatgaatttaatcgagaagactcatataccagtgactaggaaaccagcatataggtggttagggtccaaaagcatagctgaaagaggattaagcttatttaattccggagaaccgaagcgggtatttggaacagagatcacaaacttgagggcaaagagaaacaaaacatattgttcatcaatccgcaagcaaattggatataagaaacatgacgaggaaaacacagagcaggaatcgaaaccagctgcaagtaaatatgtgtttggcccgttctccccaataggagcatctaagacgaacaacgacaaagtcggaaagggaaggttactagagatcgaggcccttgcttctacctaccaaccacagtattgcaatcaaggtaacaaccacactctaatcgtttcttga

SEQ ID NO: 1995 - DNA, 972 bp, Arabidopsis thaliana
  Clone ID: AT_T24C20.C1.o40.tg
atggttgggcttgatgatgctgcctcgaaattaggagtggagagacgaagaatctatgatattgttaatgttctggagagtgttggggttttaacaagaagagcaaagaatcagtatacgtggaaagggttttccgcaattccaggagcattgaaggagctacaagaagagggggttaaggacacttttcatcgtttctatgtcaatgagaatgttaaaggatctgatgatgaggatgatgatgaagagtcttctcagcctcactctagtagccagactgatagttcaaaacctggttctcttccccaatcttcagatccctccaaaatagataaccgacgagagaaatctttaggattgcttactcagaactttatcaaactctttatttgctctgaagctattaggatcatctcccttgatgacgctgcaaaattactgcttggtgatgcccacaatacatcaataatgcgaactaaagtgaggcggctttatgatatagcaaatgtcttgtcgtcaatgaatctcatagagaagactcacaccttagattctaggaaaccagctttcaagtggttagggtacaatggtgagcctactttcacactgagcagcgatttgttgcaattggagtcaagaaaaagagctttcggaactgatattacaaacgtcaatgttaagagaagcaaatcatcatcttcgtcccaagaaaacgctacagagagaaggctaaagatgaaaaagcactcaacaccagagagttcttataacaaaagctttgatgttcatgaatcaagacatggatcaagaggaggttaccattttggaccttttgcaccaggcactggtacatatccaactgctggtttagaggataactctaggagagcttttgatgttgagaatctggattctgattaccgtccctcttaccaaaaccaaggtgcatatattttattcacatccatttga

SEQ ID NO: 1996 - DNA, 1281 bp, Arabidopsis thaliana
  Clone ID: AT_T2E6.C1.o2.tg
atggccgcgacatcaaactcaggcgaagatccgactctctcttaccatcaccgatctccttttcgcttcgaattacttcaatctatctcttcctctgatcctcgttactcttctctaactccttcttcaacgaatcgacctttctcagtctctcaatcgcttccgaattcacaactgtctcctctaatttcacctcactgggacgattcttactctcaaatcactcagaaagttcagaagagtagaaagaatcatcgaattcagcttggatctattgccaacatgtctggaggagaaagcatagatatagctaaagtaatagtgaaacaagagtcgtctcctcaaaatgttaaacgtgtatacaacaagtcaaagggtggtactaaactgttaaaggctgggaaacgaatggcgaatggcgaagtgcaaaatggtggcttaaatggagctagtattaactgccgttatgacagttctttagggttgttgacaaaaaaattcgtgaagttgatccaggaagctgaggatggaacacttgaccttaactattgtgcagttgttttggaggtacaaaaaagaaggatatatgatattacaaatgtccttgaaggaattggattgatagagaaaactacaaagaatcatatccgctggaagggtgctgacaatcttggacaaaaggacctgggagatcaaatttctaggcttaagtcagaagtagagagtatgcaatctgaggaaagcaggttggatgatcttataagggaacgacaagaagctctcagatccttggaggaagatgactactgtagaaggtacatgtttatgacggaggaagatataacgagtctcccacggtttcagaaccagacattactagcaattaaagctcctacagctagttacatcgaagttccagatcctgatgagatgagttttccgcaacagtaccggatggtgattaggagtagaatggggccgattgatgtctatcttttaaggtacttagttacacattccactctctgtgtctggtcttatctatatatttgtcagtcagtgttaataactgggaacaaacatgatcgcagcaaatacaaaggagacagtgcggaaacaagcgacaagttgggtaatgagtctgatcaaaaagctccagttggagtagacactccttccttgaaaatagtaacttcagatactgatttaaaagcagattactggttcgagtcagatgcagaggtgagcctcacagatttatggagcaacttcaacagctga

SEQ ID NO: 1997 - DNA, 666 bp, Arabidopsis thaliana
  Clone ID: AT_K18I23.C1.o13.tg
atgtcccgcgtattatctgttaagcgcacgttagcagaaaatccattatcgttaaaatgcgcaattgacacaaatagaaaaaatcgtcgatgcgcattaatggcaattcggccgagaactcgtaaaagagttcaagctgttcgtcgtgctgccgatggtagcgcttttaaaaaatgtgaagaatgtggtgttatgatagcgattgctctgtatgatatgcatgagtgcggtgagaaaagaagggaagtgaaaaggttcaagtacattgcgagtggcaatatcgataatatctcgaaaccaattgggagctttgaagatgaacccagatcaccatttgtcttcttcttagaggagtttagggaaaattacaatggagacttagtggatgctagcagaatatgtttcaatgtatggaagaacatgtcagcagaggaccaaaaaccattcaacgcccgtgctatggaggttgattcggcacacagtagaaagttaaacgaagaagctaaaaccatttataaggcagatgaagaggcagattcaaaaactgttgggagatatgacaagttctatgagagctacgttcaaattgaagaagaggaagactatgattcatctgatcatttcggacacgagttttgggaagacgatactatgttggactactga

SEQ ID NO: 1998 - DNA, 1509 bp, Arabidopsis thaliana
  Clone ID: AT_F2D10.C1.o15.tg
atggaaacaaagtacagatttgaaatcagcgacggagattcttggaggttatcgaaaacgaccctcacgaccagctccaaaagtggtctcaagaagcggatgaaacctgtttacgtagatggcaatcttcactggttgagaaacgactggagcatcatagcgttcaatcccgagacagagcaagcacgactgattccttgtagcttccatccaacaccggatacgaaggtgcttttcgcagcaaacgatgagaccaatctcctgacattgatatcagggacgaaaaaagcaatctcagtttacacactactcgggtatcacaagtggacactcgcaagccagttcaagaacgtatcaatggaggaatcagatcttgaatgttggaacgtggttgcatatgacggcaagtgtctagtggtgagggagaaaatgatacgttctagtgacattgagcttcatgtgtacgacatggaagctgacagttggggagtttttgagacggccaaatgttggtcccaagacttctacaagtttaagccctcctttttctctattgaggatgacgagcagacaaaggtgcttgtaccttctgatgaccaacgcctttcctatctaactacaattatggaaatgatacaaccagaatcaattatgaaaggagctaaatcaaagactgaaaccaggagctccaagctctctgtgaccaagaagccggctaaaggagcagggcgtggcaaagctgctgctaaggaccccaacaaaccaaagaggccagccagtgctttcttcgttttcatggaagatttccgtgagactttcaagaaggaaaaccccaagaacaagtctgtagctactgttggaaaagctgctggagacaagtggaagtccttgtctgattctgagaaagctccttatgttgctaaggctgagaaacgcaaggttgaatatgagaagaacattaaagcttacaacaagaaactggaggaaggtccaaaagaagatgaggaatctgacaagtcagtgtcagaggtcaatgacgaggatgatgctgaggatggtagtgaagaggttagtgaatcgatcatgaaaggagctaaatctaaggctgaaaccaggagcacaaagctctctgtgactaagaagcctgctaagggagccaaaggtgctgctaaagatccaaacaaacctaagaggccttccagtgccttcttcgttttcatggaagatttccgtgtgacgtacaaggaggagcaccctaagaacaagtctgttgctgctgttggcaaagctggtggtgaaaagtggaaatccttgtctgactctgagaaggctccttatgtggctaaggctgacaagcgcaaggttgagtatgagaagaacatgaaagcctacaacaagaaattggaggaaggccctaaggaagatgaggaatctgacaagtcagtttcagaggttaacgatgaggatgatgctgaggatggcagtgaagaggaggaagacgatgattaa

SEQ ID NO: 1999 - DNA, 1341 bp, Arabidopsis thaliana
  Clone ID: AT_T22B4.C1.o60.tg
atgtcgacagtttcttcagatcctgctcatgcgaagaaatcgagaaacagtagaaaagcgttaaagcaaaagaatgagatcgtcgagtcatcaccggtctcagacaaggggaaagaaacgaagtcgtttgagaaagatctgatggagatgcaagcgatgttggagaagatgaagatcgagaaggagaaaactgaggatttgttgaaggagaaggacgagatcttgaggaagaaggaagttgaacaggaaaaacttaagacggagctgaagaaactgcagaagatgaaggaattcaagcctaacatgacttttgcttttagtcaatctttggcacaaactgaagaagaaaagaagggaaagaagaagaagaaggattgtgctgaaacaaagagaccatcaacaccatatattttgtggtgtaaggataattggaacgaagtgaagaaacagaatcctgaagctgatttcaaggagacttcgaacattctgggtgctaagtggaaggggattagtgctgaagagaagaagccttatgaggagaagtatcaggcggataaggaagcttatcttcaggttattacaaaggagaagcgtgagagggaagcaatgaagcttcttgatgatgagcagaagcagaaaactgcaatggaattgcttgatcagtatcttcactttgttcaggaagctgaacatgacaacaagaaaaaggccaagaagataaaggatcccctgaagcctaaacaaccaatatctgcttacctgatctatgcaaacgagaggagagctgctttaaaaggagaaaacaaaagcgttattgaggtcgctaagatggctggagaagagtggaagaacttgtcggaagaaaaaaaggctccttatgatcagatggcgaaaaagaacaaggagatatatctgcaagaaatggaaggatataaaagaacaaaggaagaagaagcaatgagccagaagaaagaagaagaagaattcatgaaactccataaacaagaagctctccaacttctcaagaagaaggagaaaaccgacaatatcataaagaagacgaaagagacggcgaagaacaagaaaaagaacgagaatgttgatcctaacaaacccaaaaagcctacttcttcatactttctcttctgcaaagacgcaagaaagagtgtgttagaagaacatcctgggatcaacaactcaactgttactgctcacatttcattgaaatggatggaacttggtgaagaggagaaacaagtttacaatagcaaagctgctgagttaatggaagcttacaagaaagaagtggaagagtacaataagaccaagacttcgtcgtag

SEQ ID NO: 2000 - DNA, 1371 bp, Arabidopsis thaliana
  Clone ID: AT_F9D16.C1.o270.tg
atggcgaccaacgcagatccagctccgacgaagaaaccaaggaacagtagaaaggcgttgaagcagaagaatgagctcgtggagacgccaccatcgcctgtctccgtcaaggggaagtcagcgaagtctttcgagcaagatctgatggagatgcagacaatgttggagaagatgaagatcgagaaggataagacggaggagttacttaaggagaaggatgagattctgagaaagaaggaggaggagctagagaccagagacgctgagcaggagaagctcaaggtggagctgaagaagcttcagaagatgaaggaattcaaacctaacatgacttttgcttgcggtcagtcatctctcacacaggctgagcaagaaaaggcgaataagaagaagaaaaaggattgtcctgagacaaagcgaccatcgtcctcatacgttttgtggtgtaaagatcaatggactgaagtcaagaaggaaaaccctgaggctgacttcaaggagacttcgaacattctgggggctaaatggaagtctcttagtgcagaagataagaagccttacgaggaaaggtaccaggttgagaaagaagcttacctccaggtcattgctaaggagaagcgcgagaaggaggccatgaagcttctggaggatgaccagaagcagagaactgcaatggaattgcttgatcagtatctcaactttgtccaggaagctgaacaggacaacaagaagaagaacaagaaggagaaggaccctctgaagccaaaacatcccgtatctgccttccttgtttatgcaaacgagaggagagctgctttacgcgaagaaaacaaaagcgtcgtggaggtcgcaaagatcactggagaggagtggaagaacttgtcagacaagaaaaaggcaccctacgagaaggtggcaaagaagaacaaggagacatacctgcaagcaatggaggaatacaagaggacaaaggaagaagaagccctgagtcagaagaaagaagaagaggaactcttgaaactccacaaacaagaagctcttcaaatgcttaagaagaaggagaaaactgataatctgatcaagaaggagaaggcgaccaagaagaagaagaacgaaaacgttgaccctaacaaaccaaagaagcctgcttcttcatactttctcttcagcaaggacgaaaggaagaaattgacagaagaacgtcccgggacaaacaacgctactgttactgctctcatttcactgaaatggaaggaattgagtgaagaagagaagcaagtttacaacggaaaggccgcaaaactgatggaagcatacaaaaaggaagtggaagcttacaacaagaagtctgcggctactaccagtagctag

SEQ ID NO: 2001 - DNA, 1941 bp, Arabidopsis thaliana
  Clone ID: AT_T19N8.C1.o2.tg
atggcggacggccactccttcaataatatctctctcagcggtcgcggtggaaagaacccgggtttacttaaaatcaattctggaggaattcaatggaagaaacaaggtggtggaaaagctgtggaagttgatagatctgatattgtaagtgttagttggacgaaagtgacaaagagtaatcaattgggagtcaaaaccaaagatggattgtactacaagttcgttggatttcgagatcaggatgttccaagtctgtctagctttttccaaagttcttatggaaaaacaccggatgagaagcaattatcagttagtggtcgtaattggggagaggtggatttacacgggaatacactaacctttttggttggatcaaaacaagcttttgaagtatctttagctgatgtttcacagactcagcttcaagggaaaaatgatgttactttggagtttcatgttgatgatactgctggtgctaatgagaaagactcgctgatggagattagttttcatattcctaattccaacactcagtttgttggtgatgaaaaccgtccaccttctcaagttttcaatgacacaatcgttgcaatggctgatgttagtcctggagttgaggatgcggtcgtcacatttgagagtattgcaatcctcacacccaggggtcggtacaatgtggaacttcacctttctttcttacgattgcaaggacaagctaatgactttaaaatccagtacagtagcgttgtccgtttgttcttgcttccaaagtcaaaccaaccacacacgtttgttgttatctctctagacccaccaatccggaaaggtcagacaatgtacccccacattgttatgcagtttgaaacagacaccgttgtcgaaagtgaactgtcaattagtgatgaacttatgaatacaaagttcaaggacaagctggagcgatcatataagggtctcattcatgaagtattcaccaccgtgttgcgttggctgtctggtgcaaagatcactaaacctgggaagttccgcagttcccaagatgggtttgcagtgaaatcgtctctcaaggcagaagatggggttctttatccactcgagaagggatttttcttcttacctaaacctccaacgcttatacttcacgatgagattgactatgtcgagtttgaaaggcatgctgctggtggtgctaacatgcattactttgatcttctcataagactgaaaactgaccatgaacatctgttccgtaacattcaaagaaatgagtatcacaatctctataccttcataagctctaagggtttgaagattatgaaccttggaggtgcgggtaccgcagacggtgttgctgctgttcttggggataatgatgatgatgatgctgttgaccctcatcttacgcgtatcagaaaccaagctgctgatgagagtgatgaggaggacgaagactttgttatgggtgaggatgatgatggtggttcaccaactgatgattctggcggggacgactctgatgctagtgaaggcggtgtaggagagataaaagagaaatctatcaagaaggaacctaagaaagaggcttcgtcatcgaaaggattgcctcctaagaggaaaactgtagccgcagacgaaggcagtagtaagaggaagaagccgaagaagaagaaggatcccaacgcaccaaaaagagcaatgtctggtttcatgttcttttcccaaatggaaagagataacataaagaaggaacacccaggaatagcatttggagaggtgggaaaggtgcttggagataagtggcgtcaaatgtctgctgatgataaagagccatatgaagccaaggctcaagtcgacaagcagcgatacaaggatgagatcagtgattacaagaaccctcagccgatgaatgtggactcaggaaacgattccgatagtaactaa

SEQ ID NO: 2002 - DNA, 681 bp, Arabidopsis thaliana
  Clone ID: AT_K19M13.C1.o4.tg
atggctggaccatcgacaacttcaaacgcaccaaagcagaggaagagagtcgaagccgagactagcagcaacacttctactaccttacgtcgcgctaaagacggaagcgctttcgctctctgtctctgtgtatttggttgttgttgttgttgttgttcagaagcacaagttgtggagacacaagcagaggctaagaagaagcctgcagagaagaagaagacaacatctgatggacctaagccaaagagacttaagaaaaccaatgatgagaagaagagctcgtctacttcaaacaagcccaagcgacctcttaccgctttctttatcttcatgagtgacttccgtaaaacgtttaagtcagagcataatggttcgttagctaaggatgctgcaaagatcggtggtgagaagtggaagtctttgactgaggaagagaagaaagtttatctggataaagctgctgaacttaaggcagagtataacaagtcactggaaagtaatgatgctgatgaggaagaggaagatgaggagaagcaatctgatgatgttgatgatgctgaggagaaacaagttgacgatgatgatgaagttgaggagaaagaagttgagaacacagatgatgacaagaaagaagctgagggtaaagaagaggaggaagaagagattttggatgactactag

SEQ ID NO: 2003 - DNA, 1101 bp, Arabidopsis thaliana
  Clone ID: AT_MEB5.C1.o23.tg
atgggttacaacgaaggaggcgcagattccttcaacggaggaagaaagcttcgtcctctcatcccacgtctcacttcttgccccaccgccgccgtaaacaccaactccgaccaccgctttaatatggtctctctttcccttgtttctaatgctcattttcttgctttggttacgattttcacagcagtggtgacgatgacggcggagcagaacaagagggagctgatgatgctaaactcagaacctcaacatccaccggtaatggtgagctcacggtggaatccgacaccagatcagttaagggttcttgaagagctttaccgacaaggaactagaactccttctgccgaccacatccaacaaatcaccgcacagctacgacggtacgggaagatagaaggcaaaaacgttttctattggttccaaaaccacaaagcccgagaacgccagaaacgacggcgacaaatggaaactggccacgaagaaacggtcctttcaacagcaagtcttgtctcaaaccacggattcgacaagaaagatcctccaggttacaaggttgaacaggtcaagaactggatatgttcggtcggatgcgacacgcaaccagagaaaccttcccgtgattatcatctggaggagccagcgaatatacgggtggagcacaatgctcgttgtggaggagacgagagacgaagctttttagggataaacaccacgtggcagatgatgcagttgccacctagtttctactcttcttcacatcatcatcatcaacgtaacctcattctcaattcacctactgtttcctccaacatgtccaacagcaacaatgctgtctctgcttctaaagatacggtcacggtttcacctgtatttctacgtacgagagaagcaacgaacacagagacttgtcatcgaaatggtgatgataataaagatcaagaacaacatgaagattgctccaacggtgaattggatcatcaagaacagacacttgagctgtttccactgagaaaagaagggttttgtagcgatggtgagaaagacaagaacattagtggcattcactgtttctatgagtttctgccattgaagaactaa

SEQ ID NO: 2004 - DNA, 549 bp, Arabidopsis thaliana
  Clone ID: AT_F11B9.C1.o120.tg
atgtctttctccgtgaaaggtcgaagcttacgtggcaacaataacggaggaacggggacgaagtgcgggagatggaatccaacggtggagcagttgaagatattgactgatctgtttcgagccggtcttagaactccaacaactgatcagattcagaagatctctacggagctcagtttctacggcaagatagagagcaagaatgttttctattggtttcagaatcataaggctagggagaggcagaaacgtcgtaaaatctccattgattttgatcatcatcatcatcaaccatcaactagagatgtttttgaaataagcgaagaagattgtcaagaggaagagaaggtgatagagacattacaactctttccggtgaattcatttgaagactccaactccaaggtggacaaaatgagagctagaggcaataaccagtaccgtgaatatattcgagagaccaccacgacgtcgttttctccatactcatcatgtggagctgaaatggaacatccaccgccattagatcttcgattaagctttctttaa

SEQ ID NO: 2005 - DNA, 762 bp, Arabidopsis thaliana
  Clone ID: AT_MCL19.C1.o2.tg
atgtcctcctcaaacaaaaattggccaagcatgttcaaatccaaaccttgcaacaataatcatcatcatcaacatgaaatcgatactccatcttacatgcactactctaattgcaacctatcatcttccttttcctcagatcggataccagatcctaaaccgagatggaatcctaaaccggagcagattaggatactcgaatcaatcttcaattccggtactattaacccacctagagaggagattcaaagaatccggatccggcttcaagaatatggtcaaatcggtgacgcaaacgtgttttactggtttcaaaaccggaaatctcgagcaaaacacaagcttcgtgttcatcacaaaagccctaaaatgtcaaagaaggacaagacggttattcctagtactgacgctgatcattgttttggttttgttaaccaagaaaccggattatatccggttcaaaacaatgagttggtggtaaccgaaccggccggttttctatttccggttcataatgatccgagcgctgctcaatcagcgtttggttttggcgattttgttgtaccggtggtaacggaagaagggatggcattctctaccgttaataacggcgttaatttggagactaacgaaaattttgataaaattccggcgatcaatttatacggcggagatggaaatggcggtggaaattgttttcctcctttgactgttccattaaccatcaatcaatctcaaggtaaattaatcatttcgaaatag

SEQ ID NO: 2006 - DNA, 369 bp, Arabidopsis thaliana
  Clone ID: AT_MJJ3.C1.o18.tg
atgtcgtcgagaggattcaacattaaagctagaggattatgtaataacaacaacggaggaggaggaacgggggcgaagtgtggacggtggaatccaacggtggagcaagtgaagcttctgacagatctgttcaaggcgggactgcgaacaccgagcacggaccagattcagaagatctctatggagctgagtttctacggtaagattgagagcaagaacgtgttctattggttccaaaaccataaagctagagagagacaaaagtgccggaaaatctccaccgtcaagtttgatcatcgtcaagatacagatctttctaagcctcgccgagacaacgtacgtcgtcatcaactaccagcgaaaggttaa

SEQ ID NO: 2007 - DNA, 600 bp, Arabidopsis thaliana
  Clone ID: AT_T12J13.C1.o6.tg
atggaccaagaacaaacaccacatagcccaacccgccatagtcgctcacccccatcctccgcctccggttccacctcagcagaaccggttcggtcccgatggtcacctaaaccggaacaaatactcatacttgagtcgatcttccacagtggtatggttaaccctcccaaagaagagacggtaaggataagaaagatgctcgagaaatttggcgcggtgggagatgcaaatgtcttctattggtttcaaaaccggcggtcaaggtcccgtcggagacagcgacagctacaggctgcagctgcagcagcggacgcaaccaccaacacttctagctcttcttcttcttatggtggtggatgtgataatcaaagcaatagtggcatggagaatctcttaacaatgtctggccaaatgagttaccatgaagctactcatcatcattatcaaaatcatagctcaaatgtcacatcgattttgtgcccatctgatcaaaactccaattttcaataccaacaaggttgttttagagtaggaaaaaaatcaattctgggtgggtttcaaccggaaaaccgatttgtttttatttggcgacttagttaa

SEQ ID NO: 2008 - DNA, 807 bp, Arabidopsis thaliana
  Clone ID: AT_MVA3.C1.o160.tg
atgaatcaagaaggtgcttcacatagcccatcctccacttccaccgaaccagtccgggcacgttggtcacctaaaccggagcaaatcttgatactcgaatccatcttcaacagtggtactgttaacccaccaaaagatgaaacggtgaggataagaaagatgcttgagaaattcggtgctgtgggagacgcaaacgtcttctactggtttcaaaaccgacggtcaagatctcgccggagacaccggcagcttttagcagccaccaccgcagccgccacctccataggagctgaagaccaccagcacatgacggccatgagcatgcatcaatatccttgcagcaacaacgagattgatttggggtttggaagttgtagcaacttatcagctaattacttccttaatggatcgtcgtcatctcaaatcccttcctttttcctcggcctctcttcttcaagtggtgggtgtgagaacaacaatggtatggagaatctcttcaaaatgtatggccatgaatctgatcataatcatcagcagcagcatcatagctcaaatgctgcatcagttttaaacccatctgatcaaaactccaactcccaatacgaacaagaagggtttatgacggtgtttataaacggagttcctatggaagtaacaaaaggagcaatagacatgaaaacaatgttcggtgatgattcggtgttacttcattcctctggtcttcctcttcccactgatgagtttggtttcttgatgcattctttacaacatggacaaacttatttcctggtaactaataatatataa

SEQ ID NO: 2009 - DNA, 789 bp, Arabidopsis thaliana
  Clone ID: AT_mnc17.C1.o230.tg
atggaaaacgaagtaaacgcaggaacagcaagcagttcaagatggaacccaacgaaagatcagatcacgctactggaaaatctttacaaggaaggaatacgaactccgagcgccgatcagattcagcagatcaccggtaggcttcgtgcgtacggccatatcgaaggtaaaaacgtcttttactggttccagaaccataaggctaggcaacgccaaaagcagaaacaggagcgcatggcttacttcaatcgcctcctccacaaaacctcccgtttcttctacccccctccttgctcaaacggcacagtgggttgtgtcagtccgtactatttacagcaagcaagtgatcatcatatgaatcaacatggaagtgtatacacaaacgatcttcttcacagaaacaatgtgatgattccaagtggtggctacgagaaacggacagtcacacaacatcagaaacaactttcagacataagaacaacagcagccacaagaatgccaatttctccgagttcactcagatttgacagatttgccctccgtgataactgttatgccggtgaggacattaacgtcaattccagtggacggaaaacactccctctttttcctcttcagcctttgaatgcaagtaatgctgatggtatgggaagttccagttttgcccttggtagtgattctccggtggattgttctagcgatggagccggccgagagcagccgtttattgatttcttttctggtggttctacttctactcgtttcgatagtaatggtaatgggttgtaa

SEQ ID NO: 2010 - DNA, 1053 bp, Arabidopsis thaliana
  Clone ID: AT_F2I11.C1.o160.tg
atggctctatcttctgccggcgtcgtctctcatcttcatcctccgtcgttttcttcgtcgtcaggattatccgtcaacagagttctgtttcggaatcggaacgctagtccttgtggtctatctcttccaattctcaatccgtctcggtctgtacttgtttttgctcgtggcaagaatcgaaaaggattcgtgtcttcgtcttcttcgtctccgaagaaaaacaaaaagaaaagtttggatggagctgataatggaggaggtgaggaggaggaggatccatttgaggcattgtttaatcttttagaagaagatttgaagaatgataactcggatgatgaggagataagtgaggaagagttagaggcattagccgatgagttagctcgagcattgggtgttggtgacgatgttgatgacatcgacttgtttggttcagtcactggtgatgttgatgttgatgttgataatgatgatgatgataatgatgatgatgataatgatgatgatgatgatgacagcgaagaagatgaaagaccgactaagctgaagaattggcagcttaaaagactggcttatgcattgaaagctgggcgtcgtaaaactagtattaaaaatctggcagctgaggtttgtcttgacagggcttatgttcttgaattgcttcgtgacccgcctccaaagctgctaatgctaagtgctacactaccagatgaaaaaccgccagtagcagcacctgagaactcctcacctgatccaagtcctgtggaatcattatcagctgaagatgttgtggtcgaacctaaggaaaaagtaaaagatgaagcagttcatgtgatgcaacagagatggtctgctcagaaaagagtgaagaaagctcacattgaaacgctagagaaagtttacagaagatcaaaacgacccactaatgctgtggttagcagcattgttcaagtgaccaatcttccaaggaagcgagttttgaagtggttcgaagataaaagagcagaagacggagttccagataagcgagctccatatcaagctccggtttga

SEQ ID NO: 2011 - DNA, 594 bp, Arabidopsis thaliana
  Clone ID: AT_F2D10.C1.o17.tg
atggagcaagagagcctaaacggtaggtatggtagtagagtaatgacggatgaacaaatggagactcttcgtaagcaaatcgccatttacgccgttctttgcgaccagctcgtcttcctccacaactctctctcttctgtccctcttctttcatcaggaatgaatccaatgagaggtgagtattttgatccaatggtggcatcgtcaagcgctcatggaatgtcgactcggcctcgatggactcctacgacaacgcaacttcagattcttgagaacatttacaaggaaggcagtggaacaccaaatccgcggaggattaaagagatcacgatggaactgtctgaacatggacaaatcatggagaaaaatgtataccattggtttcaaaaccgacgagctcggtccaaacgaaagcaacctccgacaacgacaattacctcgagtcaggcggatgatgcggccgtgacaacaactgaggagagagggaggtgtggagatgattctggagggtttgagtcttatgagcatatactgttcccgagtcctgatttagggattgagcatttgttgaatagggacaagtttatagactga

SEQ ID NO: 2012 - DNA, 1431 bp, Arabidopsis thaliana
  Clone ID: AT_F4C21.C1.o18.tg
atggcgcttgagaatttctacaatgagcataagtatccgactgaagaaatgaagggcaagttagcagaggaagttggattaactgagaagcaagtttcaggttggttctgccatagaaggttaaaagacaaacgtcatgtaaaagaagatgggaatgccattgggagccaagatcggtcaagcgttgttcttcaggatcgtggaagtgggcttcgacaggattcatgtggtagtacaaagcaaacggattattggaaccccaagcctagggaagttgaaagtcaaaggctttatatgggaaatgctgatggtgaagatagtacatcttctgatcgtagctcatcattacgtaagaatcttgtctctagcaaagatggaattcgcgatgtggaaagttctagatatgttgcacataaagacgttattcagcatcctcagttcatgagaagctatgggtataataagccttcgggatacttgaaagtgaagggagagagtgagaattttgctatcactgccgtaaagagacaattaggaagacaataccaagaggatggtccacctctgggggttgaatttgatcctcttcctcccggtgcatttgagcctcagactaatcctatagttcacgagccaatatatgttgggaatcagagacggcctcaccttccacatttacttggaacgaggaagagctttaatcctggtcctagctatgaattagctcgtaaatcaaagttgcattcgccagatccagattcagaggatgatgagcatgatgatgatgacaacataatggttggaatggagcctggtctaagagataagaaaagttttggggaaccaagactgaaatccccttctaccagtttctataattctgtacctcgccacaaatcgtttaaagagacattcaaaggttcaccacgggaaatccctgtaactaacagcaagaagggttggataagttccaaaagttgggctgaagggtcgagaaaccatctggttgccaacgtccaaaatctttctggaagcaatattgaaaccaatcagtctcatgattatgataataatatatctaatggcggacgcaagacgggatatctcactaaatcttcgaagctgttacctccgagtagaagcagatcccctgagtcaatggatagaggtccatcttctgggatggcaggaatatatcacggggagaggaatcaaatgaaaatgcagagagagaaattgcattcgactgatgaaccaccggttgccaaacgagtgaaacatgggtatattcagcaagtatatgcaccaaaatcatcatcatacagcgagattcttgaacgaaaaagccagataaatcggtctggtgtggaactgccttctagtttaagcggggacgatgagactgacgaatctagctcgtcaatggattaa

SEQ ID NO: 2013 - DNA, 1149 bp, Arabidopsis thaliana
  Clone ID: AT_F24O1.C1.o38.tg
atggagagtggttccaacagcacttcttgtccaatggcttttgccggggataatagtgatggtccgatgtgtcctatgatgatgatgatgccgcccatcatgacatcacatcaacatcatggtcatgatcatcaacatcaacaacaagaacatgatggttatgcatatcagtcacaccaccaacaaagtagttccctttttcttcaatcactagctcctccccaaggaactaagaacaaagttgcttcttcttcttctccttcctcttgtgctcctgcctattctctaatggagatccatcataacgaaatcgttgcaggaggaatcaacccttgctcctcttcctcttcttcagcctctgtcaaggccaagatcatggctcatcctcactaccaccgcctcttggccgcttatgtcaattgtcagaaggttggagcaccaccggaggttgtggcgaggctagaggaggcatgctcgtctgccgcagccgctgccgcatctatgggaccaacaggatgtctaggtgaagatccagggcttgatcaattcatggaagcttactgtgaaatgctcgttaagtatgagcaagagctctccaaacctttcaaggaagctatggtcttccttcaacgtgtcgagtgtcaattcaaatccctctctctatcctcaccttcctctttctccggttatggagagacagcaattgataggaacaataatgggtcatccgaggaagaagtcgatatgaacaatgaatttgtagatccacaagctgaggatagagagcttaaaggacagctcttgcgcaagtacagtggttacttagggagcctcaagcaagagttcatgaagaagaggaagaaaggaaagctccctaaagaagctcgtcaacaactgcttgattggtggagccgtcactacaaatggccttacccttcggagcaacaaaagctcgcccttgcggaatcaacggggctggaccagaaacagataaacaattggttcataaaccagaggaaacggcattggaagccgtcggaggacatgcagtttgtagtaatggacgcaacacatcctcaccattacttcatggataatgtcttgggcaatcctttcccaatggatcacatctcctccaccatgctttga

SEQ ID NO: 2014 - DNA, 2166 bp, Arabidopsis thaliana
  Clone ID: AT_YUP8H12.C1.o16.tg
atgttcgagccaaatatgctgcttgcggctatgaacaacgcagacagcaataaccacaactacaaccatgaagacaacaataatgaaggatttcttcgggacgatgaattcgacagtccgaatactaaatcgggaagtgagaatcaagaaggaggatcaggaaacgaccaagatcctcttcatcctaacaagaagaaacgatatcatcgacacacccaacttcagatccaggagatggaagcgttcttcaaagagtgtcctcacccagatgacaagcaaaggaaacagctaagccgtgaattgaatttggaacctcttcaggtcaaattctggttccaaaacaaacgtacccaaatgaagaatcatcacgagcggcatgagaactcacatcttcgggcggagaacgaaaagcttcgaaacgacaacctaagatatcgagaggctcttgcaaatgcttcgtgtcctaattgtggtggtccaacagctatcggagaaatgtcattcgacgaacaccaactccgtctcgaaaatgctcgattaagggaagagatcgaccgtatatccgcaatcgcagctaaatacgtaggcaagccagtctcaaactatccacttatgtctcctcctcctcttcctccacgtccactagaactcgccatgggaaatattggaggagaagcttatggaaacaatccaaacgatctccttaagtccatcactgcaccaacagaatctgacaaacctgtcatcatcgacttatccgtggctgcaatggaagagctcatgaggatggttcaagtagacgagcctctgtggaagagtttggttttagacgaagaagaatatgcaaggacctttcctagagggatcggacctagaccggctggatatagatcagaagcttcgcgagaaagcgcggttgtgatcatgaatcatgttaacatcgttgagattctcatggatgtgaatcaatggtcgacgattttcgcggggatggtttctagagcaatgacattagcggttttatcgacaggagttgcaggaaactataatggagctcttcaagtgatgagtgcagagtttcaagttccatctccattagtcccaacacgtgaaacctatttcgcacgttactgtaaacaacaaggagatggttcgtgggcggttgtcgatatttcgttggatagtctccaaccaaatcccccggctagatgcaggcggcgagcttcaggatgtttgattcaagaattgccaaatggatattctaaggtgacttgggtggagcatgtggaagttgatgacagaggagttcataacttatacaaacacatggttagtactggtcatgcctttggtgctaaacgctgggtagccattcttgaccgccaatgcgagcggttagctagtgtcatggctacaaacatttcctctggagaagttggcgtgataaccaaccaagaagggaggaggagtatgctgaaattggcagagcggatggttataagcttttgtgcaggagtgagtgcttcaaccgctcacacgtggactacattgtccggtacaggagctgaagatgttagagtgatgactaggaagagtgtggatgatccaggaaggcctcctggtattgttcttagtgcagccacttctttttggatccctgttcctccaaagcgagtctttgacttcctcagagacgagaattcaagaaatgagtgggatattctgtctaatggaggagttgtgcaagaaatggcacatattgctaacgggagggataccggaaactgtgtttctcttcttcgggtaaatagtgcaaactctagccagagcaatatgctgatcctacaagagagctgcactgatcctacagcttcctttgtgatctatgctccagtcgatattgtagctatgaacatagtgcttaatggaggtgatccagactatgtggctctgcttccatcaggttttgctattcttcctgatggtaatgccaatagtggagcccctggaggagatggagggtcgctcttgactgttgcttttcagattctggttgactcagttcctacggctaagctgtctcttggctctgttgcaactgtcaacaatctaatagcttgcactgttgagagaatcaaagcttcaatgtcttgtgagactgcttga

SEQ ID NO: 2015 - DNA, 2088 bp, Arabidopsis thaliana
  Clone ID: AT_T17B22.C1.o5.tg
atggtggtgggagctcaggcaatgaacaatacacttccggagacgccaagcaaaatgggaagaggacttgtcatcgccatacccctcaacagatccaaagacttgaagcgtaaaacctttattgaatgtccccatcctgacgaaagacaacgaaaccaattatgtcgagagctgaaactcgagcctgaccaaatcaagttttggtttcagaacaagcgaactcagagcaaaactcaagaagatagatccactaacgtattacttcgtggagaaaacgagactctccaaagtgacaacgaggcaatgctcgatgcattaaaaagtgtgctctgtccagcttgtggaggccctccttttggcagagaagaacgcggacacaatctccaaaaactgcgtttcgaaaacgcccgccttaaagatcaccgtgacagaatctccaatttcgtagaccagcacaagcccaacgaaccaaccgtggaggactcattagcttatgttcctagccttgatcgcatctcgtacggaattaacggaggcaatatgtacgagccatctagctcatatggaccaccaaattttcaaatcatccaaccacgaccactagccgaaacggatatgagcctgttgtctgaaatcgcggcaagtgcggttgaagagctcaagcggctgtttttggctgaggaacaattttgggttaagtcgtgtatcgacgagacttatgtgattgatacagagagctatgagaggttctcgcatgcagtcaaacatttcagcagcactactgctcatgtcgagtcgtccaaagctgtcacggtggttcatgtagaagcgataaacttgatccaaatgttcttagatccggaaaaatggaaagagctttttccaacgattgtgaacaaggccaacacaattcatgtgctcggatcggggcttcctataagaggaaactgcaatgttttgcaagtgatgtgggagcaactacacattctgtcgccactagtgccagcaagggaattcatggtcgtcaggtgctgccaagagatcgagaaagggatctggattattgctgacgtgtcacaccgtgctaactttgactttggcaatgctgcttgttacaaacgtccttctggttgcctcatccaagccttgcccgatgctcactccaaggtaatgtggatagagcatgtggaagtggaccataaattggatacacataagatctatagagatcttttaagtggcgggtcaggctatggagctaagcgttggatcgtcacacttgagagaatgtgtgagaggatggctctctcctccatccaaacccttcctccaagtgaccggagcgaagtcataacgacaggagaagcaagaaggagtgtaatgaaattaggtgagagaatggtgaagaatttcaacgaaatgctgaccatgtccggaaaaattgactttccgcagcagtcgaaaaatggagtgagagtctcgattcggatgaacattgaggccggtcaaccacccggtatagttgtcagtgcttcgtcttctctcgcaatccctctcactcctttgcaagtcttcgctttccttcaaaacctcgacactcgtcaacagtgggacattctttcctatggaaccgtagtcaatgagatcgctcgcattgtcaccgggtcaagtgaaaccaactgcgttaccattctccggccaacgcacgaagagaataatgacaagatggtggttcaagactcatgcaaggatgatatgttgatgctgcaagactgctacatggacgccttgggaggcatgatcgtgtacgctcctatggacatggctacaatgcatttcgctgtctccggcgaagtagacccttcccatatcccaatccttccatctggtttcgtcatctcaagcgacggcaggcgatccacggtggaggacggtggaaccttactcacggtggcctttcagatccttgtctctggaaaggccaataggtcgagagaggtgaatgagaagtcggtggacacagtgagtgctttgatcagctccactattcaaaggatcaaaggtttgctcaattgtcctgaatgttga

SEQ ID NO: 2016 - DNA, 5085 bp, Arabidopsis thaliana
  Clone ID: AT_MLN1.C1.o10.tg
atggaaggtgggtctgaaaaaacaacacctgaaggttgtggtggtgagagtaagtctaaacggaaaatgaaaactgctgctcaacttgaagttcttgaaaacacttattcagctgagccttatccttcggaagctataagagcggatctctcagtgaaactgaatctttccgatagacagttacagatgtggttttgtcaccggcggcttaaagaacggaaatctactacgccgagcaaacgtcagcgtaaggagttagtaactccaacggctatggaatcctgggaaccacccgtcaatgccggtgatttagtggcgggaaatgagcttgattctagaagagctgctcgaggcagtggcggtagtggtgtgacggttgtgaggcggtttaatgaaccgtcttctgctgaggttagagctattggttatgttgaagctcaattgggagagcggttgagagataacggaccggttcttggaatggagtttgatcctttacctcctggtgcatttggcatgcctattgagatgccaagccatcgcaaggcgactaggcaagctttcgagaccaacatatatgtccgatccgatgtcaagcctatcaaagatcatgtgaggcctattcgtgaatatcagttcattcctgagctgccatcttcgaggactgatcattcggaacgagtttctccgtcacatcattttggagttccacttgatggttcggttatgagggtttcagctgtgtctgctggacatcgggatgactataaaatttcacctcagataccaaatttgaatcttgcaactcatcaagggaagccggggcatgtctattcgcctaacttggtcgaatatgactcaccgtatcagaaaagctacatggatactgctgcacaagttcatgatgatccttttgtgaaatcagagagagaagttggtaatgaggatgaggatgatgatgccctgcaattagagagacaccgcaagaatgaagaagcaagaatagctcgggaagtcgaggctcatgagaagaggatccgaagggaactagagaaacaagatatgctgaggcgaaagagagaagagcaaataaggaaagaaatggagaggcaagatcgtgaaagacggaaagaggaagaacgtcttttacgtgaaaaacagagagaggaagagaggtaccttaaagagcagatgcgagagttgcagcgaagagagaagttcttgaagaaagaaacaatcagggctgagaaaatgcgacaaaaagaagagatgcgtaaagaaaaagaggttgccaggcttaaagctgctaatgagagggccattgctcgtaagatcgcaaaggaatctatggaacttattgaagatgaacgcttagagctcatggaggttgctgcgttaacaaaaggcttgccttcaatgctcgcccttgactttgaaactctacagaacctcgatgaatatagagacaagcaggcaatatttcccccaacatctgtaaaattgaaaaagccctttgcagtcaagccgtggaatggttctgatgagaatgttgcaaatcttcttatggtgtggagattcttaatcactttcgcagacgttcttggtctttggccatttaccctggacgagtttgctcaggcattccatgactatgacccacggctaatgggagagatacacattgttctattgaagactataatcaaagatatcgagggtgtggtaagaacgctgtcgaccggtgttggagcaaaccagaatgttgctgctaatcccggagggggtcatcctcacgttgtggagggtgcatacgcgtggggttttgatatacgcagctggagaaaaaacttgaatgtttttacatggcctgaaatcttgaggcaactcgctctctctgccgggttgggaccgcaactgaagaaaatgaacattaggactgtgtctgttcatgatgacaatgaggccaacaactctgagaatgtgattttcaacctaaggaaaggagtagcagctgagaatgcttttgccaagatgcaagagaggggactttctaatccacgacgttcacggcatcgtttgactccaggcactgttaagtttgctgcatttcatgttctatctcttgaaggtgaaaaaggtttgaacattcttgaggttgcagagaagattcagaaatcaggattgagggatctaacgacgagtaggacacctgaagcctcggttgctgctgcgttgtctcgagatacaaaactctttgagagggtagctccttctacgtattgtgtacgtgcttcctatagaaaagatgcaggtgatgctgagactatatttgctgaagcgagagagagaatacgtgcattcaagagcggcatcactgatgtagaagatgttgatgacgctgagagagatgaagactctgaaagcgatgtcggagaagacccagaggttgatgtgaaccttaaaaaggaagatcccaatcctctgaaggtagaaaacttaattggagtcgaaccattgttggaaaatgggaaactggataccgtgcccatgaaaactgaactgggactgcctcttactccctctctccccgaggaaatgaaagatgagaaaagagatgacactttagcggaccaatctctagaggatgcggtagcaaacggtgaagatagtgcttgttttgacgagagcaaacttggggaacagtgggttcaaggacttgtagaaggagattactcgaatcttagcagcgaggaacgtttaaacgcacttgttgctctgattggtattgccaccgaaggaaacacaatccgaatcgcccttgaggaacggttggaggtagcaagtgcattaaagaaacagatgtggggtgaagtgcaactcgacaaacgctggaaagaagagtctttgattcgagcaaattacctctcatacccaacagcaaagccggggcttaatatcgcaacccctgcatctggaaatcaagaaagttcatcagcggatgtgactccaatctcctcacaggacccggtgagtcttccacagatcgatgtgaataacgtgattgctggaccaagcttgcaattgcaagaaaatgtacctggagtggagaatttgcagtatcagcagcaacaggggtacacagcggaccgggaaaggctgcgtgcacagttaaaagcgtatgttgggtataaagctgaagagctatatgtatataggtcgcttccgctaggtcaagatcgaagacgcaatcgctattggcggttttcagcatccgcctctcgaaatgatcctggttgtggtagaatattcgtggaacttcaggacggacgctggaggctcattgattccgaagaggcttttgactatttggtgaagtcactagatgttcgcggtgtaagagaatcacatttacactttatgttgctgaagatcgaagcatccttcaaggaagcattaaggaggaatgtggcagcaaatcccggggtgtgttccatatcttctagcttggattccgatactgcggaaatctccacgacgtttaagatcgagctaggggatagtaacgccgttgagagatgcagcgtattgcaacgcttccatagtttcgagaagtggatgtgggataatatgctgcatcctagtgctttatctgcatttaagtatggtgctaagcaaagcagtccgctttttcgcatatgcagaatctgtgcggaactacactttgtcggagatatttgctgtcctagttgcggtcagatgcatgctggtccagatgttggtgagttgtgttttgctgagcaagtggctcaactcggggataatttgagaagaggagatactggctttatcttgcgtagctcaatcttgtctcctcttagaataagactactcaaggttcagttagcacttgtcgaagcttctcttccacctgaaggacttgaagctttttggacagagaatcttaggaaatcttggggtatgaagctgttgtcatcaagttcccatgaagatctttatcaggttctcacaacgttagaggcagcactaaagagggatttcttgtcttcaaactttgaaacaacttctgaactcttgggtttacaagaaggagctctcgccagcgatcttacttgtggggttaatgtactaccgtggataccaaagacagcaggaggtgtagctttgagactctttgatttcgacagctcgattgtttacacacccgatcaaaacaacgatcctctaaaagacaaagaatctgaagatttcgtgggtttggagacaaatattctgagaaacttacatgagaaggacgtaatggaaactccggtgcaagttgctgcttataagcaagaagagaactggacggatcctggtttaggtggtgtgtctagctctgggagaggaggtcgaccaccacgaggacgtggccggcctcgtgcccgtggcaatggcaagaaaccggcagtttctgttaaaccaccacgaggtgcagcaaactcaaatggtgaaaccatgttgagaccgagagcacaaccacgtgggggtagaaagaatgggcggcgtagtggcaccaaaggccgaaagagaccaacgcaaggaacactcggtatatgtaatgaagtaggaggaggacgtcgggttaaggaagttgctgtaaccgccaaaaccagtcttcctgataacgatgacgattggatcgaaacccctgaactgcaagacgatgacggagaagctagcagctcggggagatcgtttcagtatgaggactatgatgatgatgatgtcatggctccgattgatgattttgatggcggcggcgaatcaagtaaattagtaggtaggggggaatttagcttacatagtgatgatgaatacgaagaagaagaggaagaagaagaagacatgaacatgaaaatggatgtgaatgttgttgatgatgaggatgaagattacataaacgaagactcgtatggtagaaagcagcatgggattagcattagcaacgatgcagcgactcggaaaaggtttaataagtttgaagatcctgatctaacatcttcatcgtcttctgattttcaatga

SEQ ID NO: 2017 - DNA, 588 bp, Arabidopsis thaliana
  Clone ID: AT_F2D10.C1.o16.tg
atggatagagagatccaaaacggtgcgtatagtgggagagtgatgactgaggagcagatggagattctccgtaagcagatcgccgtttacgccgttatttgtgaccaactcgtcctcctccacaactccctctcttcttaccatccactctcatcaggagtgaggccaatggttggcggatactttgatccgatgggggcatcgtcaagttctcataggatatcgactaggcatcggtggactccgacttcaacacagcttcagatacttgagagcatttacgacgaaggaagtggaacaccgaatcgacggaggattagagagatcgcgacggagctgtctgaacatggacagatcacggagacaaatgtctacaattggtttcaaaaccggcgagctcggtccaaacgaaagcagcctcaaacgacgacagctaatggtcaggctgacgatgtggcggtgacaacggaggaaaggaggagttgtggagattcagggggattagagtcttatgagcatatactcttcccaagtcctgacttagggattgagcatttgttgagtatagggaaatttatggagacttaa

SEQ ID NO: 2018 - DNA, 2127 bp, Arabidopsis thaliana
  Clone ID: AT_F21H2.C1.o11.tg
atggattctagccataatgacagttctagtgatgaagagggtattgactccaacaatcgccgccatcactctaatcatcaagttcaaaggctcgaagcgttttttcatgaatgtccacatccagacgattctcagcgacgtcaattgggtaacgaactgaatctgaaacacaaacaaatcaaattttggtttcaaaacagaagaactcaagccaggattcataatgaaaaagcagataacatagcacttagagtagagaacatgaaaattagatgtgtaaatgaagcaatggaaaaggcactcgagactgtgctctgccctccttgtggtggccctcatgggaaagaagaacaattatgcaatctccaaaaacttcgtacaaagaacgtcattctcaaaacagagtacgaaagactctcaagctacctaaccaagcacggaggttactcaatacctagcgtcgatgccttacctgatctccatggtccatcaacctatgggtcaacctccaataatcgtcctgcttcatatggttcctcttctaaccatctcccccaacaatcaagcttattaagaagaccatttactcgtgaactcatcaacaccaccccactgcctaaaccagtactactgcagcatttccaacagctatctcaactggagaaaaataggatgtttgaaatagcgaaaaacgcggtggcagaggttatgagtctcattcaaatggaacactcaatgtggattaagtcaactattgatggtagagccatcattgatccagggaactataagagatattttactaagaatagccatcttaagagccgaagtgctcttcaatctcatcatgagtcttctatggaagtcgtggtggttcaaatggatgcaagaaacttggtcgacatgttcttaaatacggagaaatgggcgaggctttttccaacaattgtgaccgaagctaaaacaattcacgtgttggattccatggaccatccaagacaaactttctcaagagtggtatatgagcaactgcacatactgtcaccattggtgctacctagagagtttataatcctaagaacttgccagcaaatgaaagaagatctctggttgatagctgacgtttcctgttatctccaaaacgttgaatttgagtctacggctcctatttgcaccaaacgtccctccggtgttctaatccaagccttgccccatggtcgttctaaggtaacatggatagagcatgtggaagtgactgataaagtgtggccacatcagctttatagagacctcttatacggtggttttggctatggagctcgacgttggaccgctactcttcagaggatgtgtgagaggctgtctctctactccatgactgacttccctcccaccgactaccccggagttgtgaaaacaatagaaggaagaaggagcgtcatgagtttgggagaaagaatgttgaagaactttgcatggataatgaaaatgtctgacaaactcgatctcccgcaacagtctggagccaacaatagcggagttaggatttcggtgcggacaaacacagaggccggtcaaccgcctggtctcatcgtctgcgccggttcatctttatctctccctctccctcctctccaagtctacgatttccttagaaatctggaggttcgtcaccagtgggacgttcactgccaaggaaatccagtgactgaggctgctcgttttgtcaccggacctgaccaaaagaacaacgtgacttttctccagccgtcaagtgtaggggaatataagttgatgatactacaagatggcttcatagatgcattaggaggtatggtggtatacgctccaatgaatctaaacacagcatactccgccatttctggccaagtcgatccttccaccattccaattctcccttccggtttcatcatctctcgtgacagccatccttcctctagcgaggttgatggtggcagcatgacactcctcactttggcttttcagatctttgtcaccggtccgagttactatacagatcttaacctgaaagattctgccaccacagtcaataccttggttagctccgccgttcaaaggatcaaggccatgcttaactgcgaatga

SEQ ID NO: 2019 - DNA, 2064 bp, Arabidopsis thaliana
  Clone ID: AT_F2H15.C1.o22.tg
atggagtttctcggcgacagtcaaaatcacgatagctctgaaacagagaagaagaacaagaagaagaagcgatttcaccgtcacacacctcaccagatccaacggcttgaatcaactttcaatgagtgtcaacatccagatgagaaacagaggaaccaacttagtagagagttgggtttagctccaagacagatcaagttctggtttcaaaacagaagaactcaaaagaaggcacaacacgaaagagctgataattgtgcattgaaagaagagaatgataagattcgatgcgaaaacattgctattagagaagctattaaacacgccatttgccccagctgtggtgattctcctgttaatgaagactcttactttgatgagcaaaagcttcgcatcgaaaatgcacagcttagagatgagctcgaaagggtttcgagtattgcagctaaattcttaggaagaccaatctcccatcttccaccattactaaatccgatgcatgtttcgccattagagttattccataccggaccttcacttgattttgatcttctcccaggaagttgttcttcaatgtctgttccaagtttaccatctcagccaaacttggttttatcagagatggataagtctcttatgaccaacattgctgtgaccgctatggaagaattgcttaggcttcttcaaacaaatgagcctctgtggatcaaaactgatggatgcagagatgttctcaatctcgaaaactatgagaatatgtttacaagatcaagtactagtggtggaaagaagaataaccttggaatggaagcatctagatcttctggtgttgttttcactaatgctattacacttgtggacatgcttatgaactctgtcaaattaacagagctttttccctcgatcgttgcatcatctaaaacccttgcagtgatttcatcgggattgcgtggaaaccatggagatgcattgcatttgatgattgaagagcttcaagtgctttcaccattggtaacaacgcgtgagttctgtgtgctaagatattgtcagcaaatcgaacatggaacttgggcaatagtaaatgtctcatatgagtttcctcagtttatatctcaatctcggtcatatagatttccttctggttgcttgatccaagatatgtccaatggctattcaaaggttacttgggtggaacatggtgaattcgaggagcaagaaccgatacatgagatgtttaaagatatagttcataaaggattagcttttggagctgaacgttggattgctactctccaaagaatgtgtgagagattcacgaatctattggaacctgcaacatcatcccttgatcttggaggagtgattccatcgccagaagggaagagaagtataatgagacttgctcacagaatggtaagcaacttctgcttgagtgttggcacatctaacaacactcgctcaacggttgtctcgggactggatgaatttggaatccgtgtgacttcgcataagagcagacatgaaccaaatggaatggttctatgtgcagccacaagtttctggctccctatttctccacaaaacgtcttcaatttcctcaaagatgagagaactcggcctcagtgggacgttctttcaaatggaaactctgttcaagaagttgctcatatcacaaacggatcaaatcctggaaactgcatatctgttcttcgtggattcaatgcatcatcatcacaaaacaacatgttgattctacaagaaagctgcatagactcatcaagtgcagcgcttgtgatctacactccagtggatctaccagcgttgaacatagcaatgagtggtcaagacacatcttatattccgatattaccctcaggttttgccatttcaccagacggaagcagcaaaggaggaggatcattgataacggttgggtttcagataatggtgagtggtttgcaaccggcaaaactgaacatggagtcaatggagacagtaaataatctcatcaataccactgtccaccaaattaaaacgaccttgaattgtccttcaactgcttga

SEQ ID NO: 2020 - DNA, 2262 bp, Arabidopsis thaliana
  Clone ID: AT_T9L24.C1.o23.tg
atgagtttcgtcgtcggcgtcggcggaagtggtagtggaagcggcggagacggtggtggtagtcatcatcacgacggctctgaaactgataggaagaagaaacgttaccatcgtcacaccgctcaacagattcaacgccttgaatcgagtttcaaggagtgtcctcatccagatgagaaacagaggaaccagcttagcagagaattgggtttggctccaagacaaatcaagttctggtttcagaacagaagaactcagcttaaggctcaacatgagagagcagataatagtgcactaaaggcagagaatgataaaattcgttgcgaaaacattgctattagagaagctctcaagcatgctatatgtcctaactgtggaggtcctcctgttagtgaagatccttactttgatgaacaaaagcttcggattgaaaatgcacaccttagagaagagcttgaaagaatgtctaccattgcatcaaagtacatgggaagaccgatatcgcaactctctacgctacatccaatgcacatctcaccgttggatttgtcaatgactagtttaactggttgtggaccttttggtcatggtccttcactcgattttgatcttcttccaggaagttctatggctgttggtcctaataataatctgcaatctcagcctaacttggctatatcagacatggataagcctattatgaccggcattgctttgactgcaatggaagaattgctcaggcttcttcagacaaatgaacctctatggacaagaacagatggctgcagagacattctcaatcttggtagctatgagaatgttttcccaagatcaagtaaccgagggaagaaccagaactttcgagtcgaagcatcaaggtcttctggtattgtcttcatgaatgctatggcacttgtcgacatgttcatggattgtgtcaagtggacagaactctttccctctatcattgcagcttctaaaacacttgcagtgatttcttcaggaatgggaggtacccatgagggtgcattgcatttgttgtatgaagaaatggaagtgctttcgcctttagtagcaacacgcgaattctgcgagctacgctattgtcaacagactgaacaaggaagctggatagttgtaaacgtctcatatgatcttcctcagtttgtttctcactctcagtcctatagatttccatctggatgcttgattcaggatatgcccaatggatattccaaggttacttgggttgaacatattgaaactgaagaaaaagaactggttcatgagctatacagagagattattcacagagggattgcttttggggctgatcgttgggttaccactctccagagaatgtgtgaaagatttgcttctctatcggtaccagcgtcttcatctcgtgatctcggtggagtgattctatcaccggaagggaagagaagcatgatgagacttgctcagaggatgatcagcaactactgtttaagtgtcagcagatccaacaacacacgctcaaccgttgtttcggaactgaacgaagttggaatccgtgtgactgcacataagagccctgaaccaaacggcacagtcctatgtgcagccaccactttctggcttcccaattctcctcaaaatgtcttcaatttcctcaaagacgaaagaacccgtcctcagtgggatgttctttcaaacggaaacgcagtgcaagaagttgctcacatctcaaacggatcacatcctggaaactgcatatcggttctacgtggatccaatgcaacacatagcaacaacatgcttattctgcaagaaagctcaacagactcatcaggagcatttgtggtctacagtccagtggatttagcagcattgaacatcgcaatgagcggtgaagatccttcttatattcctctcttgtcctcaggtttcacaatctcaccagatggaaatggctcaaactctgaacaaggaggagcctcgacgagctcaggacgggcatcagctagcggttcgttgataacggttgggtttcagataatggtaagcaatttaccgacggcaaaactgaatatggagtcggtggaaacgctctcttccctctttcttctgggtgtctctttctcttcaatgatggaacagagaagggaattaactccttcttttgccttcaatgccagagagagagaagagaagctcattaactccaattgttctgctgcttctgttggtgctgttctgttcttggacaaacctcattaa

SEQ ID NO: 2021 - DNA, 1488 bp, Arabidopsis thaliana
  Clone ID: AT_T7N9.C1.o11.tg
atggaaaactcagacactgattcagaagttttcttttggtttcagaaccaaaaccaaaaccatagccataagtttccttcttcttgttttcctccgagctctcactctgctttttatggatctagctcaatgatcaacacagagactgcaactatggacgaagaagacgtatgtgagagctacatgatgcgtgagataaccaagaaacggaagctaacaccgatccaattgcgtttactagaggagagtttcgaagaagagaaaagactcgaaccagacaggaaactctggctagccgagaagctagggctgcagccaagccaagtcgctgtctggttccaaaacagaagagctagatacaagaccaaacagctcgaacacgactgtgactctcttaaagctagctatgctaagctcaagactgactgggacattctctttgtacaaaaccaaaccctcaagagcaaggtacagtttcttaatagattaacaagccactattttcaagagtctgttcaaaattttgatgacacattcaaacaggtcgatcttctcaaagagaagctgaaaatgcaagagaatcttgaaactcagtctattgagaggaaaagacttggggaagaaggtagttcggtgaaaagcgataacacgcagtacagtgaagaagaaggtttggagaatcaatacagtttcccggagcttgcagttctcggattttattatgatccaaccttaactgcttcaaatctaagacaagaacctttgaaagtcacgtgtgcggatcagatgactcagatccaaatatctgacgtcacagaacctgcgagctccgcacataaaaaaattgaagtgacacagcgaagttcgagtatgagccgcaagagagataaaccctacacaaaccgtcacacaccggcgcgaatttcgaaacgccggcgaccatgggcgccttcgtcatcggagcacgatgagattatcgacaaaccgatcaccaaacctccgccgccaccggcgttggtagttatgggacttcccgccaactgttcagttctggagctaaaatctcgattcgagatctacggttcaatctcccgaatccgaatccataaagacggaattggctccgtttcgtatcgaaccgccgagtcagcagaagccgccattgctggtagtcacgagccttctttcggtatctccatcgattccaaaaagttggaggtggtttgggcgacggatccattggtgaagtggaaggaaggtgtgacggcgggagaaggaaaggagagaacgtcgtcgttttcgtcgaagcttttacgacctgtgatgcctttgagaaaacatgggagaagcagtaggttagcgtcagctattgttaatccgagaagtgataatactaaaggaattagtggagatggagggatatcatctccggcgacgacaagtgaagttaaacagagaaatatagtaacctacgacgatatcgtttaa

SEQ ID NO: 2022 - DNA, 849 bp, Arabidopsis thaliana
  Clone ID: AT_T2P11.C1.o15.tg
atgtcttgtaataataatggcttagctttcttccctgaaaatttcagtctccaaaaccatcaccaagaagaagaagatcaccctcaacttcttcaagacttccatggtacatcatctcaattaacacctttgttcaaaatttctaatcctttttttttctacttctcaagatcttctctgtttttagggtttctaggtaaaagatctccaatgaacaacgtgcaagggttttgtaatctagatatgaacggagatgaagaatattcagacgatggatctaagatgggagagaagaagaggagattgaacatggaacaattgaaggcactagagaaggactttgagcttggtaataaacttgaatcagatcgaaaattagagctagctcgtgccttgggattgcaacctagacaaattgctatatggttccaaaacagaagagctcgatccaaaaccaagcagcttgagaaagactatgacatgcttaagcgtcaattcgaaagtctcagagatgagaacgaagttcttcaaactcaaaatcaaaagcttcaagctcaggtaatggcattgaaaagcagagaaccaatagaatcaatcaatctgaacaaagaaacagaaggatcatgtagtgacagaagtgagaacatttctggtgacatcaggccaccggagatcgatagccaattcgccctaggccatccaccgacaactacaacgatgcagttttttcagaattcatcgtcagaacagagaatggtgaaagaagagaacagtatcagtaacatgttctgtggaattgatgaccagtctgggttctggccatggcttgaccagcaacaatacaattga

SEQ ID NO: 2023 - DNA, 315 bp, Arabidopsis thaliana
  Clone ID: AT_F15H11.C1.o25.tg
atgagagattttgacataaaccaaacaccaaagacggaagaagatcgtgagtggatgatcggtgcaacaccacatgtcaacgaagatgatagcaactcgggtggccggcggcgcaaaaagctccgtctaacgaaagaacaatcacatcttcttgaagagagtttcatacaaaaccataccttaacccctaagcaaaaaaaagatttggccacctttttgaagcttagtcaaaggcaagttgaggtgtggtttcaaaatcgaagagctcggtacgtatatatctacctcttcatatattacatcattcatacataa

SEQ ID NO: 2024 - DNA, 5112 bp, Arabidopsis thaliana
  Clone ID: AT_F3M18.C1.o28.tg
atgggttctgacggtgaagatcagaagatcaggagcgtcgttggtgatgctaatcttaataataagaagaagaagattgataataattcctcctctaaggatggtcgtgtcaagcctaaacgtcagatgaaaactccgtttcagcttgaaaccttggagaaagtttattcagaggagaagtatccgtcggaggcgacgagggctgagttatctgagaaattggatttgtcagatcgacaattacagatgtggttttgtcatagacggttaaaggacaagaaggatggtcagtctaataaaccggtgaaatcatcggttgctgcggttcaatcggcttcggttaacgagttaccggctgctgctggatcggtacctgagcaagattccagatctgattcgggttctgagtctggttgcagtccttattccaactctaggaggaattttgctagtggtagtagtagttctcgagctgaattggatgaatatgagacaatgggaaagccgagttatgagtcgcggttgtcgacaatggtgcatagagctattgtctgtattgaggctcagttaggtgagccattgagagatgatggacctattcttggcatggagtttgatcctttgcctcctggtgcgtttggaacacctatagcgatgcagaaacacctacttcatccctatgagagcgatctgtatgagcgacatgatccccgacctcgaagatctcatgctgctgcccgttctttccatgagcaacaatctctggatgatccgtcttcttttacacctaatatgtatgaacgatactctgaaaatcatgcacgtggtatggactatgaagttgcacgttctagaatttcatcatttatgcacgcgaatggacctgtaccaaggtcctatgttacccctggacatgcgtctcgtaactgttcgacatctcaacaagacatgccaagccccattgaatcagcgcatcatggtgatagattcctgctggagaaggactcatcagtccttggtacagaagatccatatttgttacctgatggagtgcgtaagagtagtgatgtgcatagaaagggaaagattaacgatggtagacttggaagagggagtgaaacccgagagaatcatggaccaaaagatcttgagaagctagaaattcagaggaaaaagaatgaagaacgcatgagaaaagagatggaaaggaacgagcgtgagaggcgtaaggaagaagagaggttgatgcgtgaaagaataaaagaagaggaaaggttacagcgtgagcagcgtcgtgaagtagaaagaagagaaaaattcttacagagagaaaatgaaagggctgagaaaaagaagcaaaaagacgagattcgtcgagagaaagacgctattagacgcaagcttgccattgagaaggcaactgcacgtagaattgccaaggagtctatggatcttattgaagatgagcagctagaactaatggaattggctgctattagcaaaggattaccctcagtattacagcttgatcacgacacattgcagaatcttgaggtgtatagagattctctgagcacatttccaccaaagtctttgcaactaaaaatgccgtttgccatttctccatggaaagattctgatgaaactgttggaaaccttctaatggtttggagattcctgatatcattttctgatgttcttgacctatggccttttacactggatgagtttattcaggcttttcatgactatgactcaaggttgctgggggagatacatgttactcttctgagatcaataatacgagatgtcgaagatgttgctagaacaccctttagtggaattggaaataaccaatatactacagccaatcctgagggtggacatccgcaaatagttgaaggggcttatgcatggggttttgacattcgtagttggaaaaagcatttgaacccactaacatggcctgaaatactgcgacaattagcgctctctgctggatttggacctaagctgaagaaaaaacattcccgattgaccaatactggtgataaggatgaggctaaaggttgtgaagatgtcatttctactatccgaaatggtacagcagctgaaagtgcttttgcatcgatgcgggagaaagggttgctcgctcctcgcaagtcgaggcaccggttgacacctggaaccgtcaaatttgcagcctttcatgttctatctcttgaaggaagcaagggactgacagtattagaacttgctgacaagattcagaaatctggacttcgggacttgaccacaagcaagacaccagaggcttctatttctgttgcattgacaagagatgtgaaactctttgaaagaatagctccttcgacttattgtgtacgagctccttatgtgaaggatcctaaggatggagaggcaatactcgcagatgccaggaagaagatacgggcttttgaaaatggatttacaggtccagaagatgtgaatgatcttgaaagggatgaagacttcgaaattgatattgatgaggatcccgaggttgatgatttagctacactggcaagtgcatcaaaaagtgccgttcttggagaagcgaatgttttgtcaggaaagggggtagatacaatgttctgtgatgttaaagcagatgtaaagagtgagcttgagaaggagttttcatctcctcctccaagcactatgaagagcattgttccacaacatagtgagcggcataaaaatacagtggttggcggcgtggatgccgtaattgatgaaagcaaccagggccaatcatggattcaaggtcttacggaaggggattactgtcatctaagtgttgaagagcgccttaatgcccttgttgctttagtcggcattgccaatgaaggaaactccatcagaacaggtcttgaggatcgtatggaagcagcaaatgctcttaaaaagcaaatgtgggctgaagcacagttagataacagctgtatgagagatgtacttaagcttgatcttcaaaacttagcaagcagcaaaactgaatcaacgataggcctaccaatcattcaaagctctactcgtgagagggatagttttgatagagacccttctcaacttctagatgaaacaaagcccctggaagatctttcgaacgatcttcataaatcatctgctgagagagcacttattaatcaggatgccaatataagtcaagaaaattatgcttcaaagagatcacgctcccaattaaagtcatatataggccacaaagcagaagaggtgtatccataccgatctttgccgcttggacaagatcggcgccacaatcgttactggcattttgctgtatcagtgtctaagagtgatccttgttcgaggctcttatttgttgagctacatgatggcaagtggctcctcattgattcagaagaggcttttgatattctggttgcatcattggatatgcgtgggatcagagagtctcatttacgcataatgctgcagaagatcgagggatcattcaaagagaatgcttgtaaagatataaagctagctagaaaccctttcttgacggaaaagagtgttgtgaatcattctcctacagattctgtgagcccatcgtccagtgctatatcagggtcaaactctgattcaatggaaacttcaacttcaattagagttgatttaggtagaaatgacaccgagaacaagaatttatcaaaacggttccatgatttccagagatggatgtggaccgagacgtacagttcactaccttcttgtgctagaaaatatgggaagaagagatctgaactgttagcaacatgtgacgcgtgtgttgcttcctatttgtctgagtataccttctgctcttcttgtcaccagagattggacgtggttgatagttcagagatattagattcaggtttggctgtgtctcctcttccttttggagtcaggttgctcaaaccactacttgtttttctcgaggcatctgttccagatgaagctcttgaatcattttggacagaggaccaaagaaaaaaatgggggtttaggttgaatacttcatcatcacctggagaacttttgcaggtgttgacttccttagagagtgcaatcaagaaagaatctttgtcatccaattttatgtcggcaaaggagcttttgggagctgctaacgctgaggctgatgatcagggatcagtggacgttcttccatggataccaaagacagtatcagcggttgctttgagactttcagaacttgatgcatccattatttatgtgaagccagagaaacctgaggtcatccctgaagatgagaacgagcagattagccttttccctagagattcacctttcaaaggcaaaggacccagagagcaagaagatcaagacgaggttgctccaaacccgggtaacagaaataagaaacgtgcacgagtaagcttgggatctggatcaaacagaaaggtgaagaggaagaaagcgcaaagcggtcttaacaaatttgtcgttggtaggagaaatgttgcagtcaatagtaacttaatggccgttgagttgaaccaccaagtccctggaaaaggaaagaggacggttagaaaaagaccagagaggatcgatgaggataattcccacctagtcaatagaatggctaatattgttaggcctaaaagcgaagaagttgaagaagatgaggaagaagaagagcaaacattcagagacattaatgaagactgggcagcaggtgaaactcctagagagatggaggaggactgggccaatgaaacaccaaacagaatgatgacgccgatgcaagtggatgatgaaagtgacaacagtgtaggagttgaatcagaggatgaagatggtggtggtcagtttgtggattatagtcagagaaacaagtgggggttagattggaatagtaacctaaatgtggcaatagaggaagacgaggaagaagaagttgtgggggttgggcgggtcgaaggagaagatgacgcagaaatgagtgagagctctgaagatgatgatgtacctgctaataatgcagcaaacaattacgacagagaatcagaaggttacagcagcagcgattcatga

SEQ ID NO: 2025 - DNA, 1617 bp, Arabidopsis thaliana
  Clone ID: AT_F6F9.C1.o29.tg
atggcagtttattacacaagtaatgtcggttgttaccagcaagaaccaatctttctcaaccatcaacaacaaaaccaacaagcttcttcttcatccgccgccgcttctttcaccgtcaccggcggcgatactgttcgaaacgagatggtttttatcccaccaaccaccacaggagacgttgtaacaggaaacggtaccgtttcaagcagcgatctaagctttcacgatggtcaaggactgtctttgagccttggtactcagatctctgttgctccgtttcactttcatcaataccaattggggtttactagtcagaatccttcaatttcagtcaaggaaacgtcaccgtttcatgtggatgagatgagtgtgaagagcaaagaaatgatcttgttgggtcaatctgatccttcctctggttatgctggtaatggtgggaatggcttctacaacaattatcggtataatgagacatcaggagggtttatgagcagcgttctgcgttctcggtatcttaaacctgctcagaatttgcttgatgaagtggttagtgtcaagaaagaactaaaccaaatggggaagaagaagatgaaagttaatgactttaacagtggttctaaggagatagaaggaggaggtggtgagttatcgagtgattcgaatgggaaatcgattgagttatctacaattgaacgtgaagagcttcagaacaagaagaacaagcttttaacaatggttgatgaggtagataaaagatataaccaatattaccatcaaatggaagcattagcttcatcatttgagatagtagcaggacttggatcagctaagccttacacatcagttgctctcaacagaatctctcgccattttcgtgctcttcgcgacgcaataaaggaacaaattcagattgttagagaaaaacttggggagaaaggaggagagtcgttggatgagcaacaaggagagaggataccaaggttgaggtatttagatcaacggttgagacagcaaagagctttgcatcaacagcttggaatggttcgacctgcttggagacctcaaagaggtcttcctgaaaactctgtctctgttcttcgcgcttggctctttgaacatttccttcatccatatccgaaagaatctgagaaaatcatgcttgcaaagcagacaggattgtcaaagaaccaggttgctaattggttcataaacgcgagagttcgtctgtggaaaccgatgatcgaagaaatgtataaagaagagtttggtgatgaatctgagttactaatctccaaatcttcccaagaacccaacagcacaaaccaagaagactcctcatcgcagcagcagcagcagcaagagaacaacaacaacagcaacctcgcttattcatctgcagacacaacaaacattgtcttctcatcagaaaccaaaccagatcgtgttctaggcaatgataacgacccacagcaacaacagataaaccgctcatcggattacgacactctgatgaactatcacgggtttggtgttgatgattaccgttacattagcggaagcaaccagcaagaaagcagattctccaattcccatcacttacacgactttgttgtgtga

SEQ ID NO: 2026 - DNA, 678 bp, Arabidopsis thaliana
  Clone ID: AT_MPH15.C1.o6.tg
atgcccttaggagcagctacggttgtggaggaggaagaggaggaggaggaagcggtgcctagtatgtcagtatcgccgccggatagtgtaacgtcgtcgtttcaattggactttgggattaaaagttatggttatgagagaagaagcaataagagagatattgatgatgaagtggagagatcagcttcaagagccagcaacgaagacaacgatgacgagaatggatccactaggaagaaacttagactctccaaagaccaatctgcttttcttgaagacagcttcaaagaacacagtacccttaatcctaaacagaagattgcattggcgaagcagttgaatcttcgtcctcgtcaggttgaagtctggtttcaaaacagacgagccaggacaaagctgaagcaaacggaagtggactgtgaatacctaaagagatgctgtgagtcactaaccgaagaaaaccggaggcttcaaaaagaggttaaagaattgagaaccttgaagacttccacacccttttacatgcaacttccggccactactctcactatgtgcccttcttgtgaacgtgttgccacttcagcagcacagccctccacgtcagctgcccacaacctctgtttgtccacgtcatcattgattccggttaagcctcggccggccaaacaagtttcatga

SEQ ID NO: 2027 - DNA, 438 bp, Arabidopsis thaliana
  Clone ID: AT_F24J7.C1.o180.tg
atgggtcaaaatttcccaaatggattgggtacattctacatcggaatttataaacttgtggaagatccttcgtcggatccaataatctcgtggagcaaaagcaacaatggtttcgtcatgtgtaatgaggaagcgcgaatccgcagtaagatactcttgagattcaattgcggcaaactctcagagtttctctccgagctcaagtattacgtaagttttctatatatcctccgaatcgagttttggaatcatggctttacaagagttaagaagacggactctgggaaaatggaatttagaaatgaagatttcgttagaggccaacctgagcgtttaagggacatgatgctcaaagcttgtaggaagcacagagccaaattcaaagccaaagaagctgccaaagaagcagccaaagaattacaacgtttacagatttga

SEQ ID NO: 2028 - DNA, 1887 bp, Arabidopsis thaliana
  Clone ID: AT_T26F17.C1.o2.tg
atgactggtactactttgatattggaaccagttatggattccaaagatgagctagtgaaacaacatgccaaagttgcagaagatgctgttgctgggtgggagaaagctgagaatgaagtggttgagctgaagcaaaagctcgaggatgcggctgataagaacattgtcttggaagatagggtaagtcatcttgatggggcgcttaaggagtgtgtgagacaactaaggcagtttagagatgaacaagagaagaatattcaagcagctgtgactgagagcaccaaggagttgcattctgctaacactggtctagagaagcgagttcttgagctccagaaagaagcagaagctgctaaatctgaaaacatgatgctgagacgcgagtttcttacacagcgtgaagaccttgagattgtgatgattgagagggacttgagcactcaagcagcagaaactgctagtaagcagcatttagacatcataaagaagttggcgaaactcgaagctgagtgcaggaagcttaggattttggctaaaacatcatcatcgctatcatctaatcaatctgtggatagtcattcagatggaggaagggagagagttgaggggagttgctctgattcatgggcatcatcagcatttatttctgagttagatcaaatcaagaatgaaaaaggcggcaatagaagtcttcagggcactacttcatcaactgaaattgatctcatggatgatttccttgagatggaacgtcttgtggctcttcctactgagacacaggctaaaaactccaaggatggatatgaattgagcttaatggagaagttggagaagatacaagcagaaaaggatgatcttgaaagagaagttaaatgttgtagagaagcggaaaagagattgagcttagagattgaagcagttgttggtgacaaaatggagttggaagatatgttaaagagggtggaagctgagaaagctgagctaaagacatcttttgacgtgctcaaagataaatatcaagagtcaagagtttgttttcaagaagttgacacaaagttggagaagctacaagcagaaaaggatgagcttgacagtgaagttatttgttgtaaagaagcagagaagagattcagcttagaactcgaagctgtagttggtgacaaaattgagatggaagatgagttggagaagatggaagctgagaaagctgagctaaagatatcttttgacgtaattaaagatcaatatcaagaatctagagtttgttttcaagaagttgagatgaagttggaagcgatgaaaagggagcttaaactagctaatgaatcgaaaacacaagccgaatctcgggtgaccagaatggaagcagaggtgagaaaggagaggattgtctctgatgggctaaaggaaaagtgtgagacatttgaagaagagcttagaagagagatagaagagaagacaatgatcaagagagaaaaagtggaaccaaagatcaaacaggaagacatagcaacagctgcaggaaaatttgcagattgtcagaaaacaatagcatcacttgggaaacagctacaatctcttgcaacactagaagaattcttgatcgatacagctagcattccaggttctgcaaggtcagttcacaacaaggaagctttgttaggaaaagatcctcatgagtgcatcaaaacaatcaatggaagatcacttgagtttcttgcaatccagaacagcaataacaagacctcacctccttgttcatcttcttcggactcaacaacagtgtcattaattatgtcatcaaaccgagggagttctgagaagaatcgcaacggatttgccacggttttcactcgaagtagaaactcagtaaatttggggatttag

SEQ ID NO: 2029 - DNA, 378 bp, Arabidopsis thaliana
  Clone ID: AT_T5M16.C1.o16.tg
atgggttacaatttctacatgagagtgtatgaggttgttgatgatgcttcaacggatgcaatcatatcgtggagcgaaagcaacaacagtttcattatctggaatgttggagagttttacagaaggattctgcctaaatatgtagacttgggcacaaacctctcacggtttttctccaaccttcgttctcatgggttcaaaatagttaaaggaagaactggagtattggaatttggacatgaagattttatcagagataaactggagcttatgaagaagatggttagcgataaacgtaaagcaaggaaagctgctaaatccaaagcaaggaaagctagagttcaagtcgagtttctcttccaacacttgcaaatttga

SEQ ID NO: 2030 - DNA, 996 bp, Arabidopsis thaliana
  Clone ID: AT_MJP23.C1.o4.tg
atgacggcaattccaaacgtcgtcgatattgaatcttcttcctcttcgctttgtcaagagacggcaacggagaccgtcaccgttgaaagaggctcgtctgattcatcttcaaagccagacgacgtcgttttactaatcaaggaagaggaggatgacgccgttaacttgtcacttggtttttggaaattgcacgagataggtttaataacaccgttcttgagaaagacgtttgagatcgtcgatgacaaagtaacagacccggttgtatcatggagcccgacccgtaaaagctttatcatttgggattcttacgagttctcagagaatctacttcccaaatacttcaagcacaagaacttctccagttttattcgtcagcttaactcttacggttttaaaaaggtcgattcagataggtgggaatttgctaacgaagggtttcaaggagggaagaaacatttgcttaagaacatcaagaggagaagcaaaaacactaaatgttgtaacaaggaagcgagtaccaccacgacagagactgaggttgagtcattgaaggaggaacagagtccaatgagattggagatgttgaagctgaaacaacaacaagaagaatctcaacatcagatggtcactgtgcaggagaagatccacggagttgataccgaacaacagcatatgcttagtttctttgcaaagttggctaaagatcaaagatttgtagagagactggtgaagaagagaaagatgaaaatacagagagagctagaagcagctgaattcgtgaagaagctcaagttgcttcaggatcaagaaactcaaaagaacttgttagatgtagaaagagaatttatggccatggctgcaacagaacacaatcccgagcctgacattttggtgaacaatcaaagcgggaatacgagatgtcagcttaactcagaggacctacttgttgacggtggctcaatggatgtaaatgggaggatagagatagagtag

SEQ ID NO: 2031 - DNA, 492 bp, Arabidopsis thaliana
  Clone ID: AT_T16N11.C1.o9.tg
atggcgaatgagagtaataatcttggactcgaaatcaccgaactacggctaggtcttcccggagatatcgtcgtctccggtgagtccatctccgggaagaagagggcttctccggaagtagagattgatttgaaatgtgaaccggcgaaaaagagtcaagttgtgggttggccaccggtttgttcgtaccggagaaagaacagtctcgaacggaccaaaagttcgtacgtgaaagtgagtgtagatggagctgcatttttaaggaagattgatttggaaatgtacaaatgttaccaagatcttgcttccgctctgcaaattctgttcggatgctatatcaattttgatgatacgttgaaggaaagtgaatgtgtaccaatatatgaagacaaagatggagattggatgcttgctggagatgttccttgggaaatgttccttggatcgtgcaagaggttaaggattatgaagagatcatgtaacagaggatga

SEQ ID NO: 2032 - DNA, 540 bp, Arabidopsis thaliana
  Clone ID: AT_F5I6.C1.o14.tg
atgtcaccggaggaatacgttagggtttggccggattccggtgatcttggaggaactgagctgaccctagctttgcctggcactccgacaaatgcatcggaaggtccaaaaaagttcgggaacaaacgtagattcctcgagaccgttgatttaaaactcggggaagcacacgagaacaattatatctcaagcatggtcactaatgaccagttggtgggctggccgccggtagcgacagcgaggaaaacagtgaggcggaaatacgtgaaagtggcgttggatggtgcggcctatctcagaaaggttgatcttgggatgtacgattgctatggacagcttttcaccgctctagaaaacatgtttcaggggataataacaatatgtagagtgacagagttggagaggaagggagagtttgttgctacttacgaggataaggacggtgacttgatgttagtcggagatgtgccgtggatgatgtttgtggaatcttgcaaacgtatgaggttaatgaaaaccggagatgctattggattatag

SEQ ID NO: 2033 - DNA, 444 bp, Arabidopsis thaliana
  Clone ID: AT_T1N24.C1.o24.tg
atggaagaagaaaagagattggagctaaggctagctcctccttgtcaccaattcacttccaacaacaacatcaatggatctaaacaaaaaagctcgaccaaagaaacatcattcctttccaataacagggttgaggtagctccagtggtgggatggccgccggtgagatcatcccggagaaacctaacggcacaactaaaggaggagatgaagaagaaggagagtgatgaagagaaggaattgtacgttaagatcaacatggaaggagttccaataggaagaaaagtcaacctttcagcttataacaactaccaacagctttcacatgccgttgaccaactcttctctaagaaagattcgtgggatctaaacagacaatacactttggtctacgaagacactgaaggagataaagttctggtcggggatgttccttgggagtaa

SEQ ID NO: 2034 - DNA, 516 bp, Arabidopsis thaliana
  Clone ID: AT_MUA2.C1.o1.tg
atgaatagtttcgagccacaaagccaagactctttgcaaagaaggtttcatcaagacaacagcaccacacaacaacctcgtgacaccacgacacctttcatacccaaaccggcttccaaaaaccataataatagcaactccagctctggagcggccgggagatcattccaaggctttgggcttaacgtagaggacgatcttgtttcatcggtggttcctccggttacggttgtgctagagggacgttctatatgtcaacgcataagcctagacaagcatgggagttatcagagcttggcttcggctctaaggcaaatgtttgtcgatggagctgattcaacggacgatcttgatctgtcaaacgccattcctggccatcttattgcttatgaagacatggagaacgatctccttcttgccggagatcttacttggaaggactttgttcgtgtagcgaagagaattcgaatcttgccggtcaagggaaacacaagacaagttaaaagaaacgagtga

SEQ ID NO: 2035 - DNA, 2529 bp, Arabidopsis thaliana
  Clone ID: AT_F10M6.C1.o80.tg
atggagttggatcttggtctatctctttcacctcataaatcttccaagttagggtttaactttgacctcaacaagcattgtgcgatcgagggtgctgcgtcttgtttgggtaccgaaaaactgcgttttgaggcgacgtttgggttagggaatgtggaggaaaattgttatatgccaaaacagcgtttgtttgccttgaatggccagcccaacgaggaagacgaagatcctctggaatccgagtcttcaatagtttacgatgatgaggaggaaaatagcgaagttgttggatggccaccagtaaaaacatgtatgataaagaggatcacggcgatgaacaacaacatatctaatccaacaacggctactgtgggatcatcatcttcttcgtcaatatcatcaagatcatcaatgtatgttaaggttaagatggatggtgtggcaatagcaagaaaagtggatatcaagctttttaactcttacgagtccctcactaactccttgatcactatgtttaccgaatatgaagattgcgacagagaagatacaaattatacattcaccttccaagggaaagagggtgactggctacttcgaggggatgttacatggaatggaatcatggcgctaagcatgcgaaaagcgatcggagttgttaaggatcagactagtatcggcatagcgaaggtagctagcaacatggctccagatctggaagttgcgatcgtgaaagctacaagccacgacgatgatcaatctagtgacaagtatatccgcgagatccttagcttaacttcactctcccgtggctacgttcacgcctgtgtcacctctgtttcacgccgtcttaagaagacgcgtgactggatcgttgctctcaaggctcttatgcttgtccatcgtcttcttaacgaaggagatccactgtttcaggaagagatcctctacgctacacgacgaggtacgaggattcttaatatgtctgattttcgtgatgaggctcattctagctcttgggatcactctgctttcgttaggacatatgctagttacttggatcagaggcttgaattggctctttttgagagaagagggagaaatggtggtggtagtagtagtagtcaccaaagtaatggtgatgatggatataatcgatctagggatgattttaggtctcctcctccaagaacttatgattatgagactggtaatggttttggtatgcctaagaggtcgaggtcttttggagatgtgaatgagattggagcaagagaggagaagaaatctgttactcctttaagagagatgacacctgagaggatttttggaaagatgggtcatttgcagaggctgcttgatcggtttttatcttgtcgacccactggtttagccaaaaacagtcggatgatcttgattgccatgtacccggttgtgaaagagagttttaggctttacgctgacatctgtgaggtcttggctgttctgcttgacaagttttttgatatggagtatactgattgtgttaaggcctttgatgcttatgctagtgcggctaaacagattgatgagctcattgcgttttaccattggtgtaaggatactggagtggcgagatcttctgagtaccctgaggttcagaggattacgagcaagctgttggagacactagaagagtttgtgagagacagagccaagagggccaaaagtcctgagaggaaagagattgaagctcctcctgctcctgctcctcctgtggaagagccagtggatatgaatgagatcaaagcgcttcctcctcctgagaatcacactcctccacctccacctgcaccagagcctaaaccgcagcaaccacaagtaacagatgatctagttaacttgagagaagatgatgtctctggcgatgaccaaggaaacaagtttgctcttgcgctttttgctggccctcccgctaataacggaaaatgggaagctttctcttctgataacaacgtgacatcggcttggcagaatccagcagcagagcttgggaaggcggattgggaactagcattggtcgagacagctagtaatctagaacatcagaaagccgcaatgggtggtggtttagacccattgttactcaacggaatgtacgatcaaggagcagttagacaacacgtgagcacctcagagttaactggtggaagttcaagcagcgttgcactccctttaccgggtaaagtcaacagccatatactagcactccctgcaccagatggaaccgttcagaaagtgaaccaagacccgttcgctgcttccctgaccattccgcctccttcctatgtgcaaatggctgagatggacaaaaagcaatatctattgactcaagagcagcaattatggcagcaatatcagcaagaaggaatgagaggtcaagctagtttggctaagatgaatacagcccaaaccgcaatgccttatggtatgccgccggttaacgggatgggaccgtcgccgatgggttattactacaacaacccttactga

SEQ ID NO: 2036 - DNA, 6969 bp, Arabidopsis thaliana
  Clone ID: AT_F3I3.C1.o40.tg
atgaggaactcttttcctccttcagacggtgggagatcgacgactgatcgtcgtcagcagtcgtttccctcatcctcaacgaaccgttataactctcgctctgcacaatcttctccgccgctcaaccactgtactacttggaaccagcaacactctcagtaccataacactaatttcccgccaaattacagacgtgatcgtgctccgtcgtcgggattctctcctccagtcacgcgggctaggcctaatttcatcgttcagctgcttcaccccgccgccgctaacagtgacacaaagctgtctaagaagcaagagatcgagagtatcgctttgctttgcgaaattccggaggaatcagttcacgtgcctcaatttggttgtatcgctgcaagcttcagttttcgtcagtgggtcgatgcgcgttctgccgttgtggctctttgggattatcgtcttcaagggagacatgattttgttcctgagctgattcctaatgttgttgttccgtctgacatggacgagcttaaagacaggcttcgtgatcttttctcgtctcatgttctttcgcttatggaaaatggacaaggggtcaagaaggtgagaatggagattgatgacaagtctcgtcaagttgcgtccttttcgtctaaaaggggtctgaaatttgaggtttttgagaaaaagaaggctcttgaagcggagagagatttggttgtgaatcggcttgacgaattcaataatgccatgaagagcattttgcgatatctcataggacaagacgggtatgagtttgatgtagatgatgaagatgacgaagacgtggccgtgttttctttggaaggggcctatgattggagacgtattcattatttgattcttagagagtgtcgaaggctagaggatggactgcctatctatgcctaccggcggcagattttgaagaaaattcattgtgaacagataatggtgttgattggagaaactggttcagggaagagcactcagttagttcagttccttgctgattccggagttgctgctagtgagtcgattgtttgtacacaaccacggaagattgctgccatgacattgactgatcgggtcagagaagaaagcagtggttgttatgaggaaaatactgtttcttgtactccaactttttcgtctactgaggagattagttccaaagttgtatacatgacggataattgtctgcttcagcactacatgaaagatcggagtttgtctggcatttcatgtgttattattgacgaagctcatgaaagaagcttaaacacggaccttcttttggcattgcttagaaagttgctatccagaaggattgacctgaggcttgttatcatgtctgccacggctgacgccaaccaactttcacagtatttgttcgattgtggtattcttcatgtcaatgggaggaactttccggtggagattgtatattcccctagtggcacagaagagaattctgttgttggccgcattgcttcatatgctggtgatgttgttaagatggcagtggaaatacataaaacagagaaagaaggaaccatccttgcattcttgacttcccaagcagaggtagaatgggcatgcgaaaggtttgtagctccgtctgcaattgctttgcctttgcatggaaagctttccttcgaagaacaatttatggttttccagaactatcctgggagacgaaaagtgatatttgccacgaatattgcagagacgtcgctgactattcctggtgtcaagtatgtaattgattccgggatggtgaaagagagtaaatatgaacctagaacgggtatgagcatcctaaaggtgtgccaggtcagtcagagttctgctcgacaacgtgctggtcgtgctggaaggacagaacccggaagatgttacaggctctactcaaaaaccgattttgattcaatgaatcttaatcaagaacctgaaattcggagggtccatcttggtgtagcacttttgaggatgcttgctttgggaatagacaacatagcggcttttgagtttgttgacgcgcctgtcccggaagccattgcaatggctatccaaaatcttgttcagttgggtgcagtcgttgagaagaacggtgttcttgaattaacacaggaagggcattgtttagtcaagctggggctggaaccaaagcttggaaagttaattttaggctgcttcagacacagaatgggcaaagaggggattgttcttgctgctgtcatggctaatgctagtagtatattttgcagagttggtaactttgatgataagatgaaagctgatcgcctaaaggtgcaattctgcaatgataatggagacttgttcactcttctttcggtgtacaaagaatgggcatctctgccacgagatagaagaaataaatggtgctgggaaaatagcctgaatgccaaatcaatgaggagatgtgaagacacagtcaaggaattggagatatgcattgagagagaacttactcttgtcagccctagttactgggtttggaatccaaatgagggtactaaacacgacaagtatttgaaaatggttatacttgcatctcttgcagaaaacgtggcgatgtacactggctatgatcagcttggatacgaggtggcattgactagtcaacaagttcagttacatccatcgtgttcattgctagcatttggccagaagccaagctgggttgttttcggggaacttctatctattgtggaccagtacttggtatgtgtaactgcgtttgattttgaagctttgtatatgcttgatccaccaccaccttttgatgcatcccagatggatgagcggaggctccgagttaaaaaagtggttggttgtagtagcactgtgctaaaacgattctgtgggaaatctaatcgtagtctgctttcaattgtttctcgtgctaggtctctttgttcggatgaaaggattggtatccaagtcgatgtcgatcagaatgagattcgactgtatgcgtctcccctcgacatggaaaaagtgtcagcccttgtgaacgatgcattggaatgtgaaaagaaatggatgcgtaatgaatgtttggagaagtatctatttcatggtcggggacaaatacctattgcactgtttggatctggtgctcagataaagcatcttgaagttgatcagagatttctgacagtcgatgtacattattatggcgacgatgttgttgatgacagagagcttctgacgtttctggagaagaagattgatgggtgtatctgctctatttacaagtttgctgcgaacaagcaagactgtgatgagaaggagaagtggggtagaataacctttctcactccagaatctgctatgaaggcaacagaaattcagaaatttgatttcaaaggatcagtgctcaaagtatttccatcactgtcaactggtggaggaattttcaagatgccttatttctcttccgtgacagctaagattcgttggccgagaaaggaaagtagtggtagaggatgccttaagtgcccttccggagatattcacagtatacttggtgatataaccagccttgagataggaacaaattatgtccatattcagagagatcaactgtccaatgattctatcttgataagtggacttggagatctttcggaagcagaagttttagatgttttggaattcagaacgcagagaagagatctgaattttttcatattcagaaaaaaatacagtgtgcagtgcccatctcctactgcttgcgaagaagagcttcataagagaatatttgcgcgcatgtcagcaaagaatccagagccaaactgtgtccaagttcaagtttttgaaccaaaagaagacaattacttcatgcgagcgttaattaagtttgacgggagattacatctcgaagctgcaaaagctttgcaagagttaaatggggaggtgttacctggatgtcttccatggcagaagataaagtgcgaacaattgtttcagagctccataatctgctccgcttctatctacaacactgtcaaaagacaattgaacgttttattagcaaggtttgagagacaaaaagggggtgaatgctgtctggaaccaactcataacggggcttatcgtgttaaaattactgcttatgcaacaagacccgttgcggagatgcggagagagcttgaagaactcttaagaggaaaacccataaaccatccaggcttcacacctagagtcgtgcagcatcttatgtccagagatggtattaatctgatgcggaagatccaacaggagacagaaacttacattctattagataggcacaatctcacagtacgcatttgtggaacaagtgagaaaattgccaaggcagaacaagaactggttcagtcacttatggattatcatgagagcaagcaacttgaaatccacctccgaggtcctgagatccgtcctgacctcatgaaggaagttgtgaagcggtttggtccggagctccaaggtatcaaagaaaaggtgcatggtgtggatctcaagctcaatacccggtaccatgttattcaggttcatgggagcaaagaaatgaggcaggaagtacaaaagatggtcaatgaacttgcacgagaaaagagtgcactgggtgaaaaaccagatgagattgaacttgaatgccccatttgcttgtctgaagttgatgatggctactctcttgaaggatgttcacacctcttctgcaaagcttgtttgttggagcaatttgaggcatcgatgagaaactttgacgcattcccaatactttgttctcacatagactgtggagctccaatagtagtcgctgatatgagagccctcttatcacaagagaagctcgatgaactcatcagtgcatccttgtccgcttttgtaacatccagtgatggaaagttgaggttttgctccacacctgattgcccttccatctaccgtgtagctggacctcaagaatccggtgagccattcatctgtggagcatgtcactcagaaacatgcacaaggtgtcacctcgagtatcacccgttaatcacttgtgaaaggtacaaaaagttcaaggagaatccggacttgtcgcttaaggactgggcaaaagggaaggacgtaaaggagtgtccgatttgcaagtcgacgatagagaagactgatgggtgtaaccatctgcagtgccggtgtggaaagcacatttgttggacctgcttagacgtcttcactcaggcagaaccttgttatgcccatttaaggacaattcatggtggaatcggattagtcgagttagcccaattcgatattcgaatcgaacccaccggcctaactaaactgttcagtgtccccaaatctttttgcaacttctttcttcttcatattcttctcaccgtgaaggcgtcgtcaccgccgatgttattatctccggcgatgttttctgatcatcactgctttactcttactgcgagaatgtcagattctgatgaagctaaaacgtcggaggaagaatctcaacttgctgagcaagaaacagagactcaagaaggtgaaatgactaaaaacttaaagaaaagagatcttgatgcagtagaagatgaagattcgaataacgaaagctccagattagagaaactagagaagaagataaaaaaagaaacagcgaggaagcttgaaactgactttgtgctaacaggggaagaggatgatgatgcattgcccttagcctgttccatttgccaaaacccattcttggatcctgttgtcaccaactgcaaccattacttctgcgacaagtgtgctctaaagcatcacactgagaacgatacttgttttgtgtgtaacgagccaactctagggcttttcgacacagccgtggagatcaaggaaagaatagaggaagaacgtgagaaagccagagccatggtaaaggaagtgacagcaatgttagaaaaggcatcgacaatggcggatgacgccaagggcgtagcgcaaaaggttgtaaaaatggtggaggagattgaaacaatggtggaaaaagtggcggctatggccacaaaggcgggagaaacggcgacaatggcggcagatatggtgaaagaagctgaggagacgatggaaacagctaaagctaatatgtccaaagcctttgtgctttactttgtttgcttctattatatccacttccaacaagattcctcaaaaggaaagaagagaaagaagataagagatatctggttggtcggagatggagatgatcggaggagacgatacagatacagagatgtacggagctctagtgacggcacagtccttaaggttgcgtcatcttcaccactgcagagagaaccagtgtacctctgttctcgtcaaatacattcaagctcctgttcatctttttacttgttggtctctcttagtcttaaagctaaggatagtgaatatacatatatgattcaggtttggtcactggtgcggagatttgatcagccgcagaaatacaaaccatttataagcagatgcactgtaaatggtgatcctgagatcggttgtctcagagaagtaaatgtcaaatctggtcttccagcaaccaccagtacagagagattggaacagcttgatgatgaagaacacatcctcggtatcaacatcattggtggtgatcatagacttaagaattactcttcgatcttgactgtgcatccggagatgattgatggaaggtcaggaactatggtgatggagtcttttgttgtggatgttcctcaaggcaacaccaaagatgatacatgttacttcgtggaatcactcataaagtgtaacctcaaatccttggcttgtgtctctgaaagattggctgctcaagacattaccaattccatcgcaactttctgtaacgcttccaatggatacagagagaagaatcatacagaaaccaacctttga

SEQ ID NO: 2037 - DNA, 5256 bp, Arabidopsis thaliana
  Clone ID: AT_F12B17.C1.o280.tg
atgaggaactcttttcctccttcagacggtggaagatcggcgactgatcgtcgtcagcagtcgtctcactcatcctccacgaaccgttataactctcgctctgcacaatcttctccgccgctcaaccaccgtcctacttggaaccagcaacactctcagtaccctaactcaaatttcccgccaaattacaggcgtgatcgtaatccgtcgtcgggatactcgcctccagttacgcgggctagacctaatttcatcgttcagctgcttcaccccgccgccgctaacagtgacacaaagctgtgtttttcgactaagaaacaagagatcgagagtctcgctttgctttgcgaaattcctgaggaatcaattcatgtgcctcaatttggttgtatcgctggaagtttcagttttcgtcagtgggtcgatgcgcgctctgccgtggtggctctttgggattatcgacttcaagggaagcatgagtttgttcctgagctgatccctaatgttattgttccgtctgacatgaacgagcttaaagacaggcttcgtgatcttttctcgtctcatattctttcgcttatggaaaatggagaaggcgtcaagaaggtgaggttggagattgaggagaagtctcgtcaagttgtgtccttttcgtctaaaaggggtcttaaatttgaggtttttgagaaaaagaaggctatagaggctgagagagatttggttgtgaatcggcttgaagaattcaataatgccatgaagagcattttgcgatatctcataggacaagacgggtatgagtttgatttagatgatgaagaagaaggagacgtggccgtgttttgtttggaaggggcttatgattggagacgtattcattgtttgattcgtagggagtgtcgaaggctagaggatggacttcctatctatgcctaccggcggcagattttgaagaaaattcatcgtgaacagataatggtgttgattggagaaactggttcagggaagagcactcagttagttcagttccttgctgattccggagttgctgctagtgagtcgattgtttgtacacaaccacggaagattgctgccatgacattggctgatcgggtcagagaagaaagcagtggttgttatgaggaaaatactgtttcttgtactccaactttttcgtctactgaggagattagttccaaagttgtatacatgacggataattgtctgcttcagcactacatgaaagatcggagtttgtctggcatttcatgtgttattattgacgaagctcatgaaagaagcttaaacacggaccttctgttggcattgcttaaaaagttgctatccagaaggattgacctgaggcttgtaatcatgtctgccacggccgatgccaaacaactttcacagtatttcttcagttgtggtattcttcttgtcaatgggaggaactttccggtggagattgtatattcccctagtgacacagaagagaattctgttgttggcggcattgcttcatatgttggcgatgttgttaaaatggcagtggaaatacataaaacagagaaagaaggaaccatccttgcattcttgacttcccaagcagaggtagaatgggcatgcgaaaggtttataactccgtctgcaattgctttgcctttgcatggaaagctttccttcgaagaacagtttagggttttccagaaccatcctgggagacggaaagtgatatttgccacaaatattgcagagacgtcgctgactattcctggtgtcaagtatgtaattgattccgggatggtgaaagagagtaaatatgaacctagaacggggatgagcatcctcaaggtgtgccgggtcagtcagagttctgctcgacaacgtgctggtcgtgctggaaggacagaacccggaagatgttacagactctactcaaaaaacgattttgattcaatgaatcttaatcaggaaccagaaattcggagggtccatcttggtgtagcacttttgaggatgcttgctctgggtgtcaacaacatagcagaatttaactttgttgatgcgcctgtcccggaagccattgcaatggctgtccaaaatcttgttcagttgggtgcagttgttgagaagaacggtgttcatgaattaacacaggaagggcattgtttagtcaagctggggctggagccaaagcttggaaagttaattttaggctgcttcagacacagaatgggcaaagaggggattgttcttgctgctgtcatggctaatgctagtagtatattttgcagagttggcaacttcgatgataagatgaaagctgatcgcctaaaggtgcaattctgcaatcagaatggagacttgttcactcttctttcggtgtacaaagaatgggcatctctgccgcgagagagaagaaataaatggtgctgggaaaatagcctgaatgccaaatcaatgaggagatgtgaagacacagtcaaggaattggagatatgcattgagagagaacttactcttgtcagtcctagttactgggtttggaatccaaatgagggtactaaacacgacaagcatttgaaaatggttatacttgcatctcttgcagaaaacgtggcgatgtacactggctataatcagcttggatacgaggtggcattgactggtcaacaagttcagttacatccatcgtgttcattgctagcatttggccagaagccaagctgggttgttttcggtgaacttctatctattgtggaccagtacttggtatgtgtaactgcgtgtgattttgaagctttgtatatgcttgatccaccaccaccttttgacgtatcccagatggatgagcggaggctccgaattaaaaaagtggttggttgtagcagcactgtgctaaaacgattctgtgggaaatctaatcgtagtctgctttcaattgtttctcgtgctaggtctctttgttcggatgaaaggattggtattcaagtcgatgttgatcagaatgagattcgactgtatgcgcctcccctcgacatggaaaaagtgtcagcccttgtgaacgatgcattggaatgtgaaaagaaatggatgcataatgaatgtttggagaagtatctatatcatggtcggggacaagtacctattgcactgtttggatctggtgctcagataaagcatcttgaagttgatcagagatttctgacagtcgatgtactttattatggcgatgatgttgttgatgacagagagcttctgacgtttctggagaagaagattgatgggtctatttgctctatatacaagtttgctgcgaacaagcaagactgtgatgagaaggagaagtggggtagaataacctttctcactccagaatctgctatgaaggcaacagaaattcagaaattttatttcaaaggatcagtgctcaaattatttccatcactgtcaactggtggaggaattttcaagatgccttatttctcttccgtgacagctaagattcgttggccgagaagggaaagcagtggtagaggatgtcttaagtgcccttccggagatattcaccgtatacttggtgatatatccagccttgagataggaacaaattatgtccatattcagagagatcaacagtcaaatgattctatcttgataagtggacttggagatctttcggaagcagaagttttagatgttttggaattcagaacgcagagaagagatctgaattttttcatattcagaaaaaaatacagtgtgcagtgcccatctcctactgcttgcgaagaagagcttcataagagaatatttgcgcgcatgtcagcaaagaatccagagccaaactgtgtccaagttcaagtttttgaaccaaaagaagacaattacttcatgcgagcgttaattaagtttgacgggagattacatttcgaagctgcaaaagctttgcaagagttaaatggggaggtgctacctggatgtcttccatggcagaagataaagtgcgaacaattgtttcagagctccataatctgctccgcttctatctacaacactgtcaaaagacaattgaacgttttattagcaaggtttgagagacaaaaagggggtgaatgctgtctggaaccaactcataacggggcttatcgtgttaaaattactgcttatgcaacaagacccgttgcggagatgcggagagaacttgaagaactcttaagaggaagacccataaaccatccaggcttcacacgtagagtcctgcagcatcttatgtccagagatggtattaatctgatgcggaagatccagcaggagacagaaacttacattctattagataggcacaatctcacagtacgcatttgtggaacaagtgagaaaattgccaaggcagaacaagaactgattcaggcacttatggattatcatgagagcaagcaacttgaaatccacctccgaggtcctgagatccgtcctgacctcatgaaggaagttgtgaagcggtttggtccggagctccaaggtatcaaagaaaaggtgcatggtgtggatctcaagctcaacacccggtaccatgttattcaggttcatgggagcaaagaaatgaggcaggaagtacaaaagatggtcaatgaacttgcacgagaaaagagtgcactgggtgaaaaaccagatgagattgaagttgaatgccccatttgcttgtctgaagttgatgatggctactctcttgaaggatgttcacacctcttctgcaaagcttgtttgttggagcaatttgaggcatcgatgagaaactttgacgcattcccaatactttgttctcacatagactgtggagctccaatagtactcgctgatatgagagccctcttatcacaagagaagctcgatgaactcttcagcgcatccttgtcctcttttgtaacatccagtgatggaaagttcaggttttgctccacacctgattgcccttccgtctaccgtgtagctggacctcaagaatctggtgagccattcatctgtggagcatgtcactcagaaatatgcacaaggtgtcacctcgagtatcacccgttaatcacttgtgaaaggtacaaaaagttcaaggaaaatccggacttgtcgctaaaggactgggcaaaagggaagaacgtaaaggagtgtccgatttgcaagtcgacgatagagaagactgatgggtgtaaccatatgaagtgccggacaattcatggtggaatcggattagtcgagtaa

SEQ ID NO: 2038 - DNA, 951 bp, Arabidopsis thaliana
  Clone ID: AT_MBK20.C1.o8.tg
atgtgtgtgtcgacgaccttttggttatattgcaagggtttggtgagtgaagaggtgataagggatgagagtaagcagatcggtggttttggtgtggccatatgtgatcacgaggataatcgactatatgagatgaacaaagttctgggaggtgaagagtccacacaccagcaagctgctgaattggctgccttaattcatgctttgaattgggcgttggagcttgatttgggaagggtcacattcttctgtgatgattccaatatcttagaatacgtgacaggtaaagctgaaccaaacgagtccactgtagcaacacttgtgaaggaagtttctcttcttcagagcaaattctcgttttgcgaagcacttcctgtgatgaaggacatcacttttgtccttaagcttgcaaaagatgctatagcttcccaaatcaggtggcgtgaaggtgacgtctacatggagacttgtccagtatgctatgaacacgttacatctgacgagaagtttgaggtacccggttgtttccaccgcttctgctttgattgcattaagaaacaagccgacgtggcactagaatttgcgaaaccagtagtaaactgcccaagcttcggttgcaactcagaactacagagagaggattgtgaaggtgttttgaaacctaagcagcttgatcgtatgaccatgtacaagaaggcgagcatgatcaaagccaaagttttagactttgtatgttgtaccacatgtgacaatgtaatggcaaagcccgacctcattgaatacacaaaaacgttcttcgttgatgctgagctgtcaggagtcagaaagtgcacggagtgtgggtattgtttctgcggagaatgcagagcaggatggcactctggcatgacatgtgaggaatactttaaaagagagagtaatgagccatctcctgaggatgtggaacgttag

SEQ ID NO: 2039 - DNA, 1557 bp, Arabidopsis thaliana
  Clone ID: AT_F7H1.C1.o11.tg
atggatgataatttaagcggcgaggaagaagattactattactcctccgatcaggaatctctcaacgggattgataatgatgaatccgtttcgatacctgtttcttcccgatcaaatactgtcaagagggaggatttgcggagagtgatggaattgttatcggttaaggagcaccatgctcggactcttcttatacattaccgatgggatgtggagaagttgtttgctgttcttgttgagaaagggaaagatagcttgttttctggtgctggtgttacacttcttgaaaaccaaagttgtgattcttccgtttctggttcttcttcgatgatgagttgtgatatctgcgtagaggatgtaccgggttatcagctgacaaggatggactgtggccatagcttttgcaataactgttggactgggcattttactgtaaagataaatgaaggtcagagcaaaaggattatatgcatggctcataagtgtaatgctatttgtgatgaagatgttgtcagggctctagttagtaaaagccaaccagatttagctgagaagtttgatcgttttcttcttgagtcgtatatcgaagataacaaaatggtgaagtggtgtccgagtactcctcattgtgggaatgccatacgtgttgaggatgacgagctctctcactccccttgctcttgtgtgatgtgggaactatggagaaagaagtgctttgatgagtccgagactgttaattggataactgttcacacaaagccgtgtcccaaatgtcacaagcctgttgaaaagaatggtggatgcaatctcgtgacttgtctttgtcgacaatctttttgttggttgtgtggtgaagctactggaagggaccacacttgggctagaatctcgggtcatagttgtggtcggttccaagaagataaagagaaacaaatggagagagcgaaaagggatctcaagcggtatatgcattatcataaccgatacaaagcacatatcgactcctccaagctagaggctaagcttagtaataatattagtaaaaaggtgtctatttcagaaaagagggagttacaacttaaagacttcagctgggctaccaatggactccatcggttatttagatcaagacgagttctttcatattcataccctttcgcattttacatgtttggagatgagctgtttaaagatgagatgagctctgaggaaagagaaataaaacaaaatctgtttgaggatcagcagcagcagcttgaggctaatgttgagaaactttctaagttcttggaggaaccttttgatcaatttgctgatgataaggtcatgcagataaggattcaagtcatcaatttgtcagttgcggtcgatacactctgcgaaaatatgtatgaatgcattgagaatgacttgttgggttctctgcaacttggcatccacaacattactccatacagatcaaacggcatagaacgagcatctgatttttatagttcccagaattccaaggaagctgttggtcagtcttcggattgtggtacaagcagtaaatcttga

SEQ ID NO: 2040 - DNA, 1047 bp, Arabidopsis thaliana
  Clone ID: AT_F9K21.C1.o120.tg
atgaaaggaccaattcatcatgactccaacattacacctttggaggctgagcttaccgcattgaagcgaggactaaccgaagctgtcatgggaagatgcgtaccagaggagaataaaactgccttgctaatgattgatgtgcaacgtataagagaaggattcaagtcaagctttccgattttcgtggagggaaaaagaattagttatgcttataaactagcaagggaaacaatagtttctgaaatcagcatatctgtgaatcctcctcgccaacctaaggctactcgcaaaacaacttgcaaaatctgtttagatgatgatattaatgagaatcagatgttttgtgttggtaagtgtcgtcatcgattttgttccgactgtatgagacgacatatagaggtgaggctactcgagggaagtgtaatgagatgtcctcattaccgctgcaagactacgctaaaatttggaggctgtataaatcttttgacacctaaaataagagagatgtggcaacaaaggattaaagaagacttaatccctgtaacagggagaatttactgcccaaactcgcgatgctcggctttaatgtcagaaaccgagctctctatatcaactaaagaagatgaagttaggagatgttgcttcaaatgcggtcaaatcttttgcatcaagtgtaaagtttcatggcatagtaacttgtcgtgcaacgattacaagaagttgaatccataccctacagaaaatgatggaaagattaaagctctggcaaatcagaaaaggtggcgtcaatgcggaaagtgtcaacacatgattgaactttctaaaggatgcgtacaagtaaagtgcagatgtggacataaattttgctaccgatgtggagtccaggctggaggttgcaaacatggtcatggtcttcctccaaggcctccaccgccgccaccgtcgcccccacccacgccagtaaatatttgttgtatattctttatatcatcaattttgttcggtttatttgtgtacatctttttattaattaatcgtaaacattaa

SEQ ID NO: 2041 - DNA, 1614 bp, Arabidopsis thaliana
  Clone ID: AT_MGF10.C1.o11.tg
atggatgacgactatatgatgttagatgatgattacggcgaggaagaggatgagaattactcggaagatgataattacagcgaggcagaagtcgatttgcaacccgtgacctcgacaaaatctactagccaggtgataaaaaaggaatctctagtagcagcacaaaaagaaattctggttagggttatggaattgttatcggttaaggagaaccaagctaggactcttcttatttattaccaatggaacgttgagaagttgttctctgtgtttgctgatcaaggcaaagatcgtatgttttcttgtgctggtcttactgtttttgttccttctttagttacttcgaagaagactatgaaatgtgatgtctgcatggaagatgatttaccaagtaatgtgatgacgagaatggaatgtggtcataggttttgcaatgattgttggatagggcattttactgtgaagattaatgaaggtgaaagcaagaggattctatgtatggctcatgaatgcaaagcgatttgcgatgaagatgttgttaggaagctagttagtcctgaattagctgacaggtatgatcgtttccttattgaatcttatgtggaagataacaatatggtgaagtggtgtccaagtaaaccgcattgcgggagtgcgatacggaaaatcgaagatggtcatgacgtcgttgaggttggatgttcatgtggacttcagttctgtttcagttgtttgagtgagtctcactctccttgctcttgtttgatgtggaagctatggaaaaagaagtgtgaagacgagtctgagacggttaattggataaccgttaacacaaagctgtgtcccaaatgtagcaaacctattcaaaagagagacggttgcaatctcatgacttgtaagtgtgggcagcatttttgctggctgtgtggtcaagctactggaagagatcatacttatactagtattgccggtcatagttgtggtcggtacaaagatgaaaaagtgaggcaattggagagagctcaaagggatttagacaggtatacacattaccattaccgctacaaagcacatatcgattcattaaagctagaggataaacttaggaagagtatccttgagaaggcagtatcaaattctgaaaccaaggatcaaaaggtgtttaaagaatacagctgggttacagatgcagtcaaccggttattcatatcgcggcggattctttcgcaatcgtatcctttcgcgttctatatgttcggtgaagagctgttcaaagatgagatgagtgaaaaagagagagagataaagaagaatctgtttgaagatcagcagcagcaacttgaaggtaatgttgagaaactttccaagattttagaagagccttttgatgagtatgatcatgaaaaagttgtggagatgatgagacacctcaccaatttgactgctgtggttgataacctctgcaaggaaatgtatgagtgcattgagaatgagttattaggtccaatacaatttggaaaccacaacattgcaccttacagatcaaagggaatagaacaagcaactgagttttgtgctgaatcttctgattgtggttcaagcggatcttcgtag

SEQ ID NO: 2042 - DNA, 1638 bp, Arabidopsis thaliana
  Clone ID: AT_T20M3.C1.o14.tg
atggattccgatgatgatatgcacgatatggactcggtagattatgattattacagcggcggcacctatgatgacaacgatagtgatgaaactgatttcgggtttggtgaggctgacaccgacgatgccgccatcatcgcctcctatcgctctaaggaagaagatattcgcaggcatcagaacgatgatgttgggcgagtttccgcggtcctctccataaccgatgtcgaagcaagtactttgcttcttcactatcactggagtgtcagtaaagttaatgatgaatggtttgcggatgaggagagagttcgcagaactgttggcatattagagggacctgttgttacaacacctgatggcagagaatttacatgtggaatatgctttgattcctacactcttgaggaaattgtatcggtttcttgtggtcatcctttctgcgctacatgttggacaggttatataagcacaaccatcaatgatggcccaggctgtttgatgctaaaatgtcccgacccttcttgtcctgctgctattggtcgagatatgatcgataagttggcttctaaggaagacaaggagaagtattatagatattttcttagatcttatgtcgaagtcaacagagagatgaagtggtgtcctgccccaggatgtgaacatgcaattgattttgctggtgggaccgaaagttatgatgtttcgtgcttgtgttcgcatagcttttgctggaattgcactgaagaggctcaccgtcctgtggattgtgacacagttggaaaatggatactaaagaacagcgctgaatctgaaaatatgaattggatacttgccaattcaaagccttgtccaaagtgtaagcggccaattgaaaagaatcatggctgtatgcacatgacatgcacaccaccttgtaaatttgagttttgttggctttgccttaacgcatggacagaacacggggaaagaactggtggattttatgcctgcaaccggtatgaggcggctaagcaagaagggttgtatgatgaggctgaaaggaggcgagagatggcaaaaaattcgctagagagatacactcattactatgaacgctgggcaagcaatcaagtgtcgaggcaaaaagctatgggggatctgcagaaaatgcaatcagagaagcttgggaagcttagtgacattcagtgcacaccagaatctcagctcaagtttatcgcagaggcttggctccagatcattgaatgcagacgggtactgaaatggacatatgcatatggatactatctacaagatcatgctaagaaaccattttttgagtatttgcaaggggaggctgagtcaggtttggagaggctccacaaatgcgtagagaaggatatagaggtgtttgaacttgctgagggcccttcagaggaattcaatcatttccggacaaaattaactggtttaaccagcataacaaaaaccttctttgaaaatctggtgaaagctctggagaatggtcttgctgatgtggattcacaagctgctagcagcaaaccagctaactctaaaccttctagcaagacaaaaggcggtgggaaaggtaaaggaagctccaaaaatggcgggtccagcagaaacccagatggcaattga

SEQ ID NO: 2043 - DNA, 1122 bp, Arabidopsis thaliana
  Clone ID: AT_F13B15.C1.o2.tg
atggcactgattcgtgggttaagagaatccttcgatttggggatcagacaagtcgtggtttattgcgatgaccaactgctttaccaatatattgttggtcgagggaagattaagaagaaggttgtccatcttgtggacgaatttcaacttcttctagaagagatgacctatactgacgctgatttgattgcccttaacgatgttaattttgcttttaaacttgcaagagaagccatagtttcaagggacgatgtgaaggcagagatatgtagcatttgttttgaagaaaccgagggcgagcgcatgttctttaccacggaaaaatgcgttcaccgtcattgctttccttgtgtgaaacagtatgtggaagtgaagctcctaagcggaactgtgcccacatgccttgatgatggatgcaagtttaagctcacccttgaaagctgtagcaaggttttgacattagagctgattgagatgtggaaacaaaagatgaaagaggactcgattcccgctgcagagagaatctattgcccatatccaaactgctcaatgctaatgtccaaaaccgagctttctagtgaatccgacctatccaatgaccgttcttgtgtcaaatgttgtggactcttctgcattgattgcaaagtaccatcacattctgatttgtcgtgtgctgagtacaaaaaacttcaccatgaccctctagttgatgagttgaagctaaagtctctagcaaaggacaaaaaatggcgtcagtgtaaaatgtgtaggcacatgatcgaactttctcatgcctgcaaccacatgacttgcagatgtggatatcagttttgttaccaatgtgaggttgaatggaagaatgaccaaaagacttgctcttctggttgcctactaacgggacatggttattatgatgattatgattataatgaaccggaatatgattttgaagtagatacatgtaattactattctgatgaagaagctatgacgcgccgagagatgatcaggatgtggaatactgagcagtttttcagtgaagaagagaatgctgatggaaatgatgacaattgggacgactacaacaattatggcggtttaactgttttctggaggctttga

SEQ ID NO: 2044 - DNA, 1728 bp, Arabidopsis thaliana
  Clone ID: AT_T8F5.C1.o21.tg
atggaagctgatgacgatttctacagcggcaccgaaaactactccgattacgccgactccgacgaagatgacgccgacggcgagtacgagttcgttgacgacgctgctgatgattccgatgaccttatcttccgtcgccgccagcaaaattatagtgtgttaagcgaagcagatatttgtaagcttcaagaagatgatatttcaaggatttctactgttttgtccatttcgaggaattcatctgcgatcctgcttcgtcactacaattggtgtgtgagcagagttcatgatgaatggtttgctgatgaggaaaaggttcgagatgctgttggtttattagagaaacctgttgttgatttcccaactgatggagaaaattcagctgtgtcattttggcagcttgattgtggaatttgttttgagactttcctttctgacaaattgcatgctgctgcttgtggtcatccattctgcgactcatgttgggaaggttatatcaccacagcgattaatgatggtccagggtgtcttacattacgatgtccagatccttcttgcagagctgctgttggtcaggatatgatcaatttgctagctcctgataaagataagcaaaagtacactagttattttgtcagatcatacgttgaagacaatagaaagaccaagtggtgtcccgctcctggctgtgactatgctgtaaattttgttgttggaagtggtaattatgatgtgaattgtcgctgctgttacagtttctgctggaattgtgctgaagaagctcaccgtcctgtagattgtgacactgtttctaagtgggtattgaagaatagtgctgagtcggagaatatgaattggattttggcaaattccaagccctgtccaaaatgcaaacggccaatagagaaaaaccagggttgtatgcatattacgtgcaccccaccatgtaaatttgagttctgctggctttgccttggggcgtggacagagcatggtgagaagacaggtggcttttatgcttgtaaccgttatgaagcagcaaagcaagatggcatttatgatgagactgaaaaacgccgagagatggcaaagaactctcttgagagatatacccactactatgagagatgggcaaccaatcaatcgtctaggcaaaaggcgctgctggatcttaagaagatgcaaacagatgatattgagaagctcagtgacatacagtgtcagcctgaatcacaactgaagttcattatagaagcatggttacagatagttgaatgcagacgagttctaaaatggacatatgcctatggtttttacatacctgaccaggagcatggaaaaagagtgttttttgagtacttgcaaggcgaagctgagtcgggccttgaacgacttcatcaatgtgctgaaaaagagctgctaccatacttagatgccaaaggtccaagtgaagattttaatgaattccgcacaaaactggcaggtttaacaagtgttaccaaaaactattttgagaacttggttagagcgctggagaatgggctatcggatgtgaactcgcatgatgcatatgatcgaacttcaagttcaaagagcttaggggggaagactaagggatcgagttctaaagccagcagctccgattcaagccattggccttgtgaatattgcacttacgtaaatccaaggtcgaccaccatttgccaaatgtgtgaacatggccggtga

SEQ ID NO: 2045 - DNA, 963 bp, Arabidopsis thaliana
  Clone ID: AT_F4P12.C1.o390.tg
atggcgacacagtcagttaacgcagtgatcgttgatcttcccggagatgtaaacgacgacggcgataattccgattgtttcatcttctccactcctcctctctctgcacgtggttccacaaagcgtgatgctatttccgttgagaattacgatcgtgatcggaaacttcaacgtctctgggtctaccctcctcacaaaaccgtaatcaagtcagaatctccaatttacatagatcttgatctttacgatgatgaagacgatgatatcagaatcctctgtttcgcaccaccaatccacagagaaaagggtcagtcttcttcgtcaaagacggcgactttcgactgtgagatatgtgttgattcaaaatccataattgagtcgtttcgtatcggtggatgctctcacttctactgcaacgactgtgtttcgaaatatatagcagctaaattacaagacaacattctctcaatcgaatgtcctgtctctggttgttctggtcggctcgagccagatcagtgtcgtcagattttgcctaaagaggtttttgatcggtggggtgatgctttgtgtgaagcagtagtgatgcgttcgaagaaattctactgtccttacaaggattgctctgctttggttttcttagaagagagtgaagtaaagatgaaagattcggagtgtcctcattgtcatagaatggtgtgtgtggagtgtgggactcagtggcatccggagatgacttgcgaggagtttcagaagctagcggcgaacgagagaggaagagatgatattttgcttgcgacgatggcaaagcaaaagaaatggaaaagatgtccttcttgcaaattctatattgagaaatctcagggttgcttatacatgaagtgcaggtgtgggttggctttttgctacaactgtggaactccatcgagggaccatactcattattgttataattgtaagcgttga

SEQ ID NO: 2046 - DNA, 1227 bp, Arabidopsis thaliana
  Clone ID: AT_F9K21.C1.o160.tg
atggaggaggaaagcactctagtacgagcagaagatccaaaacacgtgggtagagtctccagcgaaatcaaacctgactcgtacaggctttacttcaagggtttggttagcgaggaaaccgtagagttattagcgggatttggggttgcgatttgcgacaaagatgataatctcttgtttcagatgaaagaacaagttcatgactctagggttacagttctagaggttgagattatggcactgaagcgtggactaaccgaagctgtgggtttagggattgataatatctcaatttacagcgatcattatcggatttttgaattggtcatggagaaatctgcttctgcggaagagaactttgccttactaatggataacgttcaacacattagacaacgattgacgtctagctttcctgttctggtgactaggaatcaaattaaatttgtgtatgaacttgcaatggaaacaatagtttctgaaatcagcatacatatacctgatcatgacaagacttgcagtatatgttccgatgataatttcgaacctgagctgatgttttctgttgctttatgcggtcatgaattctgtgttgagtgcgtaaaacgacatatagaagtgaggctactcgcgggaggtgtaccgagatgtcttcattatcaatgcgagtctaaacttactcttgcaaactgcgccaatcttttgacatctaaactaaaagcaatgtgggaactaaggatcgaagaggaatctattcctgtggaggagagagtatattgccccaaccctaggtgctcgagtttaatgtcggtaaccaagctctcaaactcaacaagagaagatgtaactatgagaagttgtgtaaaatgcggtgaacccttttgtatcaactgcaaacttccgtggcatagcaacttgtcgtgcaacgattacaagagcttgggtccaaatcctacagcagatgatataaagctgaaagctctagcaaatcagaaaatgtggcgtcaatgtgaaaattgcaaaaacgtaatcgaactatcggaaggatgcatgcatatcacttgcagatgtgggcaccaattttgctacaaatgtggagccaaatggatcactggaagagtattttgcactcattcaaggccgccatatactccttcaatgacatcgcatgaagaagagctggagaaatatatcggtgatctacgtcgtggtactcaagatgattga

SEQ ID NO: 2047 - DNA, 1227 bp, Arabidopsis thaliana
  Clone ID: AT_K12B20.C1.o10.tg
atggattatgcggtaaccaaagatatcccaaatcgcaaaggtgagggaagttctaaggttggccaatccacctttgagacacaaagttgtgtggataatgtagtctacaaattgtacttcaagggtttggtgagcggtgaaacggcgacagacaagaaagcgattgtgaaagttgggtttggagtcgcgatatgcgacgaggcggataacttattctatggaatgaataaatcactttatgaagctgtgattaaccgcgaagaagcagatattctagcactaattactgggttatatgaatcaattcaccgtgggataattggtagagagaagcctcagcagaagaatgtccatcttttggaagaagtccaacgccttagagggagactggcttctactggaactgttttggttgcgacgcgagatgataactttgctcttagacttgctatagatgcacttgtgaaggcaacacaagaaaaaccattgacttgttccatttgtagtgacaaaaccgacgctgagcacatgttattgaacgacaaatgccttcaccgtcattgcttttcttgcgtgaaacagcaagtgaaagtgaagcttcgtagcggaatagtgcccccgtgccttgaagatggatgcaagtctgagctcactcttgaaagttgtagcatggttttgacaccaaagctgattgagatgtggaaacgtaaaatggaggaggacttaattcccgatgctgagaaaatctactgcccatatcgaagctgctcaatgttgatgtccaaaaccgagctttcaagagaagccgaacaatccaatgtccgagcatgtatcaaatgctctgaactcttctgcattgactgcaaagtaccatggcattctgatttgtcctgtgctgattacaagagaattcactctgaacgtctggttaatgacatgatgcttaaggttctggcaaacgaccaaatgtggcgtcaatgttccgagtgtaagcacatgattgaactgactgagggttgcaatcacataacttgcagttgccaacttatggataatcgtgaagatgaagaagattataatcttcatgttgatgctgaggtcaacaatgatgatgatgacgatgaagattatgtatttgatgaagattatgaggaggatgacgatgatgacgacgatgatgatggcacaacatacagcttagaagactttcgaagagagatttcgtga

SEQ ID NO: 2048 - DNA, 669 bp, Arabidopsis thaliana
  Clone ID: AT_F9K21.C1.o50.tg
atgaagggagaaacttgtgtcatttgtctggaagaaaccaaggccgatcgcatgttcgtaatggataaatgtcttcaccgtcattgctatccttgtgttaatcagttagtagaagtgaaactgcgaaacggaactgtgcctacatgtcttgactatgaatgcaagttaaaactaagtcttgaaaactgtttcaaggttttgaaacctaaggtgattgagctatggaaacacatgatgaaagaagagtccattcctttagcaaagagaatctattgcccatatataaactgttcaacattgatgtccaaaaccgagatttctcggtctaataaatccaatgaccgtgcatgtatcaaatgttctggactcgtttgcattgattgtaaagtaccatggcattctgatttatcgtgtgctgagtacaagaaacttcaccctgaccctgtacttgatgacttgacgctaaagcttctagcaaacgatcaaaaatggcgccaatgtgtcaagtgtcgacacttgattgagcttaaccaagggtgcaaccacatgacttgcagatgtgggtatcaattttgctacaaatgtggagttgaatggaagaagggtcaagtgacttgtcctactggttgtccacgtactggccaaggttatttttatgatggtgaatga

SEQ ID NO: 2049 - DNA, 1482 bp, Arabidopsis thaliana
  Clone ID: AT_MGF10.C1.o12.tg
atggatgacgaatatatgagcctcgaggaggaggaagataattgttacccctctgaatttgatgatcatgatcagatgtgttccaacgcggaagagtccgatttgcaacactcgagagaaccaacgagccaggttatggaatttttatcggttacggagaaccaagcaaggactcttcttattcagtatcaatggaacgttgataagttgttttctgtgtatactgatcaaggcaaagatgttttgttctctcgtgctgaggaagaagaaggagaagacaaggaagaggaagaaggaggagaagacgaggaagaggaagaaggaggagaagacgaggaagcggaagaaggaggagaagacgaggaagcggaagaaggagttgaagacgaggaagaggaagaagacgaaaaagacgatgaagtgcaactagttagcacggagttagctgagaagtttgatcgtttccttattgaatcttatgtggaagataacaatatggtgaagtggtgtccaagcacaccgcattgcgggaatgcgatacgaaatatcaaagatgatggcgatgttgatgaggtggaatgttcatgtggacttcagttctgtttcagttgtttaagtgagtctcactctccttgctcttgtttgatgtggaagctatggaaaaagaaatgtgaagacgagtctgagacggttaattggatgaccgttaacacgaagctgtgtcccaaatgtagcaaacctattcaaaagagagatggttgcaatcacatgacttgtaagtgtgggcagcatttttgctggctgtgtggtcaagctactggaagagatcattcttattcgagtattgccggtcatagttgtggtcggtacaaagaagaaaaagtgaggcaattggagagagcccaaagggatttagacaggtatacacattaccattaccgctacaaagcacatatcgattcattaaagctagaggacaaacttaagaagagtatcctgaagaaggcagtgttaaattctgaaaccaaggatcaaaaggtgtttaaagaatacagttggattatagatgcagtcaaccggttattcagatcaagaagaattctttcgtattcttatcctttcgtgttctacatgtttggcaaagagttgttcaaagatgatatgagcgatgaagagagaaatataaagaagaatctgtttgaagatcagcagcaacaacttgaaggtaatgttgagagactttccaagatattagaagagccttttgatgagtatgatcatgaaaaagttgtggagatgatgagacacctcaccaatttgactgctgtggttgataacctctgcaaggaaatgtatgagtgcattgagaatgagttattaggtccactcatatctggaatccacaacattgcaccttacagatcaaagggaatagaacaagctgctgagttttctgcttcttccgcttgtggttcaagctga

SEQ ID NO: 2050 - DNA, 774 bp, Arabidopsis thaliana
  Clone ID: AT_F9K21.C1.o90.tg
atggagagatctgtgcctcaccatgagaaatttgccttgctaatggatgacgtccaccgcatcagacaacaatttacatttagcatccctattcttgttacaggaaagcaagcgaattttacgtataagcttgcaaaggaaacactagtttctcgcaacatcagacctatgcctcgtactactcagaagaagacttgtggaatttgctttgtggatgatatcgaaggtcaggagatgttttccgctgctttatgcagtcattacttctgtgtggagtgcatgaaacaacgtatagaagtgagtctaaacgagggaggtgtacctagatgtccgcgtcatggctgcaaatcagccctaactcttagaagttgtgaccatcttttgacacctaaacaaagagagatgtgggaacaaaggatcaaagaggagtcaattcctgtatgtaacagatttcattgcccaaatccaaagtgctgggctttgatgtcgaagaccgagcttactgaatccactgacgatggagttaggagatgttgctctaaatgccgtaaacccttttgcattgactgcaatgtttcgtggcatagtaacttgtcttgcaaggaatacaagatgaagggtaacaaggctactacaacagtgtggctatacgttttgctatgcatgcggaacccaatggaagcttggaggttgctctcatcatcgccaattggtgatgaaactggtggacgtttctatggtcttcattgtcctcatttctctttttttccttag

SEQ ID NO: 2051 - DNA, 1122 bp, Arabidopsis thaliana
  Clone ID: AT_F9K21.C1.o60.tg
atggccccaaaccccactggaaaaccctcacctgacggttcaagttctgactcgtacaacctttacttcaagggttcattggcgggatttggggttgcaatttacagagaagaggatgatagtatcttgtttaagaaaaaagtttcacttcattaccccgactttacagcttgggaggctgagcttatggcattgaagctaggactaaccaaagccgtgagttttcggatcaatcatatctcaatgttctttgataatcctgagatttttgaattggtcatggggagatctgtgcctaaggataagaaaatcgccttgataatggatgaggtgcaacgcataagacaacaattttcatctagcatcccttttcttgtggctagtaatgaaattaagtttgtgtataaacttgcaaaggaaacactagtttctaacatcagcatacctaggcctcagaagaagacttgtggtaactgttttaacgatggtatcaaaggtgagaacatgttttccgctgatttatgcagtcattacttctgtgtggagtgcatgaaggaacatatagaagtcagtctaaacgagggaggtttaccgagatgtcctcatgatggctgcacatcaaacctaactcttagaagctgtgaccatcttttgacacctaaacaaagagagatgtgggaaaaaaggatcaaagaggagtcaattcctgtatgtgacagatttcattgcccaaatccaaggtgctgggctttgatgtcgaagacggagctcactgaatctactgaagaagatggagttaggagatgttgctataaatgccgcaaacacttttgtattaactgcaaagttccgtggcatagtaacttgtcgtgcaaggaacacaagagttccggtcgtgagcctattacaacagtgtggcgtcaatgtagaagttgcctacacaagataaaactatcggaagaacgcatgcctgtaacttgcaggtgtggctataagttttgctatgcatgtggagctcaatggaagcttggaggttgttgctctcatcatctccaagagctgataatgtttaagtacttagctagggttgtggttgtgtttgttctccccgtgactatttag

SEQ ID NO: 2052 - DNA, 1041 bp, Arabidopsis thaliana
  Clone ID: AT_T28A8.C1.o40.tg
atggaggaaagtactttagtaccatccggcgccatatacaagctttactttaagggtatagtaatcgaggaaacgagtcagttattggcgggatttggggttgcaatttttgaccaagacgataagctcttgtttcagatgaagagaccaattcatggctcggacattacggttttggaggctgaacttacggcattgaaacaaggactaaccgaaactatgaagttgggtctagatcgtatctcaatttgttgcgatcatgatcatatttacgaattggtcatggggagatccacgccggagcaagataacattgccatgctaatgaatgatgtgcaacgcatgagacaacaattgagatatagtaatcctattctggtgactagagatcaaattagctttgcttataagcttgcaatggaaacagtagtttccgagatcagcatatgtatgcctgcgacttgcagcatctgtttcaataatgttttggaagctgagaagatgttttctgttgctatatgcggtcatcaattctgtgtggagtgcgtgaaacattatatagaagtgaagctactcgagggaggtgtaccgagatgtcttgattatcaatgcgagtctaagctaactcttacaagttgtggcaatcttttaacacctaaactaaaggcgatatggaagcaaaggatcgaagaggagttgattcttgtagcggagagagtttattgtccaaacccgaggtgctcgggattaatgtcgaaaaccgagctctctacatcaactgaagaagatgtaagtactaggacttgttgtgttaaatgcggtgaacccttttgcatcaactgcaaagttccgtggcatagtaacttgtcatgcgatgattacaagagattgggtccaaatcctacaaaaaatgatataaagctaaaagttttggcaaatcagcaaaagtggagtcaatgtgcaaagtgccaacacatgattgcacgtatcgaaggatgcaacgtaataatctgcaggtatcatcatcgttacattctctaa

SEQ ID NO: 2053 - DNA, 1917 bp, Arabidopsis thaliana
  Clone ID: AT_T19L18.C1.o6.tg
atggaggaagatgacctaaaccccgccggaaaacctttgtacaggctttacttcaagggtttggtaaccgaggaaaaagagatgttactggcaggattcggggttgcaatttgtggtgacaaggacgatctgttgtttgacttgaaggtttctattcatgaccctaccattacacttttggaggttgagcttatagcattgaagagcggattaaatcaagccgtgagtttggggatcaatcatatctcaatttgctgcgatcatgaatatattttcgaattggtcatgggaatatccactcctaagcaagaaagcattgccttgctactgcgtgatgtgcaaggcatcagaaaatatttgacttctagcatccctgttatgttgactcaaaatcagtctaatttagcctacgattttgcgatagaagcaatctcttctgagatcatcatagatattcctgctcagaaagaaacttgcaatatatgtttgaacgatgacatcaatgctgatcagatgttttccgttgataaaagtggtcatatgtgttgttctgaatgtgtgaaacgacatatagaggtgagactacttgaaggaagtttgataacatgtcctcattatcgttgcaattctctgctgacttctgttcgttgtggcaaccttttaacacctaaactaaataagatgtgggagcaaaagactaaagatgagttgattcctgtaatggatagagtttattgcccaaacccgaggtgctcgactttaatgtcggaaaccgagctctctggacttaacattggagtgaggagatgctgtgtaaaatgtggcgaacccttttgcgtcaagtgcaaagtttcgtggcataataacttgtcgtgcgacgagtacaagacgttacatccaaatcctacagaaaacgatggaaggctaagagatctagcgaatgagaaatcgtggcgtcaatgcagcaagtgtaaacacatgattgaactttcttctggatgcatcagtgtagtttgcagaaagaagcttcaagtagatatggaagaggaaggcactctagtacgagcagataacctaaaacatgccggaacaccatcaccgtcaaaattctcgccgtacagcctttacttcaagggtttgatgaagggaccgattcatgactcagccattacacttttagaggctgagctgatggcattgaagtacggtttaagcgaagccgtgactttggggatcaatcatatctcaatctgctgcgataacaatcagattttcgaatgggtcatggggagatccacgcctcaggaagaaaacattgccatgctaatccgtgatgtgcaaggcatcagaaaacagtttacttctagcatcgctgttctggtgactcgaaatcaagttgaatttgcctataaagttgcaatggaagcaatatgttttaagaccaagatagccttctctgtttcatccgatgtgcctgctctgtttcatccgaaaaagacttgcactatctgtttcgacgatgacatcaatgctgatatgatgttttatattgatcaatgtggtcatatgttttgttccgaatgtgtgaaacgacatattgagggaagtttgataacatgtcctagttataggtgcaaatctaagctgacttatggaagttgtgttaatattttgacacctaaagtaaaagagatgtggatacaaaggatgggagaggattcgattcctgtaacggatagagtttattgcccaaacccgacgtgctcagctttaatgtcagtaaccgagctcgatcaactcacaggaaatgtggacatgagttttgctatggatgtggagctgatgctggatgttgctctcatggtcatgtaccgtatttttcagttgaacgtcgagagccagaagtccaagcactag

SEQ ID NO: 2054 - DNA, 1785 bp, Arabidopsis thaliana
  Clone ID: AT_F10M10.C1.o140.tg
atggatgattattttagcgcggaggaagaggcttgctattactcctccgatcaagattctttggatggaattgataatgaagagtctgaattgcagcctctgtcctctaaaagatcaaacactcaggtcatcactcaggaatcgcttctagcagcacagagagaagatttgctaagggtgatggaattgttatcaataaaggagcaccatgcacggactcttcttattcattaccagtgggatgtggagaagttgtttgctgtgtttgttgagaaaggaaaagatagcttgttttctggagctggtgtcactgtcttcgattatcaatatggcaactcttcctttcctcagtcttcacagatgagttgtgatgtttgcatggaggatttaccaggtgatcacatgacaagaatggactgtggccattgcttttgcaataattgttggacggagcattttactgtgcagataaatgaaggtcagagcaaaaggattagatgcatggctcatcaatgtaatgctatttgtgatgaagatattgtcaggagtctagtcagtaaaaagcgtccagatctagctgcgaagtttgatcgttaccttcttgagtcgtacatcgaagataacagaatggtcaagtggtgtcctagcactccgcattgtgggaatgctatacgagctgaggatgacaagttgtgcgaagttgaatgttcttgtggtcttcagttctgtttcagttgtctgtgtcaagcccactccccttgctcttgtttgatgtgggagttatggagaaagaagtgtcgagatgagtctgagacaatcaactggataaccgttcacacaaagctgtgtcccaaatgttacaaacctgtggaaaagaatggtggatgcaatctcgtgaggtgtatttgtgggcagtgtttttgttggctatgtggtggagctactggaagtgatcacacttataggagtatcgctggtcacagttgtggtcggtaccaagatgacaaagagaagcagatggaaagagcgaagagagatttaaacaggtatacgcattatcatcaccgatacaaagctcatacagattcatcaaagctagaagataaacttagggatactatccatgagaaagtgtcgaaatcagaaaagagggagttgaagcttaaagacttcagctgggtcaccaatggactcgaccggttattcagatcaaggcgagttctttcatattcgtatgcttttgcatattatatgtttggtgaagagatgtttaaagatgagatgacccctgaggagagagagataaagaagaatttgtttgaggatcagcagcaacaacttgaaagtaatgtggagaaactttcgcagttccttgaggagccctttgatgaatttagtaatgataaagttatggcgataaggattcaaatcatcaatttgtctgtcgccgtcgatacactctgcaagaaaatgtacgagtgcattgagaatgacttactcggatctctccaacttggcatccacaacatctcaccttacagatcgaagggaatcgaacaagcagctcagttttatgcttcctggaattccaaagatgctgacaaattccaacctttggatagtggagtgacatcgaggcctgagcaagcttcaggatcaaggagctcggaagacaccatttgctcatcttcacagaaacgtcccaaaaaagaaggaagtttcttaaacaacaaagtcactttattggatttgaacttgccagctgatttcgtcgaccagaactga

SEQ ID NO: 2055 - DNA, 1641 bp, Arabidopsis thaliana
  Clone ID: AT_F13B15.C1.o3.tg
atggagagacacgatcaagagttgagataccaaaaacggcgattaaggccctgttcatttccctgtcgctggatccagcgacagcgaccagcgaccagcgacagcaaccagcgacagcaaccagcgacagcaaccagcgacaacatacattgttcgtttgtctgtcgctggactcagcgaccaattacagcgacaatcgctaataattgtcgctgtgttcgactgatcgctaaaaatttcagcgaccaaaaattgcggtcgctgatcgctggcgattatcgctatttttggtcgctgaaccagcgacaggcaaacgaacaacttttggtcgttgtcgctggtttcagtcgccagcgacaagcaaacgaacagggcctaaattctattataaccggagatattccaaactctaaaggcgagggttcttctccagcggcaaaatttatggacaatgttgtctacagattgtgtttcaagggtttggtgaattatgaggcggttgcggacgatgtagaaaaggcagtgaaggctggatttggggttgcgatttgcgatgagaaggataatttgttgcatgagattaaagaatcacttagagacattgagattagtcgtagaggagtagagatcatggcactggttcgtggattaagtgaatccttcgatttggggatgagaaatgtcgtgatttattgtgatgacgattggatttaccaatctataattggtagagggaagtctaaaaagaagattgaccatcttgtggaagaagttcaaggcattttagaaaaaatggcctgtattgacgctgttttggttgcacggaacgatgttaagtttgcttttagacttgcaagagaagccataggcagaaacagcgttgatgtgaacgcagaacaaggagagacttgtggcatattttttgaagaaaccgatgtagagcacatgttcgttaccgagaaatgccttcaccgtcattgctttccttgtgtgaaacaacatgtgaaagtgaagctgcgtagcggaactgagcccacatgccttgaatatggatgcaagtttaagctcacccttgaaagatgtagtaaagtgttgacactaaagcttattgagatgtggaaacaaaagatgaaagaagactccattcccgctgcggagagaatatattgcccatatccaaactgctcgatgctgatgtccaaaaccgaactatccagtgaagccgacttatccaatgttaggacatgtgtcaaatgttgtggactattctgcattgattgcaaagtaccatcgcatactgatttatcgtatgatgattacaagaaacttcaccctgaccctctagttgatgacttgaagctcaagtctctcgcaaacgacaaaatgtggcgtcaatgtgtcaaatgtaggcatatgattgaactttctcatggctgtaaccacatgacttgcagctacgatgcgccgagggatgatcaggatgtggtatacaagtatccttctcctgagcagtttttcagtgaagaaaggaatgctgatggagatgattacatttgggacgactacaacaattatggcggtttaactggcgataaaggaggctttgatgaaggctttttcagagattattattctctttaa

SEQ ID NO: 2056 - DNA, 1599 bp, Arabidopsis thaliana
  Clone ID: AT_T16H5.C1.o30.tg
atggaaaatcaagaggattcttgtgaatgtgaggagcttccattgaatcacttaggagatgaggaagagtttagaagttgttgtggtgatgaagaactttggttaaagggtagtgatgatatagctaaagttgtagaggaggagaaaaaagatgatcttgatgatgagttctctgttaagatggtctttaaaggagtctcgatattcgaaagaggagatttgggttctggttattcgggaattggtgttgtgttggagaggtcaggagatttggagttgattcaggttcagaagaagttggatttttatgtcgaagagtctgtagctaactatttagctcttatggatggtcttgaagtagctttacagaacaatctcagctctgtggttgctgtaaccgactccgagttgctctataatcagataactcgtgaggagcagctcgagatccctcttttagtagctctgagagaaagggtattggagaaaacaagtaaccttaatgggtttgttctaaagcttgctcctttctgtgatcttgatgaagctctaagcttggctcaagtagcggtaggaatcgtgtcttctaatcttgatggggataaaccgatcgagaactgctcgatctgctgtgaagaccgtcagtctgagatgatgctatcattgaaatgcactcacaaattctgttcgcactgcatgaaaacgtacgttgaagggaaagtaaagacttcagaggttcccatcaggtgtcctcaagtgcaatgcaagcattatctctcagcagcggaatgcaaatcgttccttcccgtcactactttcaaatcattcgaggaagcaaatgtgtgtagtaaaaacaatgggaagatttactgcccatatcccaattgctcttttctgttagacccgcaagaatgtctatcatcaggaagggctagctcaagctcgtctactcagtcagagaatagctgctgtgtggagtgtccagtctgtgagaggtttgtgtgtgtggactgtggtgttccttggcatgcttctatgagctgtgaagagtttcagattcttccagttgatgaaagatacccagatgatattacattgcatcgcttggcaaggtataagaggtggaggcggtgtcagcaatgccgtataatgatcgagcttgctcaaggctgcaaccacatgacttgccgatgcgggcatgagttttgctactcgtgtggagcagagtacagagaagggcaacagacttgcacgtgtgctttttgggacgatgatgaagaagaacaagaaaacgcagtagaggaaaacacaattcaagaagttgagcaatggccttgggacacatttaactcaattccaactgtaatggacgcgtactcagagcaagaaagatctcagcttgctctgatccaaaggttcttagcaggtggagggtttagtctcagtgatcaccatactacttatcagtcaccgccgcctccatgtacagagtcatcatatgttgaagccgcaatgaaagatcttcatcagcttccttggcttgagaggtttgtgtctgttataagtgatgattactatgaagagtataatagccagtga

SEQ ID NO: 2057 - DNA, 939 bp, Arabidopsis thaliana
  Clone ID: AT_F9K21.C1.o150.tg
atggaagatgatccaaaacccgcgggagaaatcaaaattgaatcgtatagtctttacttcaagggtttggttagcgaggaaaccacagagctattagcgggatttgcggttgcaatttgcgacaaagatgataatctcttgtttcagatgaaagaacaagttcatgattctagggttgttacacttatggaggttgagcttatggcattgaagcgtggactaaccgaagttgtgcgtttagggatcgatcatatctccatttactgcgatcattatcagatttttgaattggtcatggagagatctgtttctgagcaagagaacatccttatgttaatggacgatgtgcaacgtattagaaaacgtttaacatctagcgttcctgttctggtcatgactaggaatcaaattgaatttgtatatgaacttgcaatggaaacaatagtttctgaaatccgcatagatatgcctgatcataacaagacttgtagtatctgttccggtgacaatatcgaacctgagcagatattttccgttgctttatgtggtcatgaattctgtatggagtgcgtgaaacaacatatagaagtgaagctactctcgggaggtgtaccgagatgtcttcattatcaatgcgagtctaaccttactcttggaagttgtggaaatattttgacatctaaactaaaagcaatgtgggaactaaggatcgaagaggaatctattcctgtggcggagagagtttattgcccaaaccctctgtgctcgagtttaatgtcggtaaccaagctctcaaactcaacaagagaagatgtaactatgagaacctgtgtcaaatgcggtgaacccttttgtatcaactgcaaacttccgtggcatagcaacttgtcgtgcaacgattacaagagcttgggtccaaatcctacagcagatatataa

SEQ ID NO: 2058 - DNA, 1512 bp, Arabidopsis thaliana
  Clone ID: AT_MBK5.C1.o24.tg
atggagaaactaatgactgaatcaggtttgaaaccagttgttattgattcgaatcaagatttatctcgtgtatattgtgggatctgctctaatattggtgatgacgattatgatggtgatgctgttgttgttgatggtgatttgatctccacgcctttttgttctcacaagttctgcaaagcttgttggagcaagtatcttaagaaaaatttcttctctgtggagaaaaaccacactgcaatctcttgtcctgatcgagattgtcgagctgctgttggaccggagacggttgagaagctaaccgtacgtgatcaagcgatgtacgagttgtatattctgaaatcttaccgtgagaaatacctgggatggaagctcaaactgtgtcctgcacggggttgcaattacgtgattgagtttcatctggcaagtgaagatgaagagcatagcttaaacattgtgtgtctctgtggtcatatcttctgttggagatgcatgcttgagtcacacagaccagtgacctgcaacaacgcttctgattggttgtctagagacttggagaaattgatagaagaagtagacaagccatcgaccgtctcctggattgatgccaataccaagccttgccctcattgctttattcctgtggagattgatggtgaacgaccatgggcccagttcttgacttgtgtctgcagcggtcgtttctgttggaagtgttttcggtcaccggaaactcacggaacctcaggatcctgtttggcaccggcgcgttcgagcaatgttggtttcaatcattggaacagagcaaaaccggggatttcgtgtttggatctctggaatgcgagtcaagtgaatctggtgaacgctaaatacgagctagaagctttcgaggaatccataatcaagaaacctagtgacttgaaggagcaagacgttaaggtactaagggaaggactgatgctcattgttcagtgcagacagttcctcaaatggagctgtgcgtacgactatatccacacagagtatgatatggcgaagagagagtacctgcgattcctccaacaaaacgcgtctggcattgtccatagtttctcacagagtataaaggaggaaacagaagccaaagagcttacttgcggtaagctattgagcgagacaaccaacattgggaacttcttttatcatttcatcaagactttacgagaaggtttgcccgaggtacaggcggagtcgtacgacaactatggtggtccttactggttgtgcgatcgctgcacatatggaaactcttggttccagagggcctttacaatgctttgtgacaagcaacgtttggctctgatgttctcagactccataagaaaatatgtggtcctgttgttgtcttttttcatccctcgctctactactgtagttttgctctcaggaactaaaagccctgaagatggactaaaacagaagatgaagagcactgcttttacatctgaagatcccaaatttcttgtcaactga

SEQ ID NO: 2059 - DNA, 1968 bp, Arabidopsis thaliana
  Clone ID: AT_f15l12.C1.o110.tg
atggatttcgattccgagtatgcttttcggttacagatggaggaggcactcgcggcttctctatcttctcaatctcgcactccgcaacgaccaccgtcacctccgattgtggctacgtgtggtgtccttatcgttgaaaacaatccaaacgattcgaagacggcgaaaacaagtagcggttacggtttcgattttaagagagccgtcggcggtggaaactctaaagcaaaaggcaaaacccacgagtctgtcactggtgtacgtacagatgaacgaaaccctaacattgggctcggtaactcccggagtacgtctaccggacatggcaatacgaaacccttgcctcaggaaactgttcgtccggcgcaattagtcggtgagggaagttcgagggttaacactgctgccggaaaaatcaatggaaacctcttgtataggctttactttaagggtttggttagcgatgagaacgggaaggggaagatgacggacgtagtgtctgggtttggggttgctatttgtgaccagagggataatttgttgtttgagatgaagggaccattgatagacaatggcatgagtcgtcagggagcagagcttaaggcattgatccgaggactaaccgaagcattgaagttggggattaagcatattgttttcttttgcgattcttatccgattttccaatacgtcacgggaaaatggatggctaagcaaaagaagatttccctgttgttagatgatcttcaaagcatcatgcaacacttttcatcttatcagcatgttctggtggctagaaatgatgttaaatttgcttataaacttgcaagggaatcaatactttctatggtcacccctcatgaagatcctcgccaagcaaaagctgttctgaaagaggagtgtgctatctgtttcaacgacatcgttgctgagggtatgttttctgttgacaaatgccgtcaccgtttttgctttcaatgtgtgaaacagcatgtagaggtgaagctgcttcatggaatggctccaaaatgtcctcacgatggctgcaagtctgagctggttatcgatgcatgtggcaagcttttgactccaaagctgagtaaattgtggcaacaaagacttcaagagaatgcaatacctgtcacagagagagtttactgcccttacccgaggtgctcggctttgatgtccaaaaccaagatttctgaatctgccaagagcttactgtctctttaccctaaatctggagttaggagatgtgttgaatgtcgtggcctcttctgtgtggactgtaaagttccgtggcatggaaatctgtcctgcactgagtataagaaattgcatcctgagcctccggcagatgatgtgaagctcaaatctcttgcaaataataagatgtggcgccagtgtggcaagtgccaacacatgattgaactttcacaaggatgcaatcacataacttgcagatgcgggcatgagttttgctacaattgcggaggtggatggaacaagataatggggacttgtttaaatcgctgcccaacctggaacgaagaatacatcacacgacaagatccagcgcgtgccaatgtggcagctaacaactactttgatgatgaggatgatgatgatgttgatggtgattacgactatgatgacttcttccacccgcattttggacatgctatgaatgatcgtaatcctgaagagcccttcgaccccttcttcgacttgccagatggtgtgctctttaccccccagatgttgtcttccaagagtcgtcagcaattgtacttgccggattcagatgattcagatgataatgcgacaacacaaaatgctcctgctgcagatgagaattgcccatactttgggaagtatggaaagtacactataatgtacgactccgacggctatgaactcgaggatttcacgaaccctttccatcctgactatcctcacttctga

SEQ ID NO: 2060 - DNA, 1053 bp, Arabidopsis thaliana
  Clone ID: AT_F13B15.C1.o4.tg
atggaaagagacgatattaacttgactttccaaaaacggcggatagattctgcgacaacagaaaatagtccaaaccctaaaggcgatgatagttccaaggtcgtcaactccgcctctccggcaacacaatcttacagattgtacttcaagggtttggttagcgaccagacgctagctgaaggcggcaaaagaatcgtgaatgctggatttggggttgcgatttgtgacaacacggatgagtttttgtttgagataaaggaatcactgagcaacgccgagattagtcgcaaaggagtagagatcgtggcacttattcgtgggctaagtgaatgcctcagtttcgggtttatgaatgtggtgatttattgtgatgaccatcaaatttaccaatatgaattattttcatcgcagataattgagagaagcctaagaagaaaattgcttgtggaagaagtcaaacgcctaagagaacaaatgacttttagtgaagctgttttggttgccaggaacgatgttaagtttgcttatagacttgcaagagaagaaatagtctctaaaagcagtagcgtaaatgtgaaggaagcacaaggagaaacttgtgtcatttgtcttgaagaaaccgtagctgatcgcatgttttttactgacaagtgtcttcatcgttattgcttttcttgtgttaaacagacatgtgtcaaatgcaatggactcttctgcattgattgtaaagtaccatcacattctgatttgtcgtgtgctgattacaagaaacttcaccctgaacttttagttgatgacataaagctaaagttactggcaaacgaaaatatgtggcgtcaatgtgtcatgtgtaggcacttgattgaactttctgatggttgcaatcacatgacttgcagatgtggatatcagttttgctatggatgtggaatcgaatggaagaaaaaccaagacacttgcccttctggttgccgggaaatgggacacggtgatgctgatagtgatgatgatgatgatgatgtggatgacgatgaagatgattattgcatgtag

SEQ ID NO: 2061 - DNA, 1407 bp, Arabidopsis thaliana
  Clone ID: AT_F3K23.C1.o18.tg
atggaaaaacatgatctaactttgatttccaaaaaacggaggatagattttgcgacaaccggagatatcccaaaccttaaaggcgagggtgtttctatggtcgctgaatctgcttctgcgtcaaatatttttgcggacagtctagtctatagattgttctttaagggtttggtgagtgatgaaacaactaccgacatggaagagattgtgaaggctggatttgggatagcaatttgcgacgaggcaaatactttgttgtataatatgaagaaatcactgaacggcgatgatgtgattaatcccgaagaagtagagattaaagcactgatctgtgtgttaaatgtctcaattcaaatggagcttagaaatgtcatgatttgctgtggtgactatcaaatattccaaatccttactggtagagggaagcctcagcagaacattgtccatctggtggaacaagtccaacaccttagagggaagctatcttctactgaagttgttttggttccgcgagctgatgttattatacttgcaatagaggcaataggaggagaaacttgttgcatttgtcgtgaaaacaccgatgctgatcgcatgttctttacggagaattgctttcaccgtcaatgcttttcttgcgtgaataggcatgtgcaacgtatgctgctttgcggaatttcacccacatgccttcattttccttgcaactctgagctcacgtttgaaagctgtagcaaggttttgacaccaaatctgattgagttttggaaacgaaagattgaagaggacttagttccggctgcggacaaaatctattgcccatatcgaagatgctcaatgttgatgtccaaaaccgcgctttcccgtgaaaccgaccaatccaatgtccgggcatgtatcaaatgctgtagactcttctgcattgactgcaaagtaccatcgcatgctggtttgtcgtgtgttgattacaagaaacttaaccctgatcctctatatgatgtcaagctcaagtctctagcaaacaagaagaagtggcgtcaatgtgtccagtgtagcaacttggttgaactttttgaaggttgcaaccacataacttgcagatgtggatttgagttttgctacgtatgtgggaaagaatggaaccaacgaggatgcctttctcctggttgcgatgatgatgatgatgatgatgatgatgatgacgatgatgatgacgatgatgatgatgatgacgatgatgatgacgacgatgaggatgatgaagacgacggctatattgacagcgatgatgatgatgttgacggagatgacaatgatgatggctcagaattagatgggattaactttgaagattttgcggttcacctacccaaagatgtcaatgagcagaaagatgagagcaactga

SEQ ID NO: 2062 - DNA, 927 bp, Arabidopsis thaliana
  Clone ID: AT_MLN21.C1.o3.tg
atgggttcatcatcatcgtcgtcaagcacaaaggtggacaccgatatgttggtagacgaaacctacctctctgctttattcgattacgatgaaattttcccaatcgccgacgaaagctatgctacggagatccatctccaagaagctatgttttcttcttttggcgcttctactgttggtgttaatcatcatcctcaagtccataggaatctagtcacgctggttaagcaggaaccggagattaaagccgagaatgaacccatggaaccatcaagaaggttatgtatgatctgtatggacgaaaaaccttcctcagacatcttccgaggaaccactaactgcactcacgcctattgcaccgactgtactgtccgttacgtggcaactaagataaaagaaaacgcatcgaggatcaaatgccctgacgtggagtgcacgcgactgatagagccttacacgtgtcgagatctaatccctaaggatgtattcgaccgttgggagaaaatcttgtgcgagtctttgatctcctcgtgggacaaattctattgtccgttcaaagattgttcggcgatgatggtgaacaatgaaaatggagatgctaacgtgacgcagacggagtgtcgttcttgtcatagactgttctgcgtgcagtgtaaggtgacatggcatgcggggattgggtgtgatgagtttcaaagatttgggaatacgaagaagaagagtagtgatgaagacgatgctttgttgattcagatggcaaaaaataagcagtggagaaggtgtcctagttgcaaattctatgttgataaagtcgagggtgtggatatcagttttgctatggttgtggatctgtgtggagttcttctcacgcatgccaaattcgtatctaaaaggccaatcgatggtttattcgataaatttgtttaa

SEQ ID NO: 2063 - DNA, 648 bp, Arabidopsis thaliana
  Clone ID: AT_F28K20.C1.o7.tg
atgaggaaaggtaagagagtgataaaaaagatagaggagaaaataaagagacaagtgacattcgcaaagagaaagaagagtctaatcaagaaggcatatgaactctctgttctctgcgatgtccaccttggtctcatcatcttctctcactccaacaggctctacgatttctgctccaactctaccagcatggagaatctcatcatgagataccaaaaggaaaaagaaggtcaaaccactgcagaacacagtttccactcggatcagtgttcagattgcgtgaagacgaaggaatcaatgatgagagagatagagaatcttaagctgaatcttcaattgtacgacggacatggcttgaatctcttgacctacgacgagctcctttcttttgagctccatctcgaatcttctctacaacatgctcgagctcgcaagtctgagttcatgcatcagcagcagcagcaacaaacagatcaaaagcttaagggaaaagaaaagggtcaaggaagctcttgggagcagctgatgtggcaagcagagagacagatgatgacgtgtcaaagacaaaaagatcctgcgccggcgaatgaaggaggagttccttttttacggtggggaacaacccaccgacgttcttcacctccttaa

SEQ ID NO: 2064 - DNA, 2022 bp, Arabidopsis thaliana
  Clone ID: AT_F28K20.C1.o8.tg
atgaaccaaatcaaagatccaaaccctaatctaccggaacgtctcttcgccgtcgattgctatcccgataaagcccgtcttaatatatattcaagacctgaatatctcggtacaattgctaaccttctcaaaggctctgaagaatgggaacgaatcaaaagttcacaatttggtaagctgttcgaattccctgtcgctcgatgctcacattcaggtaagctgatacatggtttattatcccgacaagtcgtaactaaaaagaaacacgagttatggtttgtgtttggtggacacccaatacgtttctctataagagagtttcatatagtgactggtcttagatgtggtaaattaccaacagaagatgaggtaaagaagcatcaggattctaagtatttgtctgtgtggaataggcttttcggagagaaaagaatggttactattggagatgtgttggagatgttacaaaagaagaaactttcctcttggaaaaagctttgtttagctctcattgtaattgtggatggtgttgttgtatgtaatgaccaaagctttgtaactctagattttgtggagatgttgaatgatatagacttctttttggagtatccatgggggagaaaagcttttctcgcaactattcgtcgtttcgggccacctaaagatgcacctaatccgttagggaaacttaagaagcgtttgaaacagaagacgagtgcgtgttacggttttcctctagctcttcagttacaagtttttgaatccattccggtgatattggagaggataaaagatccaaacgatcttcgggacttcactgagaggtcatctgaggggttgtcaatagcgtttctgcttcgtaagagttatattcttgatgctgaagttgatgacaagcttgtggttgcacatacattggaacctaagggaatgattaatgaatctgagttggtttgggaaacagaggtttctgatcccaaggtggattacattttgagattgatcaacgagggacattgtttcaaaccatttgaatggccacacttgaaagcagcaaatcaagaggtcaatattccagatattgatggtgacagccttgaagatgtcacagatgttagtcaagcaaggcccaaaaagcctcttactaggtcttctaagaaggagaaggaagttgtcaagcctcctagtatccacaaacatacttctcaggaaaaaataaaggctaaagttcatgttggtggagaaagtaacgacccggggtatgtcacgcttgcttacttgaatgacatgaaggagtggatactgaaacagaatcaagaccttagaaacaagattagggaggatgttaaagaaattgttgttggtcccaaatcaccagcaggaggagcatctaatctgcgtcaatcaaacaggcttaacaccaacagtaagggaaagactgatgcatcacctcctaagaaaaccggcaacacagaaacgcgaaaacgaaaaagaaaacaggtagaggttcactccttatcatctggaagcgagtcagccggtgacattgaaggtgaagaggatgttcagagtacatggaaagaggacggaaatgcgccaagctcgggtacatttgatgaatgtgatgattatggaggtgctctaaaaatcactcaggaaggtgatgtgatgcaagaagaaagtgactttgatcactgttcttcaaattgtacaaagatgaaagaatcaatgatgagagagatagagaaccttgaactgaagcttcaattgtatggaggacatggtctgaataatttaacctacgacgagcttcttcattttgagcatcaactcgaatcttctctccatattgctcgagctcataagcaggagcagcagcaacaacaaacagacaagcttaaggagaatctcatggtgtgtcaaaggcacgaagatgatgacatcatgcaccggcaagtgaagaaggagaacccaccggcgttcttcagctcctcccgccgccacaaccagccccaagactag

SEQ ID NO: 2065 - DNA, 3366 bp, Arabidopsis thaliana
  Clone ID: AT_F19H22.C1.o150.tg
atggcttcatcctcatcgagaactagaagcagtagacctccaagtcccgcttcttccacttcttcttctcatctcagcaaccgtctcattcctcgttctaactctacctctgcttcctcattgattacctccgccgccggaatcgcctcccgatctatgacgcctagtcgcaccttctccgactcgggccttatcggctccggcagctttggaattggatcgcctgttccctacccgtcagaggagcttctcggtgaccctatggacgatactattagctctgagcgggatagtatctccgtcaccgttcgttttcgtccgttgaggtatgctagatctgatctcgccatggaccagatctattgcagagattacagttttcatgtagatgcaattggagtcaattctttattgggagagtatcaaagaggagatgaagttgcttggtaccctgatggtgatacattggttaggcacgagtataacccactcacagcttacgcatttgataaagtttttggaccacaggcaactactattgacgtttatgatgtagctgcgagaccagtagtcaaggcagcaatggaaggtgttaacggaaccgtttttgcttacggtgttactagcagtggaaagacacatacaatgcatgtaagggttttaaaaaagaagaatccttatacgcctttctctctagtttttcttcaaaacacatgtgctatgaattgggatctcttcttcaacttggtccccctttggtatctgctgggtgatcaagaatctcctgggatcataccgctagcaataaaagacgtgttcagtatcatccaggatgtaagtggtcttaacgggactccaggaagggagttcctgctccgtgtttcatatcttgaaatatacaatgaggtgataaatgatttactggatccaacaggccaaaacttacgtgttagagaggattcccagggcacttatgttgagggtatcaaggaagaagttgttttgtctcctggccatgcactatcattcattgcagctggggaagaacatcgtcatgttggttcaaataatttcaatttgttgagcagcagaagtcacactatatttacactgatggttgaaagtagtgctactggagatgaatatgatggagttatcttttctcaactcaatttgattgacttagctggatctgagagttcgaaaactgaaacaactggattgaggaggaaggagggttcatacatcaacaagagtcttctaactcttggaactgtgattggaaaacttagtgagggtaaggcaactcacattccatatcgtgactctaagctaactcgtcttctgcaatcttcattaagtggtcatggacatgtgtcgctcatatgtacaattactcctgcgtccagcagtagtgaggaaactcataacacattgaagtttgccagcagggcaaagagtatagaaatatatgcttcacgcaatcagattatagatgagaagtcattaattaagaaatatcaaagagaaatctcaaccctcaaactagaacttgatcagcttagaaggggtatgcttgttggtgtcagtcatgaagagttaatgagcttaaagcaacagttagaagaagggcaagtgaaaatgcaatcaagattggaggaagaagaagaagccaaagcagctctaatgagcagaatccaaaagcttaccaagctcatactagtctctaccaagaattctattcctggatattcgggtgacatacctactcatcagcgcagtctctctgcgggtaaagatgataaattcgattctctactgttggaaagtgataatctgggatctccatcttcgaccttagctcttctatcagaaggttctttaggttttaaccacaggcgatcttctagcaagttgaatgacgaaaactcgccgggtgcagaatttactcaaggtgtcatgacgccggacgaaatcgaccttctggttgaacaagttaagatgcttgctggtgagatagctttcagtacgagcacactaaagcgtttggtggatcagtccgtaaatgatccggaaaactcacaaactcagaatctggaacgcgagattcacgaaaagcaaaggcaaatgagaggcttggaacagctcataattgagagtggtgaagcttccattgccaacgcatcattagttgagatgcaacagaaagttatgagtctgatgacccagtgcaatgagaagagctttgagctggagatcaaatcagctgataattgcattctccaagaacaactacaggaaaagtgtaccgagaacaaagaactacatgaaaaggtgaatcttctagagcaacgcttgaatgcagtatctagtgagaaatcctctccatcttgttccaataaagcggtatctggagagtatgcagacgaactaaaaaagaaaatacaatcgcaggaaattgagaacgaagagttgaagctagaacacgtgcaaatcgtggaagagaacagtgggttacgagtacaaaatcaaaaactagctgaagaagcttcatatgctaaggagttagcctctgcggctgctgttgagctgaaaaatcttgctagcgaagtaacaaaactctcactacaaaacacaaagctagaaaaagaattagcagctgcaagagacttggctcaaacgcgtaaccccatgaacggagttaatcgcaagtataacgatggggcaaggtcaggaagaaagggaaggatttcctcaagtaggtcaagtggagatgagtttgacgcatggaatctagacccagaagatcttaaaatggagttgcaagtaaggaaacaacgagaagtggctcttgagtctgcattggcagagaaagagtttatagaagatgaatacaggaaaaaagcagaagaggcaaagcgaagagaggaagctttagaaaacgatttggcaaacatgtgggtacttgttgccaagttgaagaaagacaatggtgcattgcctgaacccaatggcactgaccctggaagagaattagagaagagtcaaagccatgcggttctgaaagagagacaagtctcgagtgcaccgagacaacctgaagtagtagtagtagctaaaaccgaagagacaccaaaagaggaaccactcgttgctcgtctcaaggcacgaatgcaagaaatgaaagagaaagagatgaaatcgcaagcgaatggagacgcaaactctcacatttgtaaagtatgtttcgaatctcccactgcggcaattctactcccttgccgtcatttctgctgtaagtcacaacttcatctccatgaaacctcatgtctcttcttttatcaaagagttgtattaaaaagatga

SEQ ID NO: 2066 - DNA, 1635 bp, Arabidopsis thaliana
  Clone ID: AT_T26J13.C1.o3.tg
atggcgccaaagagagcatcgccgatgcagtcttctctgtactctatcgaaaactccgatcaatcaaatgaatcttcgtgtgttttgattcgatttctccaggtgattacgaggttgcagtggatggtaagaatttcacctgtgaatccggacccaaaagcattcaaatcaaatttcccagaaactacacagtcaaaatctcagtggaaaaaaagaaaaattgggtttcggtcgatccgattcgatggggagagagggcgatcagatgaagaggaagcgaagagatctaacgaacaagacgagagggccctgcaatttctgcgaattctccagcagcagctgcggaaagaagtcgagagattacggcttttgatcaagagaatgactgggaaggaagatattgtcagcttcaccgagctgctagctcttcaaagtcaccttatggatgtccgatccattgtgctggagcaaaagaaggaggtagagctggaagaagctgaaaggccgcacaaacagaagaaggaagcagagcatgatgctgacggtatgaggagaggggttttggttccttgcaaattctctgccagcagcttgggagaaagacaggaagatccaaatggtgaagcaccactgctgcaaatgcagagggaattcgagcaacgcagctctgaatccttgcagagcgagttcgacaaattatggctttttaacgagagaatgaatggtagagagctcgagggtatgacttccttcgacctgtccatacttcacattcagatattacgagctctacgggctttgattgaccaaaagttgggaccaagacaagaacatagggcatggcagcgcggagagctgagcccgggagatgttcgtcggataatgacaaggatgctgactcttccttgcaatgtagacttcttctcgtttcaagaaagctcagaagattccataattcttatcagcggaagagcatgccggagaccagatattaactttgggtttccttcgatccgattagaaatctcgagaatggggagaggaaggattaagatgaagttgaaagggaggcgaagagatttgacgaagaagaaggtgagagagctctgcgattattgcggattctctagcggcatcattaggtatgatgaacaaaggccacacgaacgagatcacgaagcagtgtctatggagaatgaactcaagagattacggcttttaaccaggagaatgacttgtaaggatctcgatggtctgactttccccgagctgctatcacttaaaagccatctacagactgccttgctcattgtgaaggaccaaacgaagaagatagagcagctgcttaaagaagatgatgggtggatgcttatacggtcgcaactgcagctacaattcgagagacgaaatgctgaacccatgatgatcgaatacgggagattatggctgttgaaggaagtcgatgtcagtttcactttgtttctgatggtttgtttctttttccttcttttcgtgaaaactgacaggagaatgaacggtagacagctcgacggcgtgggcgttcgggatcggttcttttttttcgggtatcgggtctattcggataggaggttgagaactattcgggtattctaa

SEQ ID NO: 2067 - DNA, 1935 bp, Arabidopsis thaliana
  Clone ID: AT_K1F13.C1.o30.tg
atggcctctgattactattcatctgacgatgaagggtttggggaaaaggttggtctgatcggtgaaaaggatcgttttgaagcagaaactattcacgtcatagaagtttcacagcatgaagctgacattcagaaagctaaacagcgttctttggccactcatgaagctgaaaagcttgatttggccactcatgaagctgaacagcttgatttggccattcaagaattttctcgtcaagaggaggaggaggaaagaaggcgcaccagagagttagaaaacgatgcgcagatagcaaatgttcttcaacacgaggaaagagaaaggctgatcaataagaaaactgcattggaagacgaagaagacgagctgcttgctaggactttagaggagagtttaaaggagaacaacagaagaaaaatgtttgaagaacaagtgaacaaggatgaacagcttgctctgattgttcaggagagtctgaacatggaagagtatcctattcgacttgaagaatataaaagtatatctcgtagagctccgttggatgtagatgagcagtttgctaaggctgttaaggagagtttgaagaacaaaggtaaaggaaagcaatttgaagatgaacaagtgaagaaggatgagcagcttgctttgattgttcaggagagtctaaacatggtagagtctcctcctcgacttgaagaaaataacaacatttccactagagctcctgtggatgaagatgagcagcttgcaaaggctgttgaagagagtttgaaggggaagggtcaaataaagcaatcaaaagatgaggtggaaggagatggaatgctcctagagttgaatcctcctcctagcttgtgtggtggttgcaactttgcggttgaacatggaggatctgtgaatatcttgggtgttctttggcatcctggatgtttctgttgtcgtgcttgtcacaaaccaattgctatccacgatatcgaaaaccatgtttcaaactcaagaggcaagtttcacaaatcgtgctatgaacggtactgctatgtctgcaaagagaagaagatgaaaacgtacaataatcatccgttttgggaggaaagatactgccctgttcatgaagctgatggaactcccaaatgctgcagttgcgaaaggttagagcctagggaatcaaactatgtaatgcttgctgatggtcgatggctatgcctcgaatgtatgaattctgccgttatggattctgatgaatgccagcctttgcactttgacatgcgtgatttcttcgaaggcttaaacatgaagattgagaaagaatttccttttcttttggtggaaaaacaagcgctgaataaagctgagaaggaagagaaaattgactatcagtatgaggtggtaaccagaggtatttgcctatctgaagagcagattgtcgatagtgtctcccaaaggccagtcagggggccaaacaacaagctagtaggcatggctacagaatctcaaaaggtaactcgtgagtgcgaggtcactgcaattctcatcctatatggacttcctaggttactaacaggatatattttggctcacgagatgatgcatgcttatcttagactcaatggacataggaacctgaacaacattttggaagaaggaatatgccaagttctaggtcacctgtggttggattctcagacatacgccactgctgatgctactgcagatgcatcatcatcagcttcttcttcttcccgcactcctccagctgctagtgcgtcaaagaaaggtgagtggtctgatttcgacaagaaactggtggagttttgcaagaatcagatagaaacagacgattcaccggtctacggtcttggattcaggacagttaacgagatggtgacaaactccagcctccaggaaaccctgaaagagattcttcgccagaggtaa

SEQ ID NO: 2068 - DNA, 2142 bp, Arabidopsis thaliana
  Clone ID: AT_K1F13.C1.o31.tg
atgccgatctcggatgtcgcttctttggttggaggtgctgctttgggagctccactttctgagatatttaaactggtaattgaagaggccaagaaagtgaaggactttaaaccattatcccaggatctcgcttcgacgatggagagattggttccgattttcaacgagatcgacatgatgcaacaaggatcgaaccgaggtacgagtgagctaaaggttctgaccgaaacgatggaacgagctggggaaatggttcataagtgttcacgcatccagtggtacagtatcgccaagaaagctttatataccagagaaataaaagcaatcaatcaggattttctcaagttctgtcagattgagttacagcttattcagcataggaaccagttgcaatatatgcgttccatgggcatggcaagcgtgagtacgaaagccgacctactgagtgatattgggaatgaattttccaagctttgtctagtggctcagcccgaagtagttactaaattttggttgaagaggccattaatggagttaaagaagatgctttttgaagacggagtggttaccgtcgtggtctctgctccttatgccctcgggaagaccacgttggttacaaagctttgccatgatgcagatgttaaggaaaaattcaagcagatcttctttatctctgtgtcaaaattccctaacgtgaggctcatcggacacaagttactcgagcacattggttgtaaagcaaatgaatatgagaatgacttagatgcaatgctctacattcaacaactgctgaagcaacttggacgaaatgggtctatattgttggttttagatgatgtttgggctgaggaagagtccttgctacaaaagtttctgattcagctacctgattacaagattttggtgacttctcggtttgagttcacaagttttggtcccacttttcatttgaaacccttgatagatgacgaggtcgaatgcagagatgagatagaagaaaatgaaaagcttccagaggtgaatcctcctcttagcatgtgtggtggttgcaactctgcggttaaacatgaagaatctgtgaatattttgggtgttctttggcatcctggatgcttctgctgtcgttcttgtgacaaaccaattgctattcatgagctcgagaaccatgtacggaaatgttcttcttttgacaattgtttggtttcaaactcaagaggcaagtttcacaaatcctgctatgaacggtactgctatgtctgcaaagagaagaagatgaaaacgtacaatattcatccgttttgggaggaaagatactgccctgttcatgaagctgatggaactcccaaatgctgcagttgcgaaaggttagagcctaggggaacaaagtatggaaagcttagtgatggtcgatggctatgcctagaatgtgggaaatccgctatggattctgatgaatgccagcctttgtactttgacatgcgtgatttcttcgaaagcttaaacatgaagattgagaaagaatttcctttaattttggtgcggaaagaactgctcaataaaaaggaagagaaaattgacaatcattatgaggtgttaatcagagcttattgcatgtctgaacagaagatcatgacatatgtctcagaggagccaaggacgggtcagaacaagcagcttatagacatggatacggaacctcaaggggttgttcatgagtgcaaggtcactgcaattctcatcctatatggacttcctagattgctaacaggatatatcttggctcacgagatgatgcatgcttggcttagactcaatggacatatgaacctgaacaacattttggaagaaggaatatgccaagtgctaggtcacctgtggttggagtctcagacatacgccactgctgatactactgcagatgcagcatcagcttcttcttcttcttcccgcactcctccagctgctagtgcctcaaagaaaggtgagtggtctgatttcgacaagaaactggtggagttttgcaagaatcagatagaaacagacgaatcaccggtctacggtcttggattcaggacagttaacgagatggtgacaaactccagcctccaggaaaccctcaaggagattcttcgccggaggtaa

SEQ ID NO: 2069 - DNA, 1590 bp, Arabidopsis thaliana
  Clone ID: AT_K1F13.C1.o29.tg
atgtggtgtttgtcctgctttaaaccttccactaaacatgatccctctgaggatcgttttgaagaagaaacaaatatcgttacaggtatttctctgtatgaagatgtcatcttacgtcagagaagatcagaagctgatcagatagaatgggctattcaagatagcttcaacccgcaagaaacttctcgttgtcgtcagcgagaggaggatgatcagatagcgcgtggtttgcaatatgtggaagaaactgagcttgataaatcagttgtggacgaagaagatcagcagctttctaagattgttgaggagagtttgaaggagaaaggcaaaagtaagcaatttgaagatgatcaagtggaaaatgatgaacagcaagctctgatggttcaggagagtctatacatggtggagctttctgctcaacttgaagaagataaaaacatttcaacaatacctccgctgaatgaagatgcgcagcttcagaaggttatttgggaaagcgcgaagggtaaaggccaaatagagcatttcaaagatccagtggaagaagatggaaatcttccaagggtagatctcaacgttaaccatcctcatagcatatgtgatggttgcaaatctgcgattgaatatggaagatctgttcatgccttgggtgttaattggcatcctgaatgtttctgttgtcgttattgcgacaaaccaatcgctatgcacgagtataaagaacatcccttctggaaggaaaagtactgcccttttcatgaagttgatggaactcccaagtgttgcagttgtgaaagattagagccctggggaacgaagtatgtaatgcttgctgacaatcggtggctatgcgtaaaatgtatggaatgcgcggttatggatacttatgagtgccaaccattgcactttgaaatccgtgaattcttcggaagcttaaacatgaaggttgagaaagaattccctcttcttttggtggagaaagaagcgctgaaaaaagctgaggcgcaagaaaagatcgacaatcagcatggggttgtaaccagaggtatttgcctgtctgaagggcagattgtcaatagtgtctttaaaaagccaaccatggggccaaacggcgagctagtaagcttgggtacagaacctcaaaaggttgttggtggatgtgaggtcactgcaattctcatcctatatggacttcctaggttactaactggatatatcttggctcatgagatgatgcatgcttggcttagactcaatggttataggaatcttaagttagagctggaagaaggaatatgccaagtgctaggccacatgtggttggagtcacagacatactccagttctgcagctgcatcatcagcttcttcttcttcgaggactccagctgctaatgcatcaaagaaaggtgctcaatctgattacgagaagaaactggtggaattttgcaaggatcagatagaaacagacgattcaccggtctacggtgttggattcaggaaagttaaccagatggtctcagactccagcctccataaaatcctgaaaagtattcaacactggacgaaaccagattcaaatctttga

SEQ ID NO: 2070 - DNA, 1599 bp, Arabidopsis thaliana
  Clone ID: AT_T29M8.C1.o12.tg
atgggttggtttaacaagatctttaaaggctctaaccaaaggctccgggttgggaataataagcacaatcacaatgtttattacgataattatccgactgcttcacatgatgatgagcctagtgcggcggatacagatgctgataatgatgaacctcatcatactcaggaaccatctacatctgaggataatacatcgaatgaccaggaaaatgaagacatagaccgtgcaattgcattgtcgcttttagaagagaatcaagaacagacaagtataagcgggaaatactcgatgccggtggatgaagatgagcaacttgctagagccctacaagaaagtatggtagttgggaattcaccccgtcacaaaagtggaagtacatatgataatgggaatgcatatggagctggagatttatatgggaatggacatatgtatggaggaggaaatgtatatgcaaatggagatatttattatccaagacctattacttttcaaatggatttcaggatttgtgctggctgtaatatggagattggccatggaagatttctgaattgccttaattcactatggcatccagaatgttttcgatgttatggctgcagtcagccgatttctgagtacgagttttcaacatcagggaactacccttttcacaaggcttgttacagggagagatatcatcctaaatgtgatgtctgcagccactttataccaacaaatcatgctggtcttattgaatatagggcacatcctttttgggttcagaagtattgtccttctcacgaacacgatgctaccccgagatgttgcagttgtgaaagaatggagccacggaatacgagatatgttgaacttaacgatggacggaaactttgccttgagtgtttggactcggcggtcatggacaccatgcaatgccaacctctgtacttgcaaatacaaaatttctatgaaggactcaacatgaaggtagagcaggaagttccactcctcttggttgagagacaagcacttaacgaagccagagaaggtgaaaagaatggtcactatcacatgccagaaacaagaggactctgcctttcagaagaacaaactgttagtactgtaagaaagcgatcaaagcatggcacaggaaaatgggccgggaatattacagaaccttacaagttaacacggcaatgtgaagttaccgccattctcatcttattcgggctccctaggttacttactggttcgattctagctcatgagatgatgcatgcgtggatgaggctcaaaggattccgaacactgagccaagatgttgaagaaggtatatgtcaagtgatggctcataaatggttagatgctgagttagctgctggttcaacaaatagcaatgctgcatcatcatcctcctcttctcaaggactgaaaaagggaccgagatctcagtacgagagaaagcttggtgagtttttcaagcaccaaatcgagtctgatgcttctccggtttatggagacgggttcagagctgggaggttagctgttcacaagtacggtttgcgaaaaacacttgagcatatacagatgaccggtagattcccggtttaa

SEQ ID NO: 2071 - DNA, 4728 bp, Arabidopsis thaliana
  Clone ID: AT_MPI7.C1.o30.tg
atggaaccaccagctgctcgtgtaacgccgtcgattaaggccgactgtagtcacagcgtcaacatcatctgcgaggaaacagtactgcactcccttgtcagccacctctcggccgctttacgccgggaaggcatatctgtgtttgtggatgcgtgcggattgcaggaaaccaagttcttctccattaaacagaatcagccgttgacagatggggctagggttttggtggtggttatttccgacgaggtggagttctacgatccttggtttcctaagttcttaaaggttatccagggttggcaaaacaacggccacgtggtggttccagtcttctacggcgtcgattcgttgacccgagtttacgggatcttaagcaataatgtactcacggactccgaactagtggaagagatcgtcagagatgtttatgggaagctttatcctgcagaacgagttggaatttacgcgaggctactagagatagaaaagttgctttacaagcaacatagggacatccgaagcataggaatttggggtatgcctggcataggcaagacgacgcttgctaaagcagtctttaatcacatgtccactgattatgatgcttcttgcttcatcgagaactttgatgaagcttttcataaggagggactccaccgtttgctcaaagaaagaattggtaaaattctaaaggatgagtttgacatagaaagttcgtatattatgagaccgaccctccatagggacaaattatacgataaaaggattcttgttgttttagatgatgtgcgcgattcccttgctgcagagtccttccttaaaaggcttgattggtttggttccggaagccttataatcataacctccgttgataaacaagtgtttgccttttgtcagatcaatcaaatatacacggttcaaggtttaaatgtgcacgaggctctgcagcttttctcccaaagcgtatttggaataaacgagccagagcagaatgacaggaaactgtcaatgaaggtgattgactatgttaatggaaacccgttagctctcagcatttacggccgagagctaatggggaagaagtcagaaatggagactgcattcttcgagctcaagcattgtcctcccttaaagattcaggatgtgctaaaaaacgcttatagtgcacttagcgacaatgagaagaacattgttttggacattgcttttttcttcaagggagaaactgtcaattatgtgatgcagctgcttgaggaatctcattactttccacgtcttgcaatagatgttcttgtggacaagtgtgtgttaactatctcagaaaacacagtgcaaatgaataatttgatccaagacacctgccaagaaatcttcaatggagaaattgagacctgcaccagaatgtgggaaccttccagaatcagatatctgctagaatatgatgaacttgaaggaagtggagaaaccaaagcaatgcctaaatctggtctggtcgctgaacacatcgaaagcatattcctggacacttcaaacgtgaaatttgatgtcaaacacgatgcattcaagaatatgtttaatctcaaattcctaaagatatacaattcatgctctaaatatatttctggactcaattttccaaagggcctcgattctctgccttatgagctaaggctcctccactgggagaactaccctttgcaatccttgcctcaagattttgactttggacaccttgttaagctcagtatgccttacagccagcttcataaactcgggacaagagtcaaggaccttgtgatgttaaagaggctcattctttctcattctttacagctagttgaatgtgacatactaatatatgctcaaaatatcgagctaattgatcttcaaggctgtacaggattgcaaagatttccagacacgagtcaattacagaatctccgggtagtaaatctctcaggttgcacagagatcaaatgtttctcaggggttccaccaaatattgaggaattacatctccaaggaactcgtataagggaaataccaatattcaatgcgacccatccccccaaggttaagctggaccggaaaaagctttggaatcttctagaaaacttctcggatgttgagcatatcgatttggagtgtgtaacaaatctagctacagttacctcaaataatcatgttatgggcaagcttgtctgcttgaatatgaaatattgttccaatttgcgaggccttcctgacatggtcagtttagaatctctcaaagttctttatctgtcgggctgttcagagcttgagaaaattatgggtttcccgagaaacttgaaaaaactatatgttggtggaaccgccatacgagaattgccacagcttcccaacagtctagaattcctgaatgctcatggttgtaagcatctgaagtcaattaatttggattttgagcagcttcctaggcacttcatcttcagtaattgttatagattttcttcacaagtgatcgctgagttcgtagagaaaggtcttgtagcaagtttagcaagagcaaaacaagaggaactcatcaaagcacctgaagtcatcatctgtattcctatggacacacggcagagatcctcctttcgcttgcaagcaggtcgaaatgcaatgacagacttagttccgtggatgcaaaaacctatctcaggcttttctatgtcagttgtagtatcatttcaagatgattaccacaatgatgtaggtcttcgcattaggtgtgtaggtacatggaagacctggaacaaccagcctgatagaatagttgagagattttttcaatgttgggctcctaccgaagctccaaaagttgtagcggatcacatttttgtcttgtatgataccaaaatgcatcctagtgatagtgaagaaaaccacatcagtatgtgggctcatgaagtcaaatttgaattccacacagtgagtggggaaaacaatcctctaggtgctagttgcaaggtgactgaatgtggtgtcgaggtaattacagctgcaacaggtgatactagtgttagtggaattataagagaaagtgaaactataactattatcgagaaggaggatactattattgatgaggaggatactcctcttttgtccagaaagccagaggaaacgaatcgttctcgttcatctagcgaattacagaagctttctagtacgtcaagtaagccaaaaaacttgagatctagaagtaggcgcacaacagcgttagaagaagcgttagaagaagcattaaaagaaagagaaaaattagaggacaccagagagttacaaatagcattaatagagtcaaagaagataaaaaaaataaagcaagcagacgaaagggatcaaataaagcacgcagacgaaagggaacaaagaaagcattccaaagatcatgaggaagaagaaatagagtcaaatgagaaagaagaaagaaggcattccaaagattatgtgatagaagaattagtgttaaaggggaaaggtaaaagaaagcaactggatgatgataaagccgacgaaaaggaacaaataaagcattccaaagatcatgtggaagaagaagtgaatcctcctcttagcaaatgcaaggattgcaaatctgcaattgaagatggaatatctatcaatgcctacggttctgtttggcatcctcaatgtttctgttgccttcgttgtcgggagcctattgctatgaacgagatttcagacttaagaggaatgtatcacaaaccttgctacaaggagctccgtcatccgaattgctatgtctgcgaaaaaaagattcctcgtactgcggaaggtttaaagtaccatgagcatccgttctggatggaaacatactgcccttctcatgatggtgatggaactcccaaatgttgtagctgtgaaagattagagcattgcggaacacagtatgtaatgcttgcagattttcgatggctatgtcgagaatgtatggacagcgcgattatggattctgatgaatgccaacctttgcactttgaaatccgtgaattctttgagggcttacacatgaagattgaggaagaatttcctgtttatttggtggagaaaaatgctctgaataaagctgagaaggaagagaagattggggatcagtgtctgatggtagtcagaggtatttgcctatctgaagagcagattgtcacaagtgtctcacaaggagtaaggaggatgttgaataagcagatactagatacggttacagagtctcaaagggttgttcgcaagtgcgaggtcactgcaattctcatcttatatgggcttcctaggttactcacaggatatatcttggcccatgagatgatgcatgcttatcttagactcaatggttacaggaatcttaacatggttcttgaagaaggattatgccaagtgttaggctacatgtggttggagtgtcagacatacgtttttgatactgccacaatagcttcttcttcttcttcttcccgcactcctctatctacaaccacatcaaagaaagttgacccatctgattttgagaagaggctggtaaatttctgcaagcatcagatagaaacagatgagtcaccattcttcggtgacgggttcaggaaagttaacaaaatgatggcctcaaataatcacagccttaaggataccctgaaagagatcatcagcatttccaagactccacaatattcaaagttatga

SEQ ID NO: 2072 - DNA, 1305 bp, Arabidopsis thaliana
  Clone ID: AT_T5I7.C1.o13.tg
atggattcttcttcctcttcctcttcttcttctccttcttcttcctacggtgttgctcgtgtcagccatatctccaatccttgcatcttcggggaagttgggtcgtcatcttcgtcaacgtatagagataagaaatggaagttgatgaaatgggtgagtaaacttttcaagagtggctcgaatggtggtggtagtggtgctcacactaatcatcatcctcctcagtttcaagaagacgagaatatggtctttcctctacctccttcttctttggatgatcggtcaagaggtgcacgggacaaagaagaactcgaccgttcaatttcactttctctagctgacaacacgaagcgcccacatgggtatggttggtctatggataacaaccgagattttccaaggccttttcacggtggcttgaatccatcatctttcattccaccttatgagccttcctatcaatatagacgaagacaaagaatatgtggcggttgcaatagcgatattggatcggggaactatctaggatgcatgggcacattctttcatcctgaatgcttccgttgccattcttgtggttatgctatcactgagcatgagataccaactaatgatgctggcttgatcgagtatcgatgccatccgttttggaaccaaaagtattgcccgtctcacgaatatgataaaactgctcgttgttgtagctgcgaacgtttggagtcatgggatgtgagatattacacgttagaggatgggagaagtttgtgtttagaatgtatggaaaccgcgataaccgatactggagaatgtcaaccgctttaccacgctataagagactattacgaaggaatgtacatgaaacttgatcaacagattcctatgcttcttgttcaaagagaagctctcaatgatgctatcgtaggagagaaaaacgttcttagaagaccgagacttggtgctcaccgtcttgttgggtttaggaaccttaaccctgaggtagaggaaggaatctgccaagtcctctcttacatgtggcttgaatctgaagttctctcagatccttcaacaagaaacttgccttcaacatcatcggtggccacatcatcatcatcatccttctcgaacaagaaaggaggaaaatcaaacgtggagaagaaacttggagagttctttaaacatcagatagctcatgatgcgtctccagcttatggaggaggtttcagggcagcaaatgcagcggcttgtaagtacggtcttcgtcgaacactcgatcatatccgcttaactggaacttttcctttgtga

SEQ ID NO: 2073 - DNA, 870 bp, Arabidopsis thaliana
  Clone ID: AT_F28P22.C1.o7.tg
atgggaaaccagaaactaaagtggacggcggaggaagaggaggcgttactcgccggaatcagaaagcacggtcctggaaagtggaagaatattctccgggatccagaattcgctgatcagctcatccatcgctccaacattgacctaaaggataagtggcgtaacttgagtgttccccctggtactcaaagtttaactaataaggcacggccagcaaaagtcaaagaggaaggcgacactccggctgcagatgcaaatgatgctgtcactattccacggcctattcctactattccacctcctcccggtcggcgtactttaccttctgagttgatccctgatgaaaatacaaagaatgctcctaggtatgacggggtgatatttgaagctctctctgctttagccgatggtaatggatctgatgtcagttccatttatcatttcattgagcccaggcatgaagtaccgccaaattttagaagaatccttagtacaagactgaggaggcttgcagctcagagcaaacttgaaaaggttagcaccttcaaatctatacagaacttctataagatacccgatccatcaggaacaaaaataggtgtcccaaaaccaaaggagacacatacgaagctgcgccaagcaaacaatcagacctctgctgattcacaacagatgatcgaggaagctgcaataaccgcagcctgtaaagtcgtagaggcggagaataaaatagacgttgccaaactagcagcagaagagtttgagaagatgacaaagattgcagaagaaaatagaaaactcctggtcatagctactgagatgcatgaactatgtaagaaaaagccagactcttttctcattattggctaa

SEQ ID NO: 2074 - DNA, 750 bp, Arabidopsis thaliana
  Clone ID: AT_F20D21.C1.o6.tg
atggtttctggagatacaaaatcggatgcgaacaacgttacttatggagaccttccttcttctccagcggctacggattcttcagaaccttcttcctatgctgaacagcttgaaaggctcatgatgatagattcagaagaagaccggggtccctctgggtttacgactgatgaattgatctttcaggctttagaaacagtctacgagaatcataatggtcttgatgtcgatgcgattttcacttttatcaaggaaaggaacgagttacaggaagattttagggagcggttggaaaaccagctgagatatctagtttctgaaggccaagtatacaaggtaggaaacctctacaagatcccccgtggtgtatttgatactccagttgtgtcagtaggagattcaaatcaaagagaaaccatggatccagaagattccacgggcacaaaggcacaagacacaccaagtacttgtgcttctttcgcaccaccaacaacagaagtagatcctcggataatcgcattagcaaaagaagtcgcagaggcagaacacttggagttggaagcaaaagaggcatacgaacttgcagataaacacgcccagttgctaaaattagaaagcaacataaccttgcagttagccgtgctaacggtgaaaagattttcctgctgtaaaagctttgaccttctggtccggttcaaggtggatatattcgatcaccggtttctttttagtgtttttggttttgagtaa

SEQ ID NO: 2075 - DNA, 1284 bp, Arabidopsis thaliana
  Clone ID: AT_MBG14.C1.o3.tg
atgtttcagttatctccacatgtttcaatgccccaccctccttactccgaaatgatttgcgctgcgattgcggcgttaaacgaaccggatggttcgagcaagatggcaatttcgagatacatcgagagatgttacaccggtttaacttctgctcatgctgctttgttgactcaccatctcaagactttgaagaccagtggtgttctttctatggttaagaaatcttacaaaattgctggttcttctactcctcctgctagtgtagctgttgctgctgctgccgccgctcaaggtctcgatgttcccagatctgagattctccattcaagtaacaacgatcccatggcttctggctctgcttctcagcctctgaaacgaggtcgtggtcgtcctcctaagcctaaacctgaatctcaaccacaaccactacagcaacttccaccgaccaatcaagtccaggctaacggacagccaatctgggaacagcagcaagttcaatcacctgttccggttccgactccggttacagagtcggcgaagagaggacctggtcgtccaaggaagaacggttctgctgctcctgctactgcaccaatcgttcaagcttcggttatggctggaattatgaaacgtagaggtagaccaccgggtcgtcgagctgctgggagacagaggaagcccaaatccgtttcttctactgcctctgtgtatccttatgttgctaatggtgctagacgcagaggaaggcctaggagagttgttgaccctagcagtattgttagtgttgctccagtaggtggtgaaaatgtggcagcggttgcgccagggatgaagcgtggacgtggacgaccacctaagattggtggtgttatcagtaggcttattatgaagcctaagagaggacgaggacgtcctgtaggtagacccagaaagattggaacatcagtcacgactgggacacaagattctggagaactcaagaagaagtttgatatttttcaagagaaagtgaaagaaattgtgaaggtgttgaaggatggagttacaagtgagaatcaagcagtggtgcaagccataaaagatctggaagcactaacagtgacggagaccgttgagccacaagttatggaagaagtgcagccagaggagactgcagcaccacagactgaagctcaacaaactgaagctgctgagacacaaggaggacaagaagaaggacaagaaagagaaggagaaacacagacccagacagaagcagaggcaatgcaagaagctctgttctga

SEQ ID NO: 2076 - DNA, 1440 bp, Arabidopsis thaliana
  Clone ID: AT_T1N15.C1.o22.tg
atggatccttctctctctgcaaccaatgatcctcatcatcctcctcctcctcagttcacatctttccctcctttcaccaacaccaaccccttcgcctctccaaaccaccccttcttcaccggacccaccgccgtcgcgccgccaaacaacatccatctctatcaagcagctcctccgcagcagccacaaacatctccagttcctcctcatccatctatttcccaccctccttactctgacatgatttgcacggcgattgcagcgttaaacgaaccagatgggtcaagcaagcaagctatttcgaggtacatagagagaatttacactgggattcctactgctcatggagctttgttgacacaccatctcaagactttgaagaccagtgggattcttgtcatggttaagaaatcttacaagcttgcttctactcctcctcctcctcctcctactagtgtagctcctagtcttgaacctcccagatctgatttcatagtcaacgagaaccaacctttacctgatccggttttggcttcttctactcctcagactattaaacgtggtcgtggtcgacctccaaaagctaaaccagatgttgttcaacctcaacctctgactaatggaaaactcacctgggaacagagtgaattacctgtctctcgaccagaggagatacagatacagccgccacagttaccgttacagccacagcagccggttaagagaccgccgggtcgtcctagaaaagatggaacttcgccgacggtgaagccagctgcttctgtttccggtggtgtggagactgtgaaacgaagaggtagacctccgagtggaagagctgctgggagggagagaaagcctatagtagtctcagctccagcttcagtgttcccgtatgttgctaatggtggtgttagacgccgagggagaccaaagagagttgacgctggtggtgcttcctctgttgctccaccaccaccaccaccaactaacgtagagagtggaggagaggaggttgcagtcaagaaacgaggaagaggacggcctcctaagattggaggtgttatcaggaagcctatgaagccgatgagaagctttgctcgtactggaaaacccgtaggaagacccagaaagaatgcggtgtcagtgggagcttctggacgacaagatggtgactatggagaactgaagaagaagtttgagttgtttcaagcgagagctaaggatattgtaattgtgttgaaatccgagataggaggaagtggaaatcaagcagtggttcaagccatacaggacctggaagggatagcagagacaacaaacgagccaaagcacatggaagaagtgcagctgccagacgaggaacaccttgaaaccgaaccagaagcagagggtcaaggacagacagaagcagaggcaatgcaagaagctctgttctaa

SEQ ID NO: 2077 - DNA, 900 bp, Arabidopsis thaliana
  Clone ID: AT_K9I9.C1.o15.tg
atgggtgcaccaaagcagaagtggacaccggaagaagaagcagctcttaaagctggagttcttaagcatgggactgggaagtggcgtaccatactctcggatactgagtttagtttaatccttaagtctcgctctaatgttgatcttaaggacaaatggagaaatataagcgtgacagctttatggggttcaaggaagaaggctaaacttgcgcttaagaggactccaccaggtactaaacaggatgataacaacacagctcttaccattgtggctttgactaatgatgatgaacgtgcaaaaccaacttcccccggaggttctggtggtggatcaccacgcacttgtgcttctaagagatcaattacaagtttggataagatcatctttgaggcaattaccaacttgagggaactacgcggttctgacagaacatcaatctttctgtatatagaggagaatttcaagactccaccgaatatgaaaaggcatgtcgcagtacgattaaagcatttatcatcgaatggaacattagttaagataaagcacaagtacaggttttcttctaattttattcccgcaggtgcaagacagaaggctcctcaactctttctggaaggaaacaacaagaaagacccaacaaaacccgaggagaacggtgccaacagtctcactaaattccgagtagacggtgaattatatatgataaaaggcatgacagctcaagaagctgcagaggctgcagcaagagcagttgcagaggcagaatttgctatcacagaggctgaacaagcagcaaaagaggcagaaagagcagaagcagaagctgaagctgctcagatatttgcaaaggcagccatgaaagctttgaagttcaggatccgtaatcatccttggtga

SEQ ID NO: 2078 - DNA, 594 bp, Arabidopsis thaliana
  Clone ID: AT_F20D21.C1.o8.tg
atgagcaatgatgctaggtatgatgcgatggtttttgaggctgtatcaacaattaatgatgaaaatggttccaatctcaaagagattctcagatttatcgagggacaacatgaggttccacaaaactttaagaaactgttgagttatagcctgggaatccttgtttctcaagacaaactcaaaaaggtacgaaatcgttacaaaatctcagttacgaaagcaattaagccaacactcaccctgcgtccaaaagattccacgaagccaccagagttaccaaactggtacgaggagcaacaagactttaggatgtttttgagtgagtgcctgataattctcgtttctcaaggcaaactggaaaaggtattggatcgctacaagatatcagaattagaaaacaaagtgttggaagtagcaccagaagttgtagcaatgaaactagcagagtcagataacaaaaggttgatagcagcagaggcagtcgaagaagaagaacgaatgcacaagttagtagaagaaagccacacgatgcttcaattatgcttagagatccaccaacaatgtgctcttggccaagaggttgttctactgtaa

SEQ ID NO: 2079 - DNA, 318 bp, Arabidopsis thaliana
  Clone ID: AT_MFH8.C1.o14.tg
atggataacactgaccgtcgtcgccgtcgtaagcaacacaaaatcgccctccatgactctgaagtgagcagtatcgaatgggagtttatcaacatgactgaacaagaagaagatctcatctttcgaatgtacagacttgtcggtgataggtgggatttgatagcaggaagagttcctggaagacaaccagaggagatagagagatattggataatgagaaacagtgaaggctttgctgataaacgacgccagcttcactcatcttcccacaaacataccaagcctcaccgtcctcgcttttctatctatccttcctag

SEQ ID NO: 2080 - DNA, 1173 bp, Arabidopsis thaliana
  Clone ID: AT_F7H2.C1.o6.tg
atggaagtgatggacaaatgggtagctgaatttttcctccgacgccaactaaatcctagggtttacgcttttccactgttatcggctctgaaaccagtagattccgacgactgtgtaaaactcaagctaactgctgttttgcgggatatctccaattccatgattcaaggtaccgtagacgaaggaatgcttgatctcctcgaaattcttgagaagcttctgttacaggaacattcggttatcatgggatctctcaaatctgcgtattgctggactgctgtggaatgcacgcttaggtttatgtggccagtgaatgcttcggatggcttcttcggtgatgcccttgagaggatttggaggaatcggattgggacattgaaggagaaagagagcgacttggtgactcgtgagttgttgaaatgggagagtgatctaaacaaggcgtttgaggaacctgagatttaccagaagattcgtgagactaacatcaggtacaatgccatctctcatcttaatcagcttctcaaagagcagtgggcactacttggatgttcttctcttgaatcagaagctcgaaagaggtttcttaagcgtaaggattcaccatatgcttcccggagaggaggtaatagagagaaagctaatgatgttgaagaagtgggtggtgtggagaatcctgatggggttggtaaggtgaatgaacatgaacaggaacacgagccaagtcttaataagggggaaatgttggtagctcgagagcttaaggattttttgttggagattcaaagactcatcgaccctataacaaggcaagatcaagaacctaacaatgcaatggagcattcagttgatgtcactcctcagcctgatggggcaaataggactgatgcagaagatagtgagggaacatcatcgtctagaagagtcaggcctcatctaccaaccccggaacctctgaatgtatcaccgttgaagaaaggaagattagaaagaccgcgtcccagaaggccaatgaaattctggacttctgaagaagtggcagctttgagggaaggagttaaagaatatggaaaatcatggaaagatatcaagaattcataccctgttgttttcgctgataggagcgaggtggatttgaaggataagtggaggaatttacttggtcgtcagtag

SEQ ID NO: 2081 - DNA, 1638 bp, Arabidopsis thaliana
  Clone ID: AT_T22F8.C1.o60.tg
atggatttagattttgatgatcaaccctcggatcatgctgcaccagcagatgctttaccttctgagactaatgtgccggatagtggaagtattaacaaatctaccattggaacattatcagaagagaatgaagatgcattcccaagaggggttcattggtctgtgaaaccatctattcttcgtgcttgtaataacgtgaatttggtgggaaatagacgtgatgatggcatagaggcgacgacttcatttcctgatgatcctagaacacaagattctgcaatatttggagattatgttactcctgaaaccggggcagacgagggtcgtgtggacatggaaactcttgatattgtacaggaggaaggcaccaccagttcatatgtgcaacatactggaaagttgcaaccaaaacctagattactcgagactgtggttgaagaacctgagcctcattactccgctggtgatactggttattttccaatgggtacgaacgagtctgagtttatggccaatgtggaatcaagaaacggtttcagtacttatgaagatcttcaagaagaagaacttaatattcctgaagcccccagagaaacggttggtgagatggaggcgcaaaatgcttctggcggatgggaacaagaagaacagggtgtatcgccttgcattaacaatacagttacaggagaagaagaaaattgtatggggaatacagtagaagaacagtctaaaagagaaagcaaaactggaaaatcgaagcgagctacttctcgaaagcggaaaaagacaagtgaagaaccaaataagtctagcgaaaaaacagagcagaagaagttcaagcattcaagtcgtcgacaaaaaagaacactggagaaggaattgcttgaaaccccggatcatgaaatcagatctctgcctcttagagatatgcttcgccttgtcgaatataaagaatggatgcagaaaaaggaagcaaagggagctggtgtgcaacctagccaagaaagtaataatatgaacggatcagggagccagtatcattctcaaggttttgacgaagaagatgaatttggtgactttggtatagagtcgagcgaatatcaagaaaataatgtagttaaaccggattcaccggttaactatcaaacctacatgaacaagacttcaagaactcgatggtcaaaggaagatacagaactcttctatgagggtattcaagagtttgggagcaatctctcgatgatacaacagctgtttcctgagagaacgcgtgaacagatgaagctcaaattcaaattggaggaacgccgaaatccattgaagcttaatgatgcattatcaagtcgctcaaaacattttactcatttcaagaacgtgattaagaagcttcaacaagaagccgcggctgcaaaagaaggcgaagaagaagaagaagctggagcagaagcagagacaactgatgttcccgagaatgaggagcctgagaagtctgaggagacggagcgagccagtgatggagtagcagctggagttaaggaatcggacggtggggatgttgagaatggcgtgagatcggacggtggagatgaatgcgacgatgatgaagatttttggaattcttataagagtgacatgtaa

SEQ ID NO: 2082 - DNA, 1056 bp, Arabidopsis thaliana
  Clone ID: AT_F21E1.C1.o20.tg
atgcctccagaaacttttataggtagaggagtttcttctggtggtgctgcaaaacacgactctgacaggtgtttcaagattggacgaaaacagaaactggtgactccttatggcatgccagtgccaaagagtcctctttaccagccaaaagacattgtctgggtggctctgacaggtatctttatctcttgccagaacaaaaggacatgggaacagccttggagtgatgatgcagtctctacagctccaggagagtcttcagagaatactagtggttcaagttttgagaagaaaagcaagaaacccaagtcttctgtttcgtcctcgcatctctgtttttcttcacgacaatctgctgatgatgcaaactcaccaagccctaaagatgttagcaacaagactcccaaagatgtaacccatgggtccaataaagatgttagcaacaagacgtccaaagatgtaataacccatgggtccaataaaacaagaccagctatcccgatcggtccaaggttccaagctgaaataccggtttggattgcccctaccaagaagggaaaattctacggtagccctggagattccaatactctaagatggcttggaactggtgtttggccaacatatagcctaaagaagacagttcactccaaaaaagttggcgaaggaagatccgactcttgttcttgtgcttctccgaggtcaaccaattgcataaaacgacacaagaaagaagcacaggagcttttggaaaaggaaattaaccgtgctttctctacatgggaatttgatcaaatgggtgaagaaatagtgttaaagtcgtggacggccaaagaagagcgaaggtttgaagctcttgtgaaaaagaatcctttgtcaagtagtgatggattttgggaatttgcttctaatgccttcccccaaaaaagtaagaaggatctgctcagttactactacaatgttttcctcatcaaacgcatgagattgcttaagtcttccgctgctaacaatatcgatagcgatgatgaccactatgacgatttcttagcaggatga

SEQ ID NO: 2083 - DNA, 1704 bp, Arabidopsis thaliana
  Clone ID: AT_F21M12.C1.o10.tg
atggttgctaataataatactagtagcaatcgcaggaagagaatcattactgaaggcgacatcgccactcttttgctgagatatgatatggagacgatactgagaatgctacaggagatatcttattgttccgaaaccaagatggactggaatgcgttggtgaagaagaccactaccggaattactaatgctagagagtaccagttgctatggcgtcatctttcttatcggcatcctctcctccctgtggaagatgatgctctacctctggacgacgatagtgacatggagtgcgaattggaagcttctcctgcagtcagccatgaagcatcagtggaggctattgcacatgtcaaagtgatggctgcttcatatgttctaagtgagtctgatatactcgacgattcaacagttgaggctcccttgactataaacataccttatgctttgcctgagggttctcaggaaccatcagagtctccttggtcgtcaagagggatgaatatcaactttccggtctgtcttcagaaagttacatctaccgaggggatgaatggaaatggttcagctggtattagcatggcttttcggaggaaaaggaaaagatggtctgctgaggaggatgaggagctgttcgccgctgtaaagcgatgtggtgaagggaactgggctcatattgttaagggagactttagaggagagagaaccgcctcccaactctcgcagactgcattttatgcaggtcttatgccaacgacgtcatcttgtaccatcacagaaacggaagcgaatgggggaagttcttctcaaggtcaacaacagtccaaaccaattgttcaagcattgcctcgggcaggaacatcacttccggctgcaaagtctcgagttgttaaaaaaacaacagcaagctccacttccagatcggatcttatggtaacagctaattcagtagctgcagctgcatgcatgggtgatgtattgactgctgcatcaggacgaaaggtcgaacctggaaaaactgatgctccacgagtgccaaagactaaacctgtaaaacatgcttctacagtctgcatgcctcagccctcaggtagcctctccatgccaaaggttgaaccaggaacgagtgttgccgcctctatacggtctctagctaatggaaaattgaaacctgttatggcttcatcatcttccaacaaacctcctctcatagctcctcgttcagaaggatcttcaatgctttctgcttccgcccccttggcttctctatcaaggattgtctccaatcagagagtttttgcaggctctgtcccagctactgagattgtcacttgcaaaccagatggtggacagaaagggcaagctcgtggaaatgaagcaagctcatcggctgcaatccagccacatcaaataacctcaagaaacttggagattagccagggaaagcaggctacacaggctcagtcccctaatctcttgcctaggaaagttccagtagttcggactgcagttcattgtgccactaaccaaaagttgatggataaaccatctgatcaaactgtagtacctatcagaggagctggttcgcaatctaaagccaaaggtgaagtaaacagtaaggttggtccggtgatcaaagtgagtagtgtttgcggaaaaccccttgaggttgcaactgtggcagggaccggacagggtgtttag

SEQ ID NO: 2084 - DNA, 5526 bp, Arabidopsis thaliana
  Clone ID: AT_K7P8.C1.o15.tg
atgcatggaagcgtttcaggatatcttctagtaaatgctgaggttgattccatgggaggagttatcgatagtggaggtggtattggtgttaaaacatctccgcgccgaacagctattgagaaggctcaagcggagctaagaacttatgatgacaagcctttactcttctatctgcttcagggcggtaatcccttggatttcaagtttggtattgcaacttcacatagcgtccaatctacatcactcacagatcagcaagcagagcattttgtaaacagtgaagtcaaagatagttttgccctgactgcctcaccacatggtgactcggtggagagtagcggtagacctggagttcctacaatttctgaacccaatacagcagataatcttttactgtttgattctgaaaacaagtcagttgaaggggaaagaaatttgagacatcctaataggcaaaacagaacttctgagtcagaacgatcttccaaagcacacaccaaccagaataccaaagaaacagaagattctgccatctttcgcccgtatgctcggaggaacagatcgaagataagtcgggatccagcacggtcaagctctacggatttagttcagaatcgtggtggtcttgcaacgtctatatctattcgcagaggatcagtggaaggaaagggttgcattcccgaagcagccaatcaaaaggatatgcatacaacttctgtatcttgtccagtatttgcaaattcaaatggtaatatcgttccgaaaaatagagtttccagcaattcgctgaatactaaggtggatggtgaacctgttgtacgagagagtactgctggatccaagactagtctattgaaagatgaagccgacatttcgtatagtaaaagctctgcatatttgccagttggagagtctggccttgctggggagaaggcacaactagtttcgactggtggttctcccaaagctgcaacaatagctggccagaaaaatagttctacccaactgaatggcctaagagattccacggtagaggaagaaagcttaacaaatagaggagctacagggactaatgggttagagtcagagtcttctcatgcgaacaacgtagaagtaaatgtagataatgaaagagatctttataaagtggacaaacttgactctgatgaaatctctatgcagaagactttgagagtagaggggttactagatcaaacagttggtgaaatgaccaaaactaagattgaagatgagacaggtcaatctaccaccattatcagtgagtgcattcctgaatgtgaaatgcagatgaaatcggttaaaattgaaaatcaaagtcacagaagtacagctgagatgcaaactaaggagaaaagttccgagactgagaaaaggcttcaagatgggttggttgtactcgaaaatgacagtaaagttggtagtattttatctgaaaatcctagcagcacgttgtgctctggaattcctcaggcatctgtagacacaagttcttgcacagttggcaatagtttattgtcaggaactgacattgaagcattaaaacatcagccgagctcagatgcagttatgttagatactgtcaaggaggacgctattcttgaggaggcccggattatacaggcaaagaaaaaaagaattgccgaattatcttgtggtactgcaccagtggaggtccgtgagaaatctcaatgggattttgtcctcgaagaaatggcatggctggcaaatgattttgcgcaggagcgcctttggaaaatgactgctgccacacaaatttgccatcgagttgctttgacttgtcagttgagatttgaggaacgaaatcagcacagaaagctgaaaaaaatagcttcagtcctatcttatgctattttacaattctggagttctgtggaggccgaggttcctggggagctggaggagacgagcttgggaattgttaaggagacctgccaagaatctaattgtttgaatggcataagatgtttagctgcgggtgtcaaggaatatgcaagtagatttttgaagtacaacaactcttccatctcctatcattcagctgcactgtcaacacctgacaatatgtgcgacccagaaatattggatatatctatggttgatcagcttacagaagcaagcctcttttattcagttccatctggtgcaatggaggtgtaccttaagtccattgagtcgcatcttacacgttgtgagaagtctggaagtagcatgcaggaggaggttgatacatcagcctatgatactgctggagatataggatataatgttactgcgttcgatgaggatgaaggagaaacaagtacctattatcttccgggagctttcgagtctagcagatcatttaatataagccacaaaaaaaggaagaatctgatgaagtctcattctgcccggtcatatgatcttggggacgatttaccatacgtcaacaacacaggtggctctaactcatcaagtttgatagtaaaaaggcctgacagtaatattaatgccggctcagttccgacaaggcgagtgcgcactgcttccaggcatagggttgtgagtccttttgggtgtgctactactgggaatttaccagtgccctcgaagacagatgcgtctagtggggatactagttctttccaggatgagtatagtagtttgcatggtggatcggcagtccaaaaaggcacagaggttgagtcaagtgttaattttgaaaagctgttaccttatgacatggctgaaacctcaggaaaacctaaaaagaaaaagaagactcatcagggctccgcatatgaccaaacttggcatctcaatccgtcagtccatgttgaacagaaggaccactggaagaagcgaccagagaataatttcgatatgaatggtctgtatggtcctcatagtgcaaagaagcaaaagaccaccaagcaattggtagagaataattttgatatggctattcctcacactggatcgattccttctccggctgcttcccagatgagcaatatgtccaaccccaacaaatctatcaaatttattggaggtcgtgataggggcagaaaaataaaaggcctgaagatttctcctggtcagcatggttctggaaatccatggtcactatttgaggatcaggcgcttgttgtcctggtgcatgatatggggcctaactgggagctcattagtgatgcaatgaacagcactcttaaaattaagtatatatatcgcaatccgactgagtgcaaggaccggcataagattctgatggataaaactgctggtgatggggctgatagtgcagaagattcagggaattctcagtcttatccatccactttgcctggcataccaaagggaagtgcgagacagttgtttcaacgactgcaagggccaatggaggaagataccctgaagtctcattttgagaagatttgtttgattgggaagaaattacattatagaaagacacagggaacgccagtgctccctacttctggagcacatccatccactcctggatcatctggtgttgttctgagcaacaatttgccaaccacatctggcctacagagtgcttctgtcagggatggtagattcaatgttcctagagggtctttgccacttgatgaacaacaccgactacaacaatttaatcaaacgttatctggtagaaacctgcagcagccctccttatcaactcctgcagctgtctcaggatctgatcgtggacatcgcatggttcctggtggaaatgctatgggtgtaagtggaatgaacaggaacacacccatgtcaaggcctggttttcaagggatggcctcagcagcaatgccaaatactggtaatatgcatacctctggcatggtaggaattccaaacactggaaatattcattccggaggaggagcttctcaaggaaactccatgatcaggcctcgtgaagctgtgcagcatatgatgcggatgcaggctgctcaagggaacagtccggggatcccagctttcagtaatttgagttctggatttaccaaccagacaactcctgttcaggcgtacccaggccatctttcccagcagcatcagatgtcaccgcagtcacatgtgcttggcaactcgcatcatcctcatctccagagcccaagtcaagccactggggcacagcaggaagcatttgctatccgtcaaagacaaattcaccagaggtatttgcagcaacagcaacagcagtttccagcatctggttctatgatgccacatgtacaacaacctcagggctcttctgtttcttcttcttcacaaaacagtcctcagactcaaccacctgtttcgccccagccattatccatgcccccggtgtcgccctctcctaatattaatgctatggcacaacagaaacctcaaaaatctcagttggcgcttcatggtttgggtaggagtcctcagtctggtacttctggagtgaacaatcaagctggaaaacaaaggcagcgacaacttcagcagtctgcaagacagcatccacaccagcggcagccaacacaaggtcaacagctgaataaacaactgaaggggatgggtagaggcaacatgatccatcagaacatcactgtcgatcagtcacacctgaatggccttaccatgccccaaggaaatcaagctaccgaaaaaggagagatagcggtttcagttaggcctgatcagcagtctagtgtggggactaccacgagcacggatctgcagtctaaaccatttgtttctcccttgtcttcaaatcattcacagcaactgccaaaatcattccctggtgctttgtctccatcccctcaacaacagatgcaattacattcagacaatagcatccaaggccagagctcacctgcgaccccatgtaatattttatccacctctagcctgtcaattgcaccagcggttgcaccttctaaccatcagcatttgttgatacaccaaaagcagcgcaatcaagtgcaatcaacagctcagagagttgttcaacataatcatctagggaactctgagttatcaaagaagtcccaagctgaatgtatgccacgtgttccacagtctgtaaccaataccacccaaactgctagtatgggtacgaccaagggtatgcctcaagcgagtaatgatttgaaaaacataaaagcagttggttctactgcggtgcctgctttggaacctccatcttgtgttgcttctgtgcaaagcactgcttcgaaagtagtaaacaattccaatacagattcagcaggaaatgatccagtatcaacaccgaaccaaggactagctcaaaagcacgggatcaagggcgttacacagagacaacaacagtctctaccttcagaagaaaagagaccgaaattgccagagaagccgactgtacaaaatcagaaacaccttgcttctgaggagcagcctcatttagaagaagcacaagaattatcatcttccaagcctcctgatacaaaagtggaatga

SEQ ID NO: 2085 - DNA, 5532 bp, Arabidopsis thaliana
  Clone ID: AT_K7P8.C1.o16.tg
atgcatggaagcgtttcaggatatcttctagtaaatgctgaggttgattccatgggaggagttatcgatagtggaggtggtattggtgttaaaacatctccgcgccgaacagctattgagaaggctcaagcggagctaagaacttatgatgacaagcctttactcttctatctgcttcagggcggtaatcccttggatttcaagtttggtattgcaacttcacatagcgtccaatctacatcactcacagatcagcaagcagagcattttgtaaacagtgaagtcaaagatagttttgccctgactgcctcaccacatggtgactcggtggagagtagcggtagacctggagttcctacaatttctgaacccaatacagcagataatcttttactgtttgattctgaaaacaagtcagttgaaggggaaagaaatttgagacatcctaataggcaaaacagaacttctgagtcagaacgatcttccaaagcacacaccaaccagaataccaaagaaacagaagattctgccatctttcgcccgtatgctcggaggaacagatcgaagataagtcgggatccagcacggtcaagctctacggatttagttcagaatcgtggtggtcttgcaacgtctatatctattcgcagaggatcagtggaaggaaagggttgcattcccgaagcagccaatcaaaaggatatgcatacaacttctgtatcttgtccagtatttgcaaattcaaatggtaatatcgttccgaaaaatagagtttccagcaattcgctgaatactaaggtggatggtgaacctgttgtacgagagagtactgctggatccaagactagtctattgaaagatgaagccgacatttcgtatagtaaaagctctgcatatttgccagttggagagtctggccttgctggggagaaggcacaactagtttcgactggtggttctcccaaagctgcaacaatagctggccagaaaaatagttctacccaactgaatggcctaagagattccacggtagaggaagaaagcttaacaaatagaggagctacagggactaatgggttagagtcagagtcttctcatgcgaacaacgtagaagtaaatgtagataatgaaagagatctttataaagtggacaaacttgactctgatgaaatctctatgcagaagactttgagagtagaggggttactagatcaaacagttggtgaaatgaccaaaactaagattgaagatgagacaggtcaatctaccaccattatcagtgagtgcattcctgaatgtgaaatgcagatgaaatcggttaaaattgaaaatcaaagtcacagaagtacagctgagatgcaaactaaggagaaaagttccgagactgagaaaaggcttcaagatgggttggttgtactcgaaaatgacagtaaagttggtagtattttatctgaaaatcctagcagcacgttgtgctctggaattcctcaggcatctgtagacacaagttcttgcacagttggcaatagtttattgtcaggaactgacattgaagcattaaaacatcagccgagctcagatgcagttatgttagatactgtcaaggaggacgctattcttgaggaggcccggattatacaggcaaagaaaaaaagaattgccgaattatcttgtggtactgcaccagtggaggtccgtgagaaatctcaatgggattttgtcctcgaagaaatggcatggctggcaaatgattttgcgcaggagcgcctttggaaaatgactgctgccgcacaaatttgccatcgagttgctttgacttgtcagttgagatttgaggaacgaaatcagcacagaaagctgaaaaaaatagcttcagtcctatctaatgctatcttacaattctggagttctgtggaggccgaggttcctggggagctggaggagacgagcttgggaattgttaaggagacttgccaagaatctaattgtttgaatggcagaagatgtttagctgcgggtgtcaaggaatatgcaagtagatttttgaagtacaacaactcttccatctcctatcattcagctgcaccgtcaacacctgacaatatgtgcgacccagaaatattggatatatctatggttgatcagcttacagaagcaagcctcttttattcagttccatctggtgcaatggaggtgtaccttaagtccattgagtcgcatcttacacgttgtgagaagtctggaagtagcatgcaggaggaggttgatacatcagcctatgatactgctggagatataggatataatgttactgcgttcgatgaggatgaaggagaaacaagtacctattatcttccgggagctttcgagtctagcagatcatttaatataagccacaaaaaaaggaagaatctgatgaagtctcattctgcccggtcatatgatcttggggacgatttaccatacgtcaacaacacaggtggctctaactcatcaagtttgatggcaaaaaggcctgacagtaatattaatgccggctcagttccaacaaggcgagtgcgcactgcttccaggcagagggttgtgagtccttttgggtgtgctactactgggaatttaccagtgccctcgaagacagatgcgtctagtggggatactagttctttccaggatgagtatagtagtttgcatggtggatcggcagtccaaaaaggcacagaggttgagtcaagtgttaactttgaaaagctgttaccttatgacatggctgaaacctcaggaagacctaaaaagaaaaagaagactcatcagggctccgcatatgaccaaacttggcatctcgatccgtcagtccatgttgaacagaaggaccactggaagaagcgaccagagaataatttcgatatgaatggtctgtatggtcctcatagtgcaaagaagcaaaagaccaccaagcaattggtagagaataattttgatatggctattcctcacactggatcgattccttctccggctgcttcccagatgagcaatatgtccaaccccaacaaatctatcaaatttattggaggtcgtgataggggcagaaaaataaaaggcctgaagatttctcctggtcagcatggttctggaaatccatggtcactatttgaggatcaggcgcttgttgtcctggtgcatgatatgggccctaactgggagctcattagtgatgcaatgaacagcactcttaaaattaagtgtatatatcgcaatccgactgagtgcaaggaccggcataagattctgatggataaaactgctggtgatggggctgatagtgcagaagattcagggaattctcagtcttatccatccactttgcctggcatcccaaagggaagtgcgagacagttgtttcaacgactgcaagggccaatggaggaagataccctgaagtctcattttgagaagatttgtttgattgggaagaaattacattatagaaagacacagggaacgccagtgctccctacttctggagcacatccatccactcctggatcatctggtgttgttctgagcaacaatttgccaaccacatctggcctacagagtgcttctgtcagggatggtagattcaatgttcctagagggtctttgccacttgatgaacaacaccgactacaacaatttaatcaaacgttatctggtagaaacctgcagcagccctccttatcaactcctgcagctgtctcaggatctgatcgtggacatcgcatggttcctggtggaaatgctatgggtgtaagtggaatgaacaggaacacacccatgtcaaggcctggttttcaagggatggcctcatcagcaatgccaaatactggtagtatgctttcctctggcatggtagaaattccaaacactggaaatattcattccggaggaggagcttctcaaggaaactccatgatcaggcctcgtgaagctgtgcagcatatgatgcggatgcaggctgctcaagggaacagtccggggatcccagctttcagtaatttgagttctggatttaccaaccagacaactcctgttcaggcgtacccaggccatctttcccagcagcatcagatgtcaccgcagtcacatgtgcttggcaactcgcatcatcctcatctccagagcccaagtcaagccactggggcacagcaagaagcatttgctatccgtcaaagacaaattcaccagaggtatttgcagcaacagcaacagcaacagcagtttccagcatctggttctatgatgccacatgtacaacaacctcagggctcttctgtttcttcttctccacaaaacagtcctcagactcaaccacctgtttcgccccagccattatccatgcccccggtgtcgccctctcctaatattaatgctatggcacaacagaaacctcaaaaatctcagttggcgcttcatggtttgggtaggagtcctcagtctggtacttctggagtgaacaatcaagctggaaaacaaaggcagcgacaacttcagcagtctgcaagacagcatccacaccagcggcagccaacacaaggtcaacagctgaataaacaactgaaggggatgggtagaggcaacatgatccatcagaacatcactgttgatcagtcacacctgaatggccttaccatgccccaaggaaaccaggctactgaaaaaggagagatagcggttccagttaggcctgatcagcagtctagtgtggggactaccacgagcacgaatctgcagtctaaaccatttgtttctcccttgtcttcaaatcattcacagcaactgccaaaatcattccctggtgctttgcctccatcccctcaacaacagatgcaattacattcagacaatagcatccaaggccagagctcacctgcgaccccatgtaatattttatccacctctagcccgtcaattgcaccagcggttgcaccttctaaccatcagcatttgttgatacaccaaaagcagcgcaatcaagtgcaatcaacagctcagcgagttgttcaacataatcatctagggaactctgagttatcaaagaagtcccaagctgaacgcatgccacgtgttccacagtctgtaaccaatactacccaaactgttagtatgggtacgaccaagggtatgcctcaagcgagtaatgatttgaaaaacataaaagcagttggttctactgcggtgcctgctttggaacctccatcttgtgttgcttctgtgcaaatcactgcttcgaaagtagtaaacagttccaatacagattcagcaggaaatgatccagtatcaacaccgaaccaaggactagctcaaaagcacgggatcaagggcgttacacagagacaacaacagtctctaccttcagaagaaaagagaccgaaattgccagagaagccgactgtacaaaatcagaaacaccttgcttctgaggagcagcctcatttagaagaagcacaagaattatcatcttccaagcctcctgatacaaaagtggaatga

SEQ ID NO: 2086 - DNA, 1173 bp, Arabidopsis thaliana
  Clone ID: AT_F4H5.C1.o3.tg
atggcactctcgcagtggaaggaagctatactcgaagggattttcatggagattgaggatggtattgtggaagagaagaatctcgagcgattagagaatcttgtggagattttacacaaagaaggttctaaagtacccaaatcagtcacggaagcgtattgtaaagtagctgtggagtgcacagtgaagtgtctcgcttatgagaaagatgcaaaaaaggcttacaccgaagcaatcaaaacgatatggctcggtaggattatgcctttatgcgataaggttagttgtttggttactcttgacctcttgaaatgctgtcgaagattatggaaggcccacactgacgacaaggcttgtaagacactgatggatgaagatacaagagacaaagctttggtttgtttgaggaaggttgttttagatttgaatcccaatcttgttttagagaatctcaacatggatgaatcggatgagattgaatctagtgaagaatctgaagagacagaatcaatggttgaagcaagagagggcgtgggtaatcagaacagtcaggcgtctgaagctatggaagaagacgaccaagagagcctcttagatactgaactggaaagacctacttctggagggtcaaaagctgtatatgtacccagtcaattcaatcccattccatctgcagttgttgacagagcgctcagaaagctgagagctagtaaaatcgagctaatgaaagctttagaaaaaggaagaccttcaaatttaaacaatgagacgattacagaacaagaaaacgatgttgctaatccttctgcaacaaacgctgcaccaaggcctagcttgatggagccacgtagcacagcacacacttatgaatggaatgactccattgatgattcagatggagaaatgggcgatgacattgaaaggattaataaatcaaaacgtaaaagaattgtcgtgtctcctttgaaaagaaaccgatgttcagaaggtgctagaaggccaaaacttccttggagtactgcagaaacgctggccgtactcaaaggctatgaaaagtatggtgcaaactggaaacggatcaaagatgagaatccagttctagtgcgcagaactaatggtgatattaaagataaatttcgagttgagatgagacgtgaagagcgccgtcattga

SEQ ID NO: 2087 - DNA, 3168 bp, Arabidopsis thaliana
  Clone ID: AT_F22F7.C1.o18.tg
atggcaccagttaggaagtcgaggagtgtgaacaagcgtttcaccaatgaaacttccccaagaaaagatgctgggaaatcgaaaaaaaataagctacgtaagaagaaattgtctgacaagctgggacctcagtggaccagattagaacttgagcgtttctatgatgcttaccgcaagcacggacaagagtggagaagggtggctgctgcaattcggaatagcaggtctgttgacatggtggaagctctatttaatatgaatcgggcgtatttatctctccccgagggaactgcctctgtagctggccttattgcgatgatgacagatcattacagtgtcatggaagggagtggcagtgaaggagaaggccatgatgcttcagaagtaccaaggaaacaacaaaagcgcaaacgtgctaaacctcaacgtagcgattctccagaggaagtggatatacaacagtcaattggttcaccagatggatgcctcacgtttttgaagcaagcacgagctaatgttcatgtaggaactcagcgacatgccactggaaaacgtacaccacgggttcctgtacaaacttcatttatgagggatgatagagaaggctctactccaccaaataaaagagccaggaagcaattcgatgccaatgatgatgtagcacattttttagcgttagcattaacagatgcatcgagaaggggagggtctccaaaagtttctgaatcaccaaatagaagaacagaacttagcgatagctcaccgataaagagctgggggaaaatgtcgcgaaccagaaaatctcagtctaagcactgtggcagctccattttcgaggagtggatggaaagtagccgagaaaggaaacttgactctgataaagatactaccttgttgatggatatggaaagggctggcgaaatggaggctccgcggaaggggaaaagagtctacaagaaaagagtgaaagtcgaagaagcagaatgtaatgattctgatgacaatggagaagcatgcagtgccacacaagggctcagaagtaaatcacaaagacgaaaggctgctattgaagcctcaagagagaaatactcaccgcgcagcccaaagaaaagagatgacaaacatacttccggagcttttgatgccctgcaagcattggccgaattgtcagcttcaatgcttccagcaaatttgatggagtcagaattatctgctcagttgaaggaagaaagaacagaatacgacatggacgagaaatctagcacaccagaagctacttccacaagcagtcatggggaaaaagcaaatgtagagccagatgatagtctccttcatgcaatttcttctgttgagaatgctaacaagagaaagtcaaaaccttcaaggctggtatccactgattgtgatgatgttcccacagggaagctacaaccacaaactagtggcagtttaagaaaacgtaaaccaaaggtactaggggatgaagctccagcagagtttagtcagaacaaatccataaacaagaaggaattgcctcaagatgagaataatatgaagtctttggttaaaacaaaacgcgctggtcaagttccggctcagtcaaaacagatgaaaactgttaaggcgttggaggaatctgctataacaagtgataagaaaagacctgggatggatatagtagcgtcacctaaacaagtttctgactcgggtccaaccagtttatcgcagaaacctccaaacaggcgaaagaagagtctgcagaaaagcttacaagaaaaggctaaatcttctgaaaccactcataaagctgcacgtagttccagatctctttcagaacaagagttgttgttaaaggataagcttgctacttctctgtcgtttccctttgcacgtcgaaggtgcatatttgaatggttttatagtgctatcgaccatccctggttttcaaagatggagtttgtcgattacctaaatcacgtggggcttggtcacattccaagacttactcgtcttgaatggagcgtcattaaaagttctcttggtagaccacgaagattctctgagagatttttacatgaagagcgggagaaacttaaacagtaccgcgaatctgtgcgaaagcattatacagagcttcgaacgggtgctagggaggggcttcctacagatttggctcggccattagcagttgggaacagagtcattgccatccatcccaaaacacgggagattcatgatggaaaaattctcactgttgatcataacaaatgcaatgttctcttcgatgacttgggcgttgagttggttatggacattgattgcatgcctttaaatccactggaatacatgccagagggtctaaggaggcaaattgataagtgcttgtctatgaagaaagaagcacagctaagcgggaatacaaaccttggtgtgtctgtgctattccctccttgcggacttgaaaatgtcagcttttccatgaatcctcctctgaatcagggtgatatgattgctcccattctgcatggtaaagtatcaagcaacactagtagtccacggcagactaatcattcatatatcacaacttataacaaagcaaaagaagctgagattcaacgggcacaagcgctacagcatgctttagatgaaaaggaaatggagccagagatgctagaaattgtcaagggttcaaaaacaagagcgcaagcaatggtggatgcagctataaaggctgcatcatctgtgaaggaaggggaagatgtgaacacaatgatccaagaagccttagagttggttggcaaaaatcagctattacgcagctctatggtcaaacatcacgagcatgtaaatggcagtatagagcatcatcacaacccatctccttcaaatggatcagagcctgtggctaacaacgatttaaactcacaagatggttcagagaaaaacgctcaaatgccttcagagcttatcacctcctgtgttgccacttggctcatgattcagatgtgcacggagagacagtaccctccagctgatgtcgcacagcttatagacgcagcagtcacaagcttgcagccacgatgcccacagaacctaccgatctacagagaaatccaaacgtgcatgggacggatcaagactcaaatcatgtcccttgtaccaacttga

SEQ ID NO: 2088 - DNA, 699 bp, Arabidopsis thaliana
  Clone ID: AT_F7P1.C1.o70.tg
atggattcttacacttccggttttatggacttgttacaaagtcaacaagaaagctacaacaatgagaacaatccgcaattgtctgatgaagaccatgaggatgtaaacactcctaaggtggccattccaaaaaagaaatggtcagcaaaagaggatgttattcttattagtgcttggttaaacacaagcaaagaccctgtggtcgggaatgaacaaaaagctccagctttttggaaaaggattgctacttatgttgcagctagtccagaccttgttggtttcccaaagagggagtctgcacaatgtaagcaaaggtgggcgaagatgaatgagctagtcatgaagtttgtgggatgttatgccacagaaacaaaccagaaagcaagtggtcaaaccgagaatgatgtaatgctctttgccaacgagctatttgaaaatgatatgaagaagaagttcagtttggatcatgcatggaggctagtgcgacatgagcaaaagtggataatatccaatactcctaaagagaaaagaatgtcgaaaagaaggaaggttggttctcaagctaaaagttcacagcctattaatcttgaagattatgatgtaatggcccggcctctacgggtgaaggttccgaaagcaaaaactaagaagataccaaacgtgaaaaaaaagaagaagttaattcagtgtgacatttaa

SEQ ID NO: 2089 - DNA, 651 bp, Arabidopsis thaliana
  Clone ID: AT_F21O3.C1.o28.tg
atggcggcgagcgcgaacccgtcggggaacaatcaggaaggttcgtcggcgacgcagaaggtatcgtcttcttcagcggcggcggcgaatggcgctgctgtgaattccgtcgataatggtggaaatacaggcgcggcggcggataattcacagacgattggcgcgttgaggcataatccagggatctctaccgattggactcttgaggaacaatctctattggaagatttgcttgtcaagtacgcgacagaaccgtcggtttttcgatatgcgaagattgctatgaaaatgaaagataagactgttcgagatgttgccctgcgctgtagatggatgactaatcaactgacggtttttcacctccatgtggttgctgatggattgcagaaaaaggaaaacggaaagcgtaggaaagaagatcattcctcgaggaaaagcaaagataagaaagaaaaagctacagattcttcagccaagtcctcatctcatttgaatgttcatcctaatggtccttcttatgctccgcctatgatgcctatcgatactgatgatggtatttcatataaagctattggtggtgtgagtggagatcttctcgagcaaaatgctcaaatgttcaatcaactttcaacaaatttctcagctttccag

SEQ ID NO: 2090 - DNA, 306 bp, Arabidopsis thaliana
  Clone ID: AT_F2G1.C1.o8.tg
atggcatcaggctcaatgtcttcttatggctctggctcatggactgttaagcagaacaaagcctttgagcgtgctctagcagtctatgaccaagacactccggaccgttggcacaatgttgctagagctgttggtggtaaaacaccagaagaagctaagagacagtatgaccttctagttcgtgacatcgaaagcatcgagaatggtcacgtgccattccctgactacaagactactacaggaaacagcaacagaggcaggctgcgtgatgaggaaaagaggatgagaagcatgaagctgcagtga

SEQ ID NO: 2091 - DNA, 1539 bp, Arabidopsis thaliana
  Clone ID: AT_F4P12.C1.o140.tg
atgacgagaagaaaatccaccgtcgtcctgccgcagcctattcgtcgatcagcgaggcttatctctctgcagaatcgagatagtcaagtgaaacccaggaaagatctgggctttggctcggaacccacgaagaaaactcgtcgggaagtcttaagaggtctatcgaagagattagtatactcatcggatagtccaatcgaagattcgaggtcgaagaaattgaacatttcgaaagatgggtttccgtcgctaaggagatctcttaggctttcgagtagggaatgtcctgaagtcaacaaagagaagcctaagactgcatctacttcatcttctcgcacgaaatcgtcgaccactgtttcgtcttcttgtgctctgagacgttctcctaggttttcaagtggaggaggagaatctgtggatcaatcttcttcttccattgggaagaaatcaggtaatagtgttttgagtagctgtagtacgaaatcaatttcatcggagaaagtgaaaggtggagatggtttgaaatctaaggatagaagtagaagtcgtgttcgtcctaagactaagaagatgtttagtggttgtgatgataatgaagaagaagaagaagaagttagtgtctgccttactgagaggaaaaggatgagaattgcaaagccgaatgaggaagaaaatgctgaagcaaaagctgatgaagtgaagagaaaaggaaaggaggaagaagaagaagaagatgaagaagaaggattgaaggcaaagaataagcttgagaaaggaggatggacagaggagttggagttagctttacaaggagcttatttgacggtgaagccaagtcctaatttctggaaaaaagttgctaagatggttcctggaaaatctgcgcaggaatgttttgatagagtgaactcagctctgattactcctcgtcaagctcagcctcgaagagccacaaaaacaatcttatcaacgattccgcagttttcactttctgcaagcaaactactgaaacccaattcaccaaagacaaagatacgacagcgcagaaacaatctctcaaagaaagtggtcaggcatttactggagaagcaaaatcatatggatcaaggtcttggatttgatctcttctcagttcttgagcctaacaccacaagcaattttctctcaactccaatggaaaaagggcgaagtcttccaaaaatccttgaaagtccggtgccttgttcaagtaaagatccaacaactctcgttagccctccagtactgaaacaggtaaaaaacaaggcattgcatgagaagtacattgatcatctgcatatcagggatgctaaaagaaaagccgagtcaactcgactggctgggaaagagaacataagacctattgaaattcagaagaaggattcggtgagagcagctaaggatgcacttttctttgatgtacaagatgcaatccaaaagctaaaaggtctggaagctgagaactcatctagttcttcagagttttgctatgatcatgtcgaaacggacgaagaagattaa

SEQ ID NO: 2092 - DNA, 1482 bp, Arabidopsis thaliana
  Clone ID: AT_T1K7.C1.o5.tg
atgggattcaaacgcccttttgaagatgagaagtttcatgagctcccactcaaacattccagacaacttgactataacgataagtctactcagtttgaagaagttagtcctcaccatgctggtttccagaaaactgttgccacggtgaatgagggaaatctttgtaagtcacaaggcggtgagtcatctgaaggtgatatgtttgatgaagagtccaattatgtttaccctggtcatgacatggatgatacttttacatgggatacacaaggttgtggtggaagagatgcaacttactctccccattctggaaagtattttgagctagatatacctccaagagtatttgctcctgttgagactttctattatttactcttggatcaacgtgccaaaaagcaagtgcccattggaccaggtcatcaagccgagattcctgaatgggaaggcagtcagactgggaacatagaaacctcaggcatgtcagttcaaaatcacattagtggatgtgctgatggtgagaagctgtttggtacatctgttattcccatgcctggtttgactacagttgcacatattgatgacatagtagggaagggtagaaagttttgtgtatgccgggacagggattctgtcaggtgtgtgtgccagcacattaaagaagctagagaagaattagttaagacgtttggaaatgagacattcaaagaactgggtttatgtgagatgggggaaaaaggtgcactgaagtggagcgatgaagatgcacaactttttcatgaggttgtttattccaatcctgtaacattggggcagaatttttggaggcacttggaagctgcattttgttcccgaactcagaaagagattgttagcttctactttaacgtatttgtcctcagaaggagagccatccagaacagagcttttatattggacattgatagtgatgatgatgaatggcatggatgttatggaggctcttctggtactcgttatgtagaagaagatgaagaagactctgcaatcgagtctcctcttcatcaagggactaagaaagtgtatccactccatcatgaagaaggtgaagaagatgttagtcatagcagcaatgatgaagatgatgatgatactaaagaaggtggcactggactgtatgacgagcacaagatgagttcaacagttgaatacatggatagattttctgggaacaatggagagagattgaacgtggaagatgactcgtgcacttcctttgaacttgcacgtaatgcagtcaactgtgcagagaaagatgagactgttcctggagagcagcagaagaagttgaaggattgtaatgatccaatagataccaaagtctgggatgcttcgaggtgtttgaatgttccaacaaatggcaaagatcttcaaccaacccggagaatcatggaggagatatttggtaatggatgctgggaaaacaaggcaagaaacaagtga

SEQ ID NO: 2093 - DNA, 3720 bp, Arabidopsis thaliana
  Clone ID: AT_F1N19.C1.o13.tg
atgaaatctctggatcaagtagaaaccctaatttcagggcctccctctgaaccgtcgtcccctaatagagacctagataaagatgaagaagaagaagaagagtgcgagtatgatgacgaggaagaagatgttgatttcaatccctttcttaaggattctccttctcgtgaagcttcttccagtttgagctctgaagttgagactcttgatggtgaaattgttaatagcattactacggttccccaaaccttagagggcagacaaggaaaggaggatattgcaatgccaagtaatgatgtctcgtgccaagaaccaccaatccctgatgagaggacagttggggccgcaaatgaaaacggagaacaattggtgatccaaactcagaagcaagatttgatgtcaactgaggaagatgatgcaatctgcaaacggactagagctcgctattcgcttgcgagtttcacccttgatgatcttgaggcttttctccaggagactgatgatgaggatgatattcctaatgtcgatgatgaggaagaataccgcaagtttctcgctgctgttttacatagtggtgatactgaggttcccttggcacagactggaactaatgatgacgatgatgatgatgatgaggataacgatttagacttcgagatagaacttgaggaagcgctggagactgatgacgaggaaattatacctgaaaaggtcactacaggtgacaacataagcactaagcgacgtcctgtgactaggcagaagagacggcaaaatatctccattcatcacaaaaacaattctcctgaacaggctggcagattgttacgccctcttgtacctatcttacccattgcaccacctgggagaagggtttctgctactgaagcagttgcttcgtcagaaaacaggacaataaatggcttcactcaagcccaaatgggagaactgcattctttgattcatgatcaccttcaacttcttatccaagtgtactctctttgtgcacttgatcattcacggcaaagcattggaacccacgtccaaggacttctatctgagatgctcaaacaacaccaaggatatatctcacgccgaagtcatcttcttgtcactggttcagcatcatcggttcttgatgttgtgggtctagctggaagatatctagttgatgtttctgacgctgtgcaagattatcgacggtgtcaagtggaatccggttttgatacttcgtctcaaagagtgccattatttacacttcctcaccaagaagttggcggtgagattgtaaactatcctctttcatcccctagttcaagtaagtcaccatcaggtcagcagcaggctaagaagacgttagctgctacactggttgaatcagcccagaagcaatctgttgccttggtccataaggatattgccaagttagctaaaagatttatgccattgttcaaagtatcgctatatccccacaagccacctcatgcagctgtcgccaatcgggtccttttcactgatgctgaggatgaattactagctcttggaataatggaatataactcagactggaaggcaataaagcagcggtttcttcctagtaaaggcgagcatcagatttatgttaggcaaaaaaaccggagatcatctaaagccccagaaaatccaattaaggcagttctgaggatgaaaagctctcccctgacaccacaagagatactacgaatacaagagggacttaagtacttcaaatatgattggacgtctgtgtggaaattcgtcgtgccttaccgagacccatcattactgcctcggcaatggcgcactgcccttggaattcagaaatcatataagctagatgctgtaaaaaaggagaaacggagattatatgatacaaatagaaaattcagagagcagcaggcatctgcaaaagaggatcgttatggggcttctaaagccaatgaatatcatgttggtggtgaattggtcgagagttcaggtgaggcatacctacatgaaggatttttagcagactggaggcctggcatgccaacctttttttcttctgcacctatgcactcctttgacaaggcaaaggatgttcccggtgatcgacatgagtcagtgcaaacatgtatcgttgaaggatctaaaaatcctgaactctgtggtgcccaaatcctgacatgtacgcagaggcttgcaccttcattcattcctatgtaccgccacacatctggtacagcacccggtgcctcaaaagcaccgataattgcgcggccatatcgttctcgtaaagtattcaacagaagtgttgtgagactagcccctgatttacctcccgttaaccttccatcgtcggtccgtgttatctcgcagtctgtttttgcgaagaatcagtctgaaacatcctccaaaacttgtatcattaatggtggcatgtcggatgtttctgggaggggaaatttcggtattgaaactccttgtttttcagctgacagagataacaacggtcctcctagcgaaaaagtggtagatttgcaggaagatgtgcctgccgagagctcctctgggatggacaagcagagcaatgactcagatcttcaaatgcatcctttattgttccggacccctgagcatggacagattacatgttaccctgcaaacagagacccagggggttctagttttagtttcttttctgaaaatcgacctcagctgctaagtcttttcaacagtccaaagcaaatcaatcactcagctgatcaattgcacagaaattcatcatcaaacgaatatgagacagcacagggcgacatctgttttcatcctcttcttcaaagaaccgagtatgaaacgagttatgttattagtagacgtgggaacttagacccagatattggtaagaaagacaaattatgtcaacttcaggatacttctggtgctgttgagaagactgcgatccctgttactggtcgtaatgatgtcagcttggaaccttttagttctagcacacctggtaaaaatgtgaacttagatatctatctaagtacaagctcttctaaggtaaataatggtggtagtgtctcagcagcaaatatttcagaagctccagacatctgcatggctcaacttaatgatggctctgaagtacctggatcagctccaccaagtgataatattagtagatgcattgaagagatggctgatcaatctaatctaggtatagtgatggagcaggaggaattaagtgactctgacgatgagatgatggaagaagaacatgttgagtttgagtgtgaagagatggctgattctgaaggagaagaaggctcagaatgcgaagaaaacattgaaatgcaagataaggataacagaaactctgtggtagaaataacttcaacagatgtcgattctggcaaagaactaggcaaggattctccaaacagtccttggttgagtctggatccgagtagccgtcgcttaagcagtaatgttaaggacagagagaagatagaggcaacaaatgaaacgaccatctcacagtttggtcctagtagatcacgcaaaaaagggacaccagtgaagagcagagatgcagaatcaaaggaagaagcaggagttgctcggttgagactgggtcctctcgccctccccccaatgaagaaacccagaaaatgtggtgggcaggcggaaacaagtccaagtattgagacaacctga

SEQ ID NO: 2094 - DNA, 1356 bp, Arabidopsis thaliana
  Clone ID: AT_F16A14.C1.o25.tg
cccctaccaaattttcttcgaatttcagctcagatcccttccttcttccagatcgatcttcagatctattgttttttaagaatgggtttcaagcgaacgtttgacgctgaagatgttcaagagctcaacgttaagaatggaagacagattagttactgtaataagctggccaaactagatgaaggagttccatatcgtctttcactggagaagccaggtgtcgtaggatatgatataagtgatctctacgggtataaatgtgaggataacgttgacaaggggtttgagaccaatgcgcctttctcttggatcacaactggtttgtctgaggaggattctcagtctggagctacgattcagtctaccatttctcatgaatctcctgagtcagatataccttggagaccggtttgctctggggaagaagatggctattggtgtccgatttctcctagaaaaacggttccaatcgggtcagattaccaggctgatattcctgaatgtgtcaaggaagaggcaaatgatcagtcgggtcaaggtgttggttacgatgaagaacaagtgacagggaagtgcgtaattccaatgcctgactgtgaaaccgaggtctgcaagattggtaaaggaagaaaggaatgcatttgcctggataaaggttccatcagatgtgtacagcagcatattatggaaaacagggaagatttgtttgcaactattgggtacgacaggtgtctggatataggtctttgtgaaatgggggaggaagttgctgctagactaactgaagacgaggaagatctgtttcatgagattgtttactccaatccggtttcaatggaccgggatttctggaaacacctaaagtctgcgtttccttcacgaaccatgaaggaaattgtgagctattatttcaatgtctttatcctgcgaagacgagctatccagaaccgttctaaaagcctggatgttgatagtgatgatgatgagtggcaagtagagtatgacaacaccttttatggtgctgaaactccatcagatgacaaagccgaaaaaagcctctcaagagacgaaggagaagaggttaatgctaatgaagattcgtacatgtcctttgagaatcagtccaacgcaatctactctcgatgtccagttagaaatagagaagaatccaacattgggaattactggcgccactgcaatgatcttgtggatcagtcgtattcatttgatccttgtgattcaatactgccagatcattgttggactaagaacattgatctgcttccaacttcaaacattatcgacgaaatctttggtcaagaccacccatgggatgatttctccagagggaagtaa

SEQ ID NO: 2095 - DNA, 3174 bp, Arabidopsis thaliana
  Clone ID: AT_F24P17.C1.o13.tg
atggcgagaaattcgaattccgatgaggctttctcgtcagaggaggaagaagagcgggttaaggataatgaagaagaagatgaggaggagctcgaggctgttgctcgttcttctggctccgacgatgacgaagtagccgccgccgacgaatcaccagtctccgacggagaggctgctcccgtagaagatgattacgaggacgaagaagatgaggaaaaagctgaaatcagcaaacgtgagaaagccagacttaaagagatgcagaagttgaagaagcagaagattcaagagatgctggagtcgcagaatgcttccattgacgcggatatgaacaataagggaaaagggagactgaagtatcttctgcagcaaactgagttatttgcccactttgctaaaagtgatggatcttcttctcagaagaaggcaaaaggaaggggacgtcatgcttccaaaataactgaagaggaggaagacgaagagtatctaaaggaagaagaggatggcttaactggatctggaaacacacggttactcacacagccctcttgtattcaagggaagatgagagattaccaattagctggtttgaactggctcattcgtctttatgagaatggcataaatggaattcttgctgatgaaatgggtctggggaagacgcttcaaacgatttctttgttggcatatcttcatgaatacaggggaatcaatggtccccatatggtggttgctccaaaatcaacacttggtaattggatgaacgaaattcgccggttttgtcctgtcctacgtgctgtgaagttccttggtaatcctgaggagaggagacatattcgagaagacctgctagttgctgggaaatttgatatttgtgtcacaagctttgagatggccatcaaagagaagacagcacttcgtcggtttagctggcgttatattatcattgatgaagcgcatcgaatcaagaacgagaattcactcctttctaaaaccatgagactttttagcaccaattatcggcttcttatcacggggaccccccttcagaataatctccatgaactgtgggctcttctaaattttcttctgcctgagatttttagttcagcagagacttttgatgaatggtttcaaatttctggtgagaatgaccagcaagaagttgtgcaacaactgcacaaggttcttcgaccatttcttcttcgaagactaaagtcagatgttgagaaaggtttgccaccgaagaaggagaccatacttaaagttggtatgtctcagatgcaaaagcaatactacaaggctttactgcagaaggatcttgaagcggttaatgctggtggagaacgcaaacgtctgctaaacattgcaatgcaactgcgtaaatgctgcaatcacccctatctcttccagggtgcagaacctggtcccccatataccacaggagatcaccttataacaaatgctggtaagatggttctcttggataaattgcttcctaagttgaaagaacgtgattcaagggtgctgatattttctcagatgacaagacttttggatattcttgaggactatttaatgtatcgtggttacttgtattgccgtattgatggaaacactggtggtgacgaacgagatgcctccatagaagcctacaacaagccaggaagtgagaaatttgttttcttgttatctactagagctggagggcttggtatcaatcttgctactgcagatgttgtgatcctttacgatagtgattggaacccacaagtcgacttgcaagctcaggatcgtgcccataggattggtcaaaaaaaagaagttcaagtgtttcgattctgcactgagtctgctattgaggagaaagtgattgaaagagcttacaagaagttagcacttgatgctctggttattcaacaagggagattggcagaacagaaaagtaagtctgtcaataaggatgagttgcttcaaatggtaagatatggtgctgagatggtgttcagttctaaagatagcacaatcacagacgaggatattgatagaatcattgccaaaggagaagaggcaacagctgaacttgatgctaagatgaagaaattcacagaagatgctatacagtttaaaatggatgacagtgctgacttctatgattttgatgatgacaataaggatgaaaacaagctcgattttaaaaagattgtaagcgacaattggaatgatccccccaagcgggagagaaagcgcaactactctgaatctgagtactttaagcaaacattgcggcaaggtgctccagctaaacctaaagagcctagaattccgcgcatgccccagttgcacgatttccagttctttaacattcagagattgaccgagttgtatgaaaaggaagtacgttatctcatgcaaacacatcagaaaaatcagttgaaagacacaattgatgttgaagaaccagaaggtggggatcccttaactactgaagaagtagaagaaaaggagggattattggaggagggtttctcaacatggagcagaagagattttaatactttcctcagggcttgtgagaagtatggccgcaacgacataaaaagcattgcctctgagatggaagggaaaacagaggaagaagttgaaagatatgccaaagtatttaaagagcggtacaaggagctgaacgactatgatagaatcattaagaacattgagaggggagaggcaaggatctctaggaaagacgaaatcatgaaggccatagggaagaaactggatcgctacagaaacccttggctggaactgaagattcaatatggtcagaacaaaggcaagctgtacaatgaagagtgtgaccgtttcatgatctgcatgattcacaaacttggttatgggaattgggatgagctaaaggcagcatttaggacatcgtctgtgttcaggtttgactggtttgtgaaatcccgcacgagtcaggaacttgcaagaagatgcgacactctgattcgactgatcgagaaagagaaccaggagtttgatgaaagagagaggcaagcccgcaaagagaagaagctcgcgaagagtgcaacaccatcaaagcgacctttaggaagacaagcaagtgagagtccttcatcgacgaagaagcggaagcacctgtcgatgagatga

SEQ ID NO: 2096 - DNA, 258 bp, Arabidopsis thaliana
  Clone ID: AT_C7A10.C1.o790.tg
atggcttccaactcaatgagctctagcgcttcttggacacgtaaggagaacaaattatttgaaagggcgttggctacatatgaccaggacactcctgaccgttggcataacgttgcaagagccgttggcggcaaatcagctgaagaaaatatcacaacaattatccataagaaagcattcataaataatagacatgcactctccagtttcttatgcgtgtcttcttgtttcaccaggccagagaaaaaaaaaatctag

SEQ ID NO: 2097 - DNA, 2622 bp, Arabidopsis thaliana
  Clone ID: AT_F16M22.C1.o4.tg
atggttgataacagtaacaataagaagaggaaagagttcatcagtgaagcagacatcgccactcttttgcagagatatgatactgtgacgatactgaagttgctacaagaaatggcgtattatgctgaagcaaagatgaattggaatgagttagtgaagaagacaagtactggaattactagtgctagagaatatcagttgctttggcggcatcttgcttatagagattctctcgtccctgtgggaaataatgctcgagttctggatgatgatagtgatatggagtgtgaattggaagcatcccctggagttagtgttgatgtagtaacggaagctgttgcgcatgtgaaagtgatggctgcttcctatgtgccaagtgagtccgatattcccgaagactcaacggttgaggctcccttgaccattaacataccttacagcctgcatagggggcctcaggaaccatcagactcatattggtcatcaagagggatgaatatcacctttcctgtttttcttccgaaagcagctgaaggacataatgggaatgggttagccagtagcttggctcctcggaagagaagaaaaaaatggtcagctgaggaggatgaggagctgattgctgctgttaagcgacatggtgaaggcagctgggcccttatctctaaggaagaatttgaaggagagcgaacagcctcacaactctcacaggtatacttcttagtaagtagtgttaagaaagatatctggggacaacattgtatgggcatctgtgatgctgtttatttagcatacatctgtaatctggctgaatttacttatttgcagcggtggggggctataaggagaaggactgatacttcaaacacttctacccaaactggcctacagcgaacagaagcacaaatggcagctaatcgtgcattatctttagcggtgggaaatcggttaccctcaaaaaaacttgcagtaggtatgactccaatgctgtcatccggtaccatcaagggagcacaagccaatggtgccagcagtggtagtacattgcaaggtcaacaacagcctcagccacaaattcaagcattatcacgggcaacaacatcagtgccagttgcaaaatctcgagttcctgtaaagaaaacaacagggaactccacttcgagagcagacctaatggtaactgctaattcagtagctgctgcagcctgtatgtctggcctggcaaccgctgtaacagtgcctaagattgaaccaggaaagaatgctgtttctgcgttggtgccgaagactgaacccgtaaaaaccgcttccacagtttctatgcctcgtccttcaggtatatcatcagcactgaatactgagcctgtaaaaaccgctgtggcagcctctttgcctcgttcatcaggtattatttcagcaccaaaggttgagcctgtaaaaaccgctgcttcagcagcctctttgcctcgtccatcaggaatgatatcagcaccaaaggttgagcctgtgaaaaccaccgcctctgtagcctctttgcctcgtccatcaggtattatttcagctccaaaggctgagcctgtaaaaaccgctgcttctgcagcctcttcgcctcgtccatcaggaatgatatcagcaccaaaggttgagtctgtgaaaaccaccgcctctatgcctcgtccatcaggtattatatccgcaccaaaggctgagcttgtaaaatccgccgcttctgcagcctctttgccttgtacatcaggtattatatcttcaccaaaggctgagcttgtaaaatccgccgcttctgcagcctcttttcctcgcccatcaagtatgctatcagcaccaaaggctgacccagtaaagattgttcctgctgctgccactaacactaaatcggttggacctttgaatttaaggcatgcagtcaatggaagcccaaaccacacgataccttcatcaccctttactaagcctttacatatggctcctctctccaaaggatctacaatccagagtaattcagttcctcctagttttgcatcgtcaaggttggtccccacacagagagctcctgcggctactgttgtcacgccacaaaagccaagtgtggtagcggcagctactgttgtcacgccacaaaagccaagtgtgggagcagcagctactgttgtaacgccacaaaagccaagtgtgggagcagcagctaatgttgtaacgccacaaaagccaagtgtgggatcagcagctactgttgtaacgccacaaaagccaagtgtgggagcagcagttaccgtcacttccaagccggttggtgtacagaaagagcaaactcagggaaacagagcaagccccttggttacagcaacacttccgccaaataaaaccatcccagcaaattcagtgattggcacagcaaaagcggtggctgcgaaagtggagactcctcctagccttatgcctaagaaaaatgaagtagttggcagttgcaccgataaaagttcattggataaaccacctgagaaagaaagtactaccacggtgtcacctctagctgtagctgcgactaaatcaaaacccaaagatgaagcaaccgtgacagggaccggactgaaggagttgtag

SEQ ID NO: 2098 - DNA, 1647 bp, Arabidopsis thaliana
  Clone ID: AT_F17A17.C1.o8.tg
atgggtcgttcgaaactagcttctcgtcctgctgaggaagacctgaatccaggaaaatcaaaaaggaaaaagatatcattgggtcctgagaatgctgcggcatcaatttccaccggaattgaagctgggaatgagaggaaacctggcctttactgttgtaactattgcgataaagatctgtctggtttggttcgtttcaaatgtgctgtttgtatggactttgatctttgtgtggaatgcttttctgtcggcgttgaacttaatcgtcacaagaacagtcacccatatcgtgttatggacaatttgtctttttcgcttgttacttctgattggaatgccgatgaagagatactccttcttgaggccattgcgacatacgggtttggcaattggaaagaagttgcagaccatgttggtagtaagacaacgacagaatgtattaaacacttcaattctgcttacatgcagtcaccatgctttccacttccggacttgtcccatactattggaaagagcaaagatgagctgcttgctatgagtaaagatagtgcagtcaaaacagaaatacctgcatttgtgaggctatctccaaaagaagagttacctgtgtcagctgaaatcaaacacgaagcttcagggaaggtcaatgaaatagatccacctttgtctgccttagctggagtcaagaagaaaggcaatgtaccgcaggctaaggacatcatcaagttggaagctgcaaaacaacaatctgacaggagtgtcggggagaagaaactcagacttcctggagagaaagttccattagtaacagagttatatggttacaatctaaagagggaagaatttgagatcgaacatgacaacgatgctgagcaactgcttgctgacatggaatttaaggattctgacacagatgctgagcgtgagcagaaactgcaggttcttcgtatttactcgaaaaggcttgatgagaggaagcggaggaaggaatttgttctggaaagaaacttgttgtaccctgatcaatatgagatgagcctttcagcagaggagagaaaaatatataaaagctgtaaagtgtttgcgcggttccaatccaaagaagagcacaaggaactgattaagaaagtcattgaagagcaccaaattctcagaagaatcgaggatcttcaggaagctagaactgctggttgcaggacaacttcagacgcaaatagatttatagaagagaagagaaagaaggaagctgaagaaagtatgctgctgcggcttaaccacggtgcaccaggcagtatagccggtaaaacactaaaaagtccaagagggttacccagaaatttgcatccctttggttctgactcactgccaaaggtcacacctccaagaatatacagcggtttggacacttgggatgttgatggtctccttggagctgacttactctcagagaccgaaaagaagatgtgcaatgagaccagaatactgcctgtacactatttgaagatgttggatatcttaacaagagaaataaagaaggggcagataaagaaaaagtctgatgcttatagcttcttcaaagtagagccgagtaaagtagacagagtatatgatatgctggttcataagggaataggtgactcaacatga

SEQ ID NO: 2099 - DNA, 732 bp, Arabidopsis thaliana
  Clone ID: AT_T9L24.C1.o18.tg
atgatcatgtgcagccgaggccattggagaccagctgaagacgagaagctcaaggatcttgtcgaacaatacggtcctcacaattggaacgccattgctctcaagcttcctggtcgctctggtaagagttgtagattgagatggtttaatcaattggatccaaggatcaaccgaaaccctttcacggaagaagaagaagaaagacttttagcggctcatcggatccatgggaacagatggtccatcatcgcaaggcttttccctggaagaactgataacgccgtcaagaaccattggcacgtcatcatggctcgtcgcacacgccaaacctctaagcctcgtcttcttccctcgacgacttcgtcttcttctttaatggcgagtgaacaaatcatgatgagttctggtggttataatcataattatagttccgatgatcggaagaaaatatttccagcagactttataaatttcccttacaaattctctcatatcaatcatcttcacttcctaaaggagtttttcaccggaaagatcgctttaaatcacaaagcaaatcagagtaaaaagcctatggagttctacaattttctacaagtaaacacagattcaaacaagagcgagattatagatcaagattcaggtcaaagcaaacgcagtgactcggacaccaaacatgaaagtcatgttccattcttcgactttttatccgttggaaactctgcctcctag

SEQ ID NO: 2100 - DNA, 1992 bp, Arabidopsis thaliana
  Clone ID: AT_F24K9.C1.o12.tg
atgcttaatcattgcgacagaaatcagggtggatattcacttggagtaaggtgcagctcgtataaactgttcatcatgccgagccggagaagtgagtctgctattaggctaattacgtactctgaggagcttgtggatggaaaaccgttctttgctttttccaattgtcttcctgtgaaggctttaaaccgtgaacctgctggtcatgccttccattctgctgcgcttaaactgcatggttgtgcagaagaacccacagacgatgaaggtggtgataagaaagtgggagatgataaagagaaggaatatgttccttcattcaactcgtatgccaacaaaggaaagaagaagtctggtacccagcaacaagaccactatgcgttgttgggtttgagcaatctaagatatcttgcgacggaagatcagattaggaaaagttatcgtgaagctgcattgaagcatcatcctgataaactcgctaaagccaaggaggcaaaaaaagatgagattgaatctcgcttcaaagcgattcaagaagcatatgaggtattgatggacccaactaggagaagaatttttgactccactgatgagtttgatgacgaggtcccatcggattgcttgccgcaagactttttcaaggtgtttggtccagcgtttaagagaaatgctaggtggtcagtgaatcagcgtattccagatttgggagatgaaaacacaccacttaaagatgttgataagttctacaacttttggtacgctttcaagagttggagggaatttcctgatgaagaggagcatgatcttgaacaagcagattcccgtgaagaacgtaggtggatggaaaaggagaatgcaaaaaaaactgtgaaggctagaaaggaggagcatgctcgaatcaggactcttgttgacaatgcgtatagaaaagacccgagaattgtgaaaagaaaagaggaagaaaaggctgagaagcaacagaaaaaagatgcaaaaattcaggccaagaagaagcaggaagaggacgctgctattgctgctgaagaagagaaaaggcgaaaagaagaagaagaaaagcgagcagcagaatctgcacaacaacaaaagaaaactaaggaaagagagaagaagctcttacgcaaagaacgaaatcgtcttagaactctctcagctcctctcgtggctcagcgtctgcttgacatctctgaggaagatatagagaatctatgcatgtcacttaacaccgagcagttgcagaatctatgtgataaaatgggaaacaaagaaggactagaattggcaaaggtgatcaaagatggatgcaacagtagtagaaatgatgaagccgaatctaaagaaaaagtaagtaagaagaccaacggtggcacagagcctacaacccgagtttcacagttagatagtagcactcagaagaaacaaccatggagcaaggaagagattgatatgctgagaaaaggaatgataaaatatccaaaggggacatcgcggagatgggaagttatttcagagtacattggtacaggaagatctgtagaggaaattctgaaagcaactaaaacagttctcctgcaaaaaccagattcagctaaagcattcgattctttcctcgagaagaggaaaccctctgcttcaatcacatcccctctctccacaagagaggagctcggagaatctctacccacaatgacgaccacaacaaatgcaaagccctctaaagagactgttgtggggaaaagctcgagcagtcaaagctcagacaacaatggtgaagtaggtggaagttcagacgcagatagttggtcgactgtgcaagaaagagctttggttcaagctttaaagacattcccgaaagagacaagccaaagatgggagagagtagctgcagctgtccctggtaaaacgatgaaccaatgcaagaagaagtttgcagagcttaaggaaatcattagaaacaagaaaaccggagtatga

SEQ ID NO: 2101 - DNA, 834 bp, Arabidopsis thaliana
  Clone ID: AT_MJJ3.C1.o20.tg
atggagactctgcatccactactctcgcacgtgccaacttctgaccaccggtttgtagttcaagagatgatgtgcttgcaaagctcgagctggactaaagaagagaacaagaagtttgagcgagctcttgctgtctacgctgatgacacgcctgatcgctggttcaaagttgctgctatgatccctggaaagaccatatcagatgtcatgaggcaatactctaagcttgaagaagacctcttcgatatcgaagcaggacttgtcccgatcccgggttaccgttcagttactccttgtggatttgatcaggttgtgagtccacgtgactttgatgcgtatcgtaaacttcctaatggagccagaggatttgatcaagaccgtaggaaaggagttccatggacggaggaagaacacaggagattcttgttagggcttctcaagtatgggaaaggagattggagaaacatatcgaggaactttgtgggatcaaaaacaccaactcaggttgcaagtcatgcccaaaagtactaccaaagacagctttccggtgcgaaagacaaacgacggcctagcattcacgacatcaccaccgtcaatcttctcaatgccaatcttagccgtccatcgtctgatcacggttgcttagtctcaaaacaggccgagccgaaactagggttcaccgacagggataatgcagaggagggagttatgtttcttggtcagaatctatcctcggtcttctcttcctacgatcctgccattaagttttccggagcaaatgtttacggtgaaggaggttactgtatctcacaagatcttgaaacgagaaaatga

SEQ ID NO: 2102 - DNA, 1125 bp, Arabidopsis thaliana
  Clone ID: AT_MPA24.C1.o14.tg
atgggaagagcaccgtgttgtgataaggccaacgtgaagaaagggccttggtctcctgaggaagacgccaaactcaaagattacatcgagaatagtggcacaggaggcaactggattgctttgcctcagaaaattggtttaaggagatgtgggaagagttgcaggctaaggtggctcaactatttgagaccaaacatcaaacatggtggcttctccgaggaagaagacaacatcatttgtaacctctatgttactattggtagcaggtggtctataattgctgcacaattgccgggaagaaccgacaacgatatcaaaaactattggaacacgaggctgaagaagaagcttctgaacaaacaaaggaaagagttccaagaagcgcgaatgaagcaagagatggtgatgatgaaaaggcaacaacaaggacaaggacaaggtcaaagtaatggtagtacggatctttatcttaacaacatgtttggatcatcaccatggccattactaccacaacttcctcctccacatcatcaaatacctcttggaatgatggaaccaacaagctgtaactactaccaaacgacaccgtcttgtaacctagaacaaaagccattgatcacactcaagaacatggtcaagattgaagaagaacaggaaaggacaaaccctgatcatcatcatcaagattctgtcacaaacccttttgatttctctttctctcagcttttgttagatcccaattactatctgggatcaggagggggaggagaaggagattttgctatcatgagcagcagcacaaactcaccattaccaaacacaagtagtgatcaacatccaagtcaacagcaagagattcttcaatggtttgggagcagtaactttcagacagaagcaatcaacgatatgttcataaacaacaacaacaacatagtgaatcttgagaccatcgagaacacaaaagtctatggagacgcctcagtagccggagccgctgtccgagcagctttgggcggagggacaacgagtacatcggcggatcaaagtacaataagttgggaggatataacttctctagttaattccgaagatgcaagttacttcaatgcgccaaatcatgtgtaa

SEQ ID NO: 2103 - DNA, 1077 bp, Arabidopsis thaliana
  Clone ID: AT_MDC16.C1.o1.tg
atgggtcatcactcatgctgcaacaagcaaaaggtgaagagagggctttggtcacctgaagaagacgaaaagctcatcaactacatcaattcatatggccatggatgttggagctctgttcctaaacatgcaggtttgcagagatgtggaaagagttgtagattaagatggataaattatctaagacctgatcttaaacgtggaagcttctctcctcaagaagctgctcttatcattgagcttcacagcattcttggtaacagatgggctcaaattgctaaacatctacctggaagaacagataacgaggtcaagaatttctggaactcgagcattaaaaagaagctcatgtctcaccatcatcacggtcatcatcatcatcatctctcttccatggcgagtttgctcacaaaccttccttatcacaatggattcaaccctactacagtcgacgatgaaagttcaagattcatgtccaatatcatcacaaacactaaccctaatttcatcactccaagccatctctctcttccttctcctcatgttatgaccccattgatgttcccaacctctagagaaggagatttcaagtttctaaccacaaacaacccaaaccaatctcatcaccatgataataaccattacaacaacctcgacattttgtcacccacaccaactataaacaatcatcatcaaccttcactttcttcttgtcctcatgataataatctccaatggccagcgttaccagatttcccagcgagtaccatttctggtttccaagaaacccttcaagattatgatgatgctaataaactcaacgtgtttgtgacaccattcaacgataatgccaaaaagttattatgtggagaagttctcgaaggcaaagtactatcttcctcctcaccaatttcacaagatcacggcctttttcttcccaccacgtacaactttcaaatgacttctacgagtgatcatcaacatcatcatcgagtggactcatacatcaatcacatgatcataccatcatcatcctcatcgtcgccaatctcttgtggacagtacgtcataacttaa

SEQ ID NO: 2104 - DNA, 924 bp, Arabidopsis thaliana
  Clone ID: AT_F14D16.C1.o6.tg
atggtgagatcttgttcttcaaaatcaaagaatccttggacaaacgaagaagacacaacccaaaagtttgtgtttgcgtctgcgtccaaaaacggatgtgcagctcctaagaaaataggacttaggagatgtggaaagagttgcagagtgagaaagactgatcattcaggaaccaaacatgagagcttcacttctgaagacgaagatctgatcatcaagatgcacgcagcaatgggaagcagatggcaacttattgcacaacatttaccaggaaagacagaagaagaagtgaagatgttttggaacacaaaactgaagaagaaactgtcggaaatggggatagatcatgtcactcaccgtcccttttctcacgtacttgctgaatacggcaacatcaatggtggtggaaacctaaaccctaatccctcgaaccaagccggatctcttggacgcaatcactcgctcaatgatgatggtcatcaacaacaacctaatgattcaggagatctcatgtttcatttacaagcaatcaagcttatgacagattcatcgaaccaagtcaagcctgagtctacgtttgtgtacgcctcttcgtcttcttctaactcgtctcctccattgttctcttcaacttgttctaccatagctcaggagaattcagaggttaacttcacttggtctgacttccttcttgaccaagaaaccttccatgaaaaccaacagaatcatcctcaagaactagacagcttgtttgggaacgacttctccgaggtaacagcagctacaatggctaacacatcaaccgtaccatctcagatcgaagaagaatctttgagcaatgggttcgttgaatcgattatcgctaaagaaaaggagtttttcttgggatttccgagctatctggaacaacctttccacttttag

SEQ ID NO: 2105 - DNA, 1041 bp, Arabidopsis thaliana
  Clone ID: AT_F15H18.C1.o7.tg
atggccgctgaggatcgaagtgaggaactaagcagcaatgtagaaaatggaagttgcaattccaatgaaggaattaatcctgaaaccagcagtcattggattgaaaacgttgtcaaggttaggaaaccgtacacagtaactaagcagagagagaagtggagtgaggaagagcatgataggtttcttgaagctatcaagctttatggtcgtggttggcgtcaaatccaagaacacataggtacaaaaaccgctgtacagatacgaagccatgctcaaaagttcttctccaagatggctcaggaagctgacagtagaagtgaaggatcggttaaagcgattgtgatcccgcctcctcgtccaaagagaaaaccggcacatccttatcctcggaaatcgcctgttccatatactcagtctcctccaccaaatttgtcagctatggagaaaggaaccaagtctccaacctcagtgttatcatcgtttggttcagaggatcaagtcaatagatgctcttcgcctaattcgtgtaccagtgacatccaatccattggtgcaacttccattgataaaaagaataactacacaacatccaagcaacctttcaaagatgattctgacattggttcaacacccatttcaagcattactcttttcgggaagattgtccttgtcgcggaagaatctcacaaaccatcctcttacaatgatgatgatcttaaacaaatgacgtgtcaggagaatcactactcagggatgctagttgacactaatttatctcttggtgtatgggaaacgttttgtactggttctaatgcatttggctcggttacagaagcatctgagaacttggagaaaagtgcagagccgataagttcttcatggaaacggttaagctccttagaaaaacaaggatcttgtaatcctgtaaatgcaagtgggttcaggccatacaagagatgcctatcagaaagagaagtaacatcatcattgacgctggtagcttcagatgaaaagaaaagccaaagagcacgtatatgctag

SEQ ID NO: 2106 - DNA, 5034 bp, Arabidopsis thaliana
  Clone ID: AT_T25B15.C1.o20.tg
atgccgcaggatcacgcttcgtgggatcggaaagagctcttgaggcaaaggaaacacgataggcctgaacaatcttttgaatccccgccttttcgatggagggattcgccttcttctcaccatgttcctcgagagttttcttctcgtttgggatctggagacttccgcagaccttcttcattaacacagctcttaagattgataggaagtgaattgatgaggttactcttcaaaggagcaatttttaatactcagggtggacggcaccagtttgtggaggagactagtcatggatacacatcttctcggtccagtgcccgaatgtttgataattataggccatcagcatcgcgtggagactggagatataccaggaattgcagggatgatagagtttctgtaagccaaaaggaatggaaatgcaatacatgggagatgagcaacggatcttctagaagttttgagaggccatttggtattagaaatggtcggaggtcagttgatgaaaggccgctacatgcttcagatactcattctaccgtggtgaactctttggatccagccaactcggctcattatctggacaatgagatcagtaccccagtacggtctcttaaaattaaaaatgagcataaattttcagatcaaaggttatcacttccttcagatcctcattctgaatgtattagcttgtttgaacggccttcttctgagaacaattatggcaataaggtttgttcaccagcaaagcaatgcaatgatttgatgtatggtcgaaggttagttagtgataattcattagatgctccaatccccaatgcagagctggaggggacttgggaacaacttcgcctgaaagacccgcaagataacaatagtttacatggtatcaatgatatagacggtgataggaaatgtgcaaaggagagttctctgggagcaactgggaaacttccactgtggaatagttctgggagttttgcatctcagagttcaggttttagtcattcaagtagcttgaaaagcttgggggctgttgattccagcgatcggaagattgaggttcttcctaaaattgttactgtgactcaatcttcttcaggagacgctactgcctgtgccacaactactcatctttctgaggagatgagttctagaaagaaacaacgtctcgggtggggtgagggactggcgaaatatgagaaaaagaaagttgatgttaacccaaatgaagatggaacaacattgatggaaaacggtttagaggaactacattcgttaaacaaaaatattgctgataaaagtcccacagcagccattgttccagattatggttcccctacaacaccatcctctgtagcttgcagttcatcaccagggtttgctgataaatcatctccgaaggctgctatagctgctagtgatgtcagtaacatgtgccgttcgcctagtcccgtgtctagtattcaccttgaacgattcccaatcaatatcgaggagctcgataacatctcaatggagcgttttggctgtttactcaatgagttacttggtactgatgattctggtacaggggattccagttctgtccaattgacatcaatgaacacattacttgcctggaaaggtgaaattttgaaagctgtggagatgactgaatcagaaattgatctccttgaaaacaaacataggacactaaagcttgaaggtagaagacactctcgtgttgttggacccagttcatactgttgtgatggagatgcaaatgtgcccaaggagcaggcttcttgtagtttggatcctaaggcaacagcttcttctgtagctaaaacactggtgagagctcctgtgcatcaggctggtttagccaaggttcctgctgatgtttttgaagatagtcctggggaagttaaacctctatcccaatcttttgccactgttgaaagagaggaagatatactgcccataccatctatgaaggcagctgtttcttcgaaagagattaacacacctgcttttgccaatcaggaaactattgaggtttcttctgctgatgacagcatggcctccaaagaagacttgttctgggctaagttattatctgccaataagaaatatgcttgtgaatcatctggagtattcaatcaattgcttccaagagattttaattcgtctgacaactcaagattccctggcatatgtcaaacgcagtttgattctcatgtccaagaaaaaattgcagatagggtaggcctattgagagctagggagaaaattttactccttcagtttaaagcgtttcagctctcatggaagaaagatttggatcagctagctttagcaaagtaccaatcaaagtctagcaaaaaaacagaactatatccgaatgcaaaaaatggagggtatctgaagcttccccaatctgtacgcctgaggttctcttcttcagctccaagaagggatagtgtagtccccacaacagagctcgtaagttatatggaaaagctacttccgggtacccatctaaagccttttagagacattttgaaaatgcctgctatgattttggatgagaaagagagggtgatgtcgaggtttatttctagcaatggactgattgaagatccatgtgacgttgagaaggaaagaacaatgattaatccttggacctcagaggagaaagaaatctttctgaatttgctagcaatgcatgggaaggatttcaagaagattgcttcatctcttacccaaaagacaactgcggactgtattgattactactacaaaaaccacaagtctgattgttttgggaaaataaagaagcagcgtgcttatggtaaggaagggaagcacacctacatgttggctccacgaaaaaagtggaaacgtgagatgggggctgcctctcttgatattttaggggatgtctccattatagcagcaaacgctggaaaggttgcatcaaccaggccgatctcttccaaaaagatcacccttagaggttgcagcagtgctaattcattgcagcacgatggaaataactctgaagggtgctcctacagttttgatttcccacgtaagagaactgctggtgcagatgttttagctgttggtcctttgtcaccagagcagataaattcttgcttaaggacttctgtgagctctagagagaggtgtatggatcatctgaagtttaatcatgtcgtaaagaaacctcggatatctcatactctacataatgagaacagcaatactctacacaatgagaacagcaacgaagaagatgactcatgttcggaagagagctgtggggaaacaggtcctattcactggacagatgatgagagatctgcctttatacagggtttttcgctttttggcaagaattttgcttcaatatcaaggtacgtcgggacaagatctccagatcagtgtaaggttttcttcagcaaagttcggaaatgtcttgggttggaatctataaagtttggatctggaaatgtaagcacatccgtaagtgttgataatggcaatgagggtggtgggagcgacttggaagatccttgtcctatggagagtaactctggcatagtgaataatggagtttgtgccaagatgggtatgaattctcctacctcaccttttaatatgaatcaggatggtgttaatcaatcaggctctgcaaatgtgaaagccgaccttagtagatcagaagaagagaatgggcagaaatatttgtgtctgaaagatgataataatctcgtgaacaatgcatatgtcaatggcggtttcccgagtctagtttcagaatcttgtagagatttggtagatattaatactgttgagagccagtctcaggctgccggaaaaagcaagagcaatgatctcatgtcaatggaaatcgatgaaggtgtcttaacatctgtcactatatcttccgagccattgtattgtggcctaagtgttctttccaatgttattgtggaaacccctacagaaatctcacgaaagggctcaggagatcaaggtgctacaatgcctaaatttagttcaaagaatcaagatggagtgatgcaagctgcaaacagaaccagaaattctggccttgaacctgaaagtgcaccttcaggtttcaggtaccctgagtgtcttcaccatgttccgattgaggtgtgtacggaaaaccctataggcgtcagtgcaccacgaggaaatccaaattgccatgcagagtccgagtcaggaaattctcttgttggacaagttgacgaaacacatgacttgggttggcccaagaacaatctggaattggatgggaggcttcaggttttaggccatgtaaaccctgagcagattggtctactaaaagcgaccaatacagaatcttgtcaaaatccccagagatcagtcacccaagatctgagcaggataagtagatcaaaatctgatttgatcgtaaaaacccaacgtacaggtgaaggcttctcactcaccaagtgtactagttcagctcctaagcctctggcagtatcccataaagagggcagatctggtcatagcaggagccattcgtttagtttgtctgatactgagagactccacaagaatggagatgtgaaactgtttggtacagtacttactactgatgagaatggaataaaacaaaaacacaatccatgtggaattgtcaggtcatcatcaaccttgagcagggaccatgatacaagacatcattacattaatcagcaacaccttcagaacgttcccattacgagctacggtttttgggatggcaacagaattcaaaccgggctcacatctttgccagagtcggccaagttgcttgcaagttgccctgaagcattttccacgcatctaaagcagcaagttggtaacagcaaagagattctggtggatgttaatggtggaattttgagctttggtaagcataacgaagatagagctgagtcctcaagcgctaaggatgaaggtaacataggaggggtaaatggtgtagcagaggcagccacgtga

SEQ ID NO: 2107 - DNA, 804 bp, Arabidopsis thaliana
  Clone ID: AT_F7J8.C1.o180.tg
atgtcatcgtcgacgatgtacagaggagttaatatgttttcaccggcaaacacaaactggatttttcaagaagtcagagaagccacgtggacggcggaggagaacaaacggttcgagaaagctctcgcttatctggacgacaaagacaatcttgagagctggtccaagatcgcagatttgattcccggcaaaacagtagctgacgtcattaaacgatacaaggagctagaggatgatgtcagcgacatcgaagccggacttatccccattccgggatacggcggcgacgcctcctccgctgcaaacagtgactatttctttggtctagaaaactccagctacggttatgattacgtcgttggaggaaagaggagttcgccggcgatgactgattgttttaggtctccgatgccggaaaaggagaggaagaaaggagttccgtggaccgaggacgaacacctacgatttctgatgggtttgaagaaatatggaaaaggagattggagaaacatagcaaaaagctttgtgacgactcgaacgccgacgcaagtcgcttcacacgctcagaaatattttcttcgacaactcacagatggtaaagacaaaagacgatcaagtattcacgatatcaccactgttaacatccctgacgcagacgcatccgcaaccgccacgaccgctgacgtagcactctctcctactccagccaattcttttgacgttttccttcagccaaatcctcattacagtttcgcgtctgcgtctgcgtctagctattataatgcgtttccgcagtggagttaa

SEQ ID NO: 2108 - DNA, 897 bp, Arabidopsis thaliana
  Clone ID: AT_MAH20.C1.o8.tg
atgacggtggaggaagttagtgatggttctgtgtggagtagggaggatgatattgcctttgagagagctctagccaataataccgatgaatcagaggaacggtgggagaagattgctgcagacgttccaggcaaaagtgttgaacagattaaagaacattacgagcttttagttgaagatgttactaggattgaatcaggatgtgtgcctcttcctgcctatgggtctcctgaaggatcgaatggccatgctggtgatgaaggagcaagtagtaagaaaggaggtaacagtcatgcgggagagtctaaccaagcaggtaaatcaaagtccgatcaagaacgacgaaagggtatcgcgtggacagaagatgagcacaggttatttcttcttggtttggataagtacgggaaaggtgattggcgtagcatttctcgcaactttgtagtaacaagaacaccgacccaagttgcgagccatgctcaaaagtatttcattcgtctaaattcaatgaacaaagacagaaggcgatcaagcattcacgacatcactagtgttggcaacgcagatgtctcaacgccacaaggaccaatcactggtcagaacaacagcaataacaacaacaacaacaacaacaacaacagttctcctgctgttgctggaggaggaaacaaatcagccaagcaagccgtctctcaagcaccacctggacctcctatgtatggaacacccgccataggtcagccagcagttggaacaccagtgaacctcccagctccacctcacatggcttatggagttcatgcggctccagtccctggctcagtggttcctggtgcagcaatgaacattggtcaaatgccgtacaccatgccgcgtacaccaacggctcataggtaa

SEQ ID NO: 2109 - DNA, 1767 bp, Arabidopsis thaliana
  Clone ID: AT_MEE6.C1.o9.tg
atggctgaggagaagaagaataagaagaaaaagagtgacgctaaggttgattctgaagaaaccggtgaagaattcatttccgagcacagttctatgaaggataaggaaaagaagaggaagaagaataagcgagagaataaggatggttttactggagaagatatggagataactgggcgtgaaagtgagaaactaggtgatgaggtttttatagttaagaagaagaagaagtcgaagaagccaataaggattgattctgaagctgttgatgctgtgaagaagaaatcgaaaaagagaagtaaggagacaaaggctgattccgaagctgaggatgatggtgtggagaagaaatccaaggagaaaagtaaggagacaaaggttgattctgaagctcatgatggtgtgaagaggaagaagaagaagagcaagaaagaatctggtggtgatgtgatagaaaatactgaaagctccaaagtatctgataagaaaaagggaaaaagaaagcgggatgatactgatttgggagctgaagaaaacatagacaaggaggtgaagaggaagaacaacaagaagaaaccaagtgtggattcagatgttgaagatatcaatttggactctacaaatgatggaaagaagaaaaggaagaaaaagaaacaaagtgaggattcagagactgaagaaaacggcttgaactctaccaaagacgcaaagaagagaaggaagaagaagaagaagaagaagcaaagtgaagtctctgaggctgaagaaaagtctgataaaagtgatgaagacttgaccaccccatctacatcaagtaaaagggtgaagttttctgaccaagtggagttttttcctagtgatgatgatgaaggaacggaagatgatgatgaagaagaagttaaggtggtgaggggtaagcggtttacaaaagaagaagatgagatggtaaagaatgctgtattagaatacattgataaccatgctttaggagatgaggggataaagatggttatggaatgcaaggcatacccacaacttaaaggctgttggaaagaaattacatctgctttaccttggaggacttataatagtgtgtatcatcgtgcacatactatatttgaagcaggatctcaggggatatggacgaaagaggatattgaactcgttatggagtttcaaaagacacacgggaatgattggaaaacacttgcagatgcaatgggtaagcacaggaagcatgtgaaagacgcttggaggagaggaagattggcaggtaagaagaaaggacattggatgagggaggagtatcaaaacctctttgaccttgtcaacaaagaccttagaatgaaagcattcaaagagaaacactcaaaacatggtatgctcaaagataacatcccttggatggctataagcgacgtacttgaaacacgggaccacgtgacttgctgccagaaatggtatgagcagttgatatcaccaatggtagcaaagggaatgtgggctaacgttgatgactataggctcttggaagagcttttgaaactggatgctgcttgtatcgacgatgtggattgggataatcttttggagaatcgagatggagaagcttgtagaaaacggtggaaccagatgatcattcatatcggcgtaccgaaatcgaaaacatttgcagaacaagttgagattttgtctgacaggtattgccctgacatagctgaggacagagaggattttgacaacagaccctatgatcctgaagattaa

SEQ ID NO: 2110 - DNA, 582 bp, Arabidopsis thaliana
  Clone ID: AT_MHC9.C1.o12.tg
atggcgccctcaagatcaaagaaatctaagtacaagaagaagcctcgtgctaaagctgtttctcctcacaaagacgaagaaagtatgagcaaaactaaacaacggaagaggaagttgtcggacatgttaggtcctcagtggagcaaggaagagttagagcgcttttatgaaggataccgcaaattcggaaaagaatggaaaaaggttgctggatttgtacatagccgttctgcagaaatggtagaggccttatacactatgaataaggcttacttgtctcttccggaaggcactgcatctgtggttggcctaactgcaatgatgacggatcactactctgttctgcatggaggaagtgacagtgagcaggaaaataatgaaggcattgaaactccgaggtcagcccctaagcgctctagagtaaaatcctcagatcatccctctataggactagagggtctgtctgaccgcttacaatttaggtcctcctcaggcttcatgccatcgctgaagaagagacgtactggtagtgttctctgtttctctttgcctcaaaatctgttccccatttcacaagcatga

SEQ ID NO: 2111 - DNA, 603 bp, Arabidopsis thaliana
  Clone ID: AT_MGF10.C1.o18.tg
atgttacagaaagatggatggactgaagaagaggatataatactgataaaagcccataaggagattgggaacagatgggctgagatagctcgaaaactcccgggacgcactgaaaatacgatcaagaaccattggaacgcgactaaacgtcgacaacactcgaggaggactaaaggaaaagatgaaatttccctttcacttggtagcaacactcttcagaactacattaggtctgttacctacaatgatgatcctttcatgaccgcaaatgcaaacgcaaacattggtccaagaaacatgagaggtaaaggtaagaatgtaatggttgcggtctcggagtatgatgagggtgaatgtaagtatattgtggatggtgtgaataacttgggtttagaagatggaaggatcaagatgccgtcattggcggctatgtcggcctccggatcagcgtctacttctggttctgcgtctggttctggaagtggtgtgaccatggagattgatgagccgatgactgatagctggatggtgatgcatggatgtgatgaagttatgatgaacgagattgctttgctggagatgattgctcatggtcgtctttag

SEQ ID NO: 2112 - DNA, 1245 bp, Arabidopsis thaliana
  Clone ID: AT_F14J9.C1.o20.tg
atggggagacattcttgctgttacaaacaaaagctgaggaaagggctttggtctcctgaagaagacgagaagcttcttactcacatcaccaatcacggccatggctgctggagctctgtccctaaactcgctggtttgcagagatgtgggaagagttgtcgactaagatggatcaattacttgagacctgatttaaagagaggagctttttctcctgaagaagagaatctcatcgtcgaacttcatgccgtccttggaaacagatggtcacagattgcgtcaaggcttccgggtagaaccgacaacgagatcaagaatctatggaactcaagcatcaagaagaaactgaaacaaagaggcattgacccaaacacacacaagcccatctctgaagttgagagttttagcgacaaagacaaaccaacaacaagcaacaacaaaagaagcggtaacgatcacaagtctcctagttcctcttctgcgactaaccaagacttcttcctcgaaaggccatctgatttatccgactacttcggatttcagaagcttaacttcaactccaatctaggactctctgttacaactgattcttcactctgctcgatgattccgccgcagtttagccccgggaacatggttggttctgtccttcagacaccagtatgcgtaaagccctcgattagtcttcctcccgacaacaacagttcgagtcctatctccggaggagatcatgtgaaattggctgcaccaaactgggaatttcagacaaacaacaataatacctcaaatttcttcgacaatggcggattctcatggtctatcccaaattcttctacttcttcttcacaagtcaaaccaaatcataacttcgaagaaataaaatggtcagagtatttgaacacaccgttcttcatagggagtactgtacagagtcaaacctctcaaccaatctacatcaaatcagaaacagattacttagccaatgtttcaaacatgacagatccttggagccaaaacgagaacttgggcacaactgaaactagtgacgtgttctccaaggatcttcagagaatggccgtctcttttgattttatgtatagtattcttgatgattcatcagagaggtctgtgtttgccattaatctgttgaagaacaatgatgaacgcaataaatctgtttctgtctgtttccgtgaacgaattgtgatccatagtcacatccttcaccatttttcagacctgtaa

SEQ ID NO: 2113 - DNA, 1029 bp, Arabidopsis thaliana
  Clone ID: AT_K21P3.C1.o23.tg
atgggaagggctccgtgttgtgagaaaatcgggttgaagagagggagatggacagccgaggaagatgagatcctcaccaagtatattcagaccaatggtgaaggttcttggcgatctttgcctaagaaagctggattgttgagatgtggaaagagctgtagactaaggtggataaactacttaagaagagacttaaaaagaggaaatattacttccgacgaagaagaaataatcgtcaagttgcattcccttctcggcaacagatggtcacttattgcaacacatctaccaggaagaacagacaacgaaattaaaaactattggaactcacatctcagccgcaaaatctatgccttcactgccgtttccggagatggacacaatctactcgtcaacgatgtagtcttgaagaaatcttgttcatcgtcttctggagccaagaacaataacaagaccaagaagaagaagaagggaaggactagtaggtcatccatgaagaaacacaagcaaatggtgacggcctcacaatgtttctcacaacctaaggagctagagagtgatttcagtgagggagggcaaaatggtaattttgaaggagagtctttggggccttatgagtggttggatggtgagttagaacggctcttgagtagttgtgtctgggaatgcactagtgaagaggctgtgattggagtaaatgatgaaaaggtgtgtgagagtggggacaatagtagttgttgtgttaatttgtttgaagaagaacaaggaagcgagacaaagattggtcacgtaggaatcacagaggttgatcatgatatgacggtggaaagagaaagagagggaagttttttaagttcgaattcaaatgaaaataatgataaagattggtgggttggtctatgtaattcttcagaagttgggtttggggttgatgaggagttgcttgattgggagtttcaaggtaatgtcacttgtcaaagtgatgatctatgggatctctcagatattggagagataacattggagtga

SEQ ID NO: 2114 - DNA, 843 bp, Arabidopsis thaliana
  Clone ID: AT_F22O13.C1.o32.tg
atgggtaggcctccatgctgtgacaagatagggatcaagaaaggaccatggactcctgaagaagatatcattcttgtttcttacattcaagaacatggtcctggaaactggagatcagttcccaccaacactgggttattgagatgcagcaaaagttgtagactgagatggacaaattatctgagacctggaattaaacgtggaaactttactcctcatgaagaaggaatgatcattcacttgcaagccttattgggtaacaaatgggcgtccatagcttcatacctaccacaaagaacggacaatgatatcaagaactactggaacacacatttaaagaagaagctcaacaagtctgacagtgatgagaggagcagatcagagaacattgcgctgcaaacttcttcgacaagaaacaccattaatcatagatctacctatgcttcaagcaccgaaaacatttcccgccttcttgagggttggatgagagcgtctccaaagagtagtacaagtactactttcttggaacacaaaatgcagaaccggacaaacaatttcatcgatcatcacagcgatcagtttccatacgagcagcttcaaggttcttgggaagagggtcatagcaaaggaatcaacggggatgatgaccagggtataaagaattcagagaataacaacggtgatgatgttcatcatgaagatggtgatcatgaggatgatgatgatcataatgctacaccaccattgacatttattgagaaatggcttttggaggaaacaagtactactgggggtcaaatggaagagatgagccacttgatggagctctctaatatgctttaa

SEQ ID NO: 2115 - DNA, 792 bp, Arabidopsis thaliana
  Clone ID: AT_F11B9.C1.o122.tg
atggagactctgcatccattctctcacctacctatctctgaccaccggttcgttgttcaagagatggtgagcttacacagctcgagtagcggtagctggactaaagaagagaacaagatgttcgaacgagctcttgcgatatacgctgaagactcgcctgatcgctggtttaaagttgcttccatgatccctggaaagactgtttttgatgttatgaagcaatatagtaagcttgaagaagacgttttcgatattgaagcaggacgtgttcccattcctggttatcctgcagcttcttctcccttggggtttgacacggacatgtgtcgtaaacggcctagtggagctagaggatctgatcaagatcgaaagaaaggagtcccttggacagaggaagaacacaggagattcttgttaggccttctcaagtacggtaaaggagattggagaaacatatcgagaaacttcgtggtgtcaaagacgccaacgcaagtggcgagccacgcccaaaagtattaccagagacagctctccggagccaaggacaaacgcaggccaagtatccatgacatcacaaccggcaatcttctcaatgccaatctcaaccgttccttttccgatcatagagatattctccctgatttagggtttatcgataaggatgatacggaggagggagtaatatttatgggtcagaatctctcttcagaaaatctgttttctccatcaccaacttcattcgaagctgccattaacttcgccggagaaaatgtcttcagtgccggagcttaa

SEQ ID NO: 2116 - DNA, 1662 bp, Arabidopsis thaliana
  Clone ID: AT_F24K9.C1.o11.tg
atgagttacacgacggcgactgctgatagtgatgatggtatgcactccagcatccataatgaatcaccagctcctgatagtattagcaatggctgcagaagtagagggaaaagaagtgtcctgaagaaaggaccatggacttcaactgaagacgggattttaattgattatgtaaagaagcacggcgagggtaactggaatgctgtgcagaaacacactagcctggcccgttgtggtaaaagctgtcgtctgagatgggctaatcatctgaggccaaacttgaagaaaggagcatttagccaagaagaagaacagctcattgttgaaatgcacgccaagatgggaaataaatgggcacagatggctgaacatttacctggtcgaacagataatgagataaagaattattggaacactcgtatcaagaggagacaacgagcaggcttaccactttaccctcctgaaatctatgttgatgaccttcattggagcgaagagtatacaaagagtaatatcataagagtagatagaagaagaagacatcaagatttcttgcagttggggaattctaaagataatgtcttatttgacgatctaaattttgctgctagcttgttacctgccgcttctgacctatcagatttggttgcatgcaacatgctaggaactggcgcaagttcttcccggtatgagagctacatgccaccaatattgccttccccaaagcaaatctgggaatctggatctcggtttcccatgtgcagcagtaacataaagcatgaattccaatcgccggaacactttcagaatacggctgtacagaagaatcccagatcttgcagtatctcgccttgtgatgttgatcatcatccttatgaaaaccaacattcgtctcatatgatgatggttcctgatagccatacagttacgtatggcatgcatcctacttctaagcccttgtttggggcagtgaagctggagctcccttcattccaatattcagaaactagtgcatttgatcagtggaagacgactccgtcacctccacactcagatctccttgactctgttgatgcctatattcaatctccaccaccatcgcaggtagaggagtcagattgtttctcttcatgcgacaccggcctactagatatgttacttcatgaggccaagatcaaaactagtgcgaagcacagtttgttgatgtcatcaccccagaagagtttcagttcaactacttgcacgaccaatgttactcagaatgtaccacgtggcagcgaaaacctgatcaaatcaggagaatatgaagattcccaaaagtatttgggtcgctccgagattacaagtccctcgcaacttagtgcaggtggtttttcatcagcttttgcagggaatgttgtaaagacagaagagttggatcaggtttgggaaccaaagagagttgatataacacggcctgatgttttacttgcgtcgagctggcttgaccaaggctgttatggcattgttagtgacacaagcagcatgagtgatgcgcttgcacttcttggtggtgacgacattgggaacagttacgtgactgttgggtcatcatcaggtcaagcaccacgaggcgtcgggtcttatggatggaccaatatgcctcctgtttggtcgctgtaa

SEQ ID NO: 2117 - DNA, 1737 bp, Arabidopsis thaliana
  Clone ID: AT_T8L23.C1.o3.tg
atgaagagacattcttgttgttacaaacaaaagctgagaaaaggtctttggtctcctgaagaagatgagaaacttctcaattacattaccaaacatggccatggttgctggagttctgtccctaaactcgcaggtctcgagagatgtggaaagagctgtagactcagatggatcaattacttaagacctgatttaaagagaggagctttctcttcagaggaacagaatctcattgtcgagcttcatgctgttcttggaaacagatggtcgcaaattgctgcgaggcttcccgggagaaccgacaacgagataaagaacttgtggaattcgtgcattaagaagaagctgatgaagaaaggcattgaccctattacacataaacccctctccgaggttggtaaagaaacaaacagaagcgacaataacaattccacaagtttttcctcagaaactaatcaagacttgtttgtcaagaaaacgtctgattttgccgagtattctgcgtttcagaaagaagaatccaactctgtttcactcagaaattcgctctcttccatgatcccaacgcaattcaacatcgacgatggttctgtctcaaatgcgggttttgatacacaagtatgcgtgaaaccctcgattattcttcttcctcctccaaacaacacttcaagcactgtctctggacaggatcatgtaaacgtgtcagagcctaattgggaatcaaacagtggaaccacaagccacctcaacaatcccggtatggaagaaatgaaatggtccgaggagtacctaaacgaatcgttattctctacccaagtttacgtgaaatcagagacggatttcaactccaacattgcctttccttggagccaaagccaagcttgtgacgtattccccaaggatcttcagagaatggccttctcttttggtggtcaaagttttttcccttgggttactactctacgacgaggtcgtcaacaagtcatcgggttctctgtagatcagattgatcgaacaaccaatagttttaaaatcgtcatcataaacgaggtgagaaacagcaatgagacaacatatgagtttgagattaacgtaggctattcatggaaactatcggaaacgacgttaacttgctgcacaagtaatcttgatgaccgtatgaaaaaacctgtttatatgaagggaggtcttcactggctaagaaatgacggagctatcgtagctttcaaccctgaaacagagaaagcacgactgatctcgatcagattccccaaagaactttgttctaaaacgttgttcacagccgcagataacaatttaatcttgatatcggcgacggaagaagtcttttacgtttatgcagtagagaacattcttactgatcccaagtgggtcgtcttgaagcaaatccggaacggggtactggacgagaagatgctatatagttggtacccggaggcttacgatggaaagtgtttaatgctgagggagatattgaagaaggaccattacaagcaagtgcttcatgggtacgacctgagagctaataagtgggaagtcataggttcgattccagggtggtacacttcagctctagacttttatcagtttacaccgtctttgtcttcggtaataggacctgatgccaaggaggaggaagaaatattggcttgtgatcataaaaaaatctcctctataaactcaattattagaatgcttgatggaatctcatcctag

SEQ ID NO: 2118 - DNA, 294 bp, Arabidopsis thaliana
  Clone ID: AT_T22F8.C1.o150.tg
atggcatcaagctcaatgtcttctcagagctctggctcgtggactgctaagcagaacaaagcctttgagcaggctctagcaacctatgaccaggacactcctaaccgttggcaaaatgttgccaaagtcgtgggtggaaaaacaacagaggaggtaaagagacactacgaactcttagtgcaagacatcaacagcatagagaacggtcatgttccattcccaaactacaggactagtggaggctgcactaatggcaggcttagtcaggaggaaaaaaggtatgtattgtcctaa

SEQ ID NO: 2119 - DNA, 885 bp, Arabidopsis thaliana
  Clone ID: AT_YUP8H12R.C1.o35.tg
atggggaagggaagagcaccttgttgtgacaagaccaaagtgaagagaggtccatggagcccagaagaagacattaaactcatctctttcattcaaaagtttggtcatgagaactggagatctctccccaaacaatctgggctattgaggtgtgggaagagttgtcgtctaaggtggattaactatcttaggccagatctgaagcgtggcaacttcacttcagaggaggaagaaacaatcattaagcttcaccacaactatgggaacaagtggtcgaaaatcgcttctcaacttccaggtagaacagataacgagatcaagaatgtgtggcacactcatctaaagaaaagactggctcagagctcaggaactgcagatgaaccggcctcgccttgttcgagtgattctgtttctcgtgggaaagatgataagtcatctcacgtagaagattctttgaacagagagactaatcataggaatgagttgtctacatctatgtcttctgggggttccaaccaacaagatgatccaaagatagacgaactcaggtttgagtatatagaagaagcttatagcgagtttaacgacattattattcaagaggtagacaaacccgatctgctggagataccatttgattcagatcctgacatttggagtttcttagatacttcaaactcatttcaacaatccactgcaaatgagaacagctcaggctcaagagcaacaacagaagaagagtctgatgaggatgaggttaagaaatggttcaagcacctagaaagcgaactcgggttagaagaagacgataatcaacaacaatacaaagaagaagaatcatcatcatcatcactcttgaagaactacgagctcatgatacattga

SEQ ID NO: 2120 - DNA, 2142 bp, Arabidopsis thaliana
  Clone ID: AT_T1J8.C1.o14.tg
atgcaagccgagctgatacccgaaggtcctaacggtgagggccgtttatcaaaccagaacagcaaccctaatttactctcttctgcttctatcagtattactcagtttcctgctaagaagccgactaggcaatgggctgcttggacacatcaagaagaggaaagtttcttcactgctcttcgtcaagttggaaagaattttgagaagataacttctcgtgttcagagcaaaaacaaggaccaggtcaggcattactattatcgtttagtgaggcgtatgaacaaacttttgggcccggatctgagccttgatgccaagaacccaaaggacaccaatgctgcaatgctacgatggtggtctttgcttgaaaagtatagctgcaaagcttcaaaacttcatctcaagccccggagattcaaactatttatagaggccttggaacaccaattgctgaaagaccgcagaaagagcataagaaaacggacttgccagggagaaaatctctcttctgcttccctcggaaacatctcaagtcatagtagagaaagaggattggataaccgtccatttaaacttattctctccgacggccaaaatgttaaaaagctagggcctggaagagcatctaccaaacatggtgaaagcttaagtgtcaaccttggtgacgaaaaagaagacacagcctttgggagaggtggaaggcaacggcgaaaacaagcaggttatagaaaatgggaaaaagctgcaatagatggggtctctctggttgctgatgctgcagagcatttggaacgaacatcaattgacaaagatatggatgatcaaacagatttaggtcccacaagatatttaaccggaaagtctccactttctctatgctcagctggtgatgttcctctcagtgatgccaatatgcagttttctgccaagcttaaacttcagctgttcccgattgatgaatgtactcgaagatccttggaaatggataagcacaatccgcatcttgaacttactcttagtaatcgcaagaagatatcatctgtacttgaacatctcaatcgcaaatggggaagctcaagttgtgcgactggagagctattgctatttccttacaacgcacgaaaagaaactgtaacgtgccatcagaggtatggttggtttgtccatgatgcgtcaggttctattatttctcaagttccaacttcagatccttgcccttcactcgaggatgacatgaatgtggataggttgaacgaggtcaacatgctccttactgaatcaggacccttgtctgtgcattcaactgctgaacaaacgacatctgtagagcccagtcagggtctagtatgtgcatctggtgtccatgatcgtcccgcaagatctagagatgattatgaacctgcttcaacgagtattactccacttgagcatttgagcggcggtaatgcacaatcaccaggagaatgggctgatagtcttactaacataagtataggtgatctactttctgaagtgcccgatgacatagatagtgatggtgttgatccacctgccaccgaaggttcacattacctccttcgagatgtcccatttacctctgactcttttgatgctgcaattgctgctcatatactaagacaccagaacaagccaagtgctcaactaccgctgacttctggctcttcctctctgtgggatgatgaagaaacacgtgatgccttctctttccaaaaaaatcgtttcgcaaattccaccgagctggctagtgttgcttctcctaaaggtgttggcagagtaaatggagagccttcacagttggtggaggcttcatccggcgatgagggatcttataaccctcatgacgatggagatccaatggaagagggtccagcagaccctcatacgatggattctccagggaagaccccttgtggacttgcggatgtatactggcccgactcgttaggaccactggatttagacattagatcgtcaaagtatacagatgatttgatccttagtgagagcctcgggggattgagccgtctgatagcaaccagccttgatgcgtttcagaactgctcgctctttgggttcgacaataagaaggacaagtctaacatgaagtttcatgacaaataa

SEQ ID NO: 2121 - DNA, 1461 bp, Arabidopsis thaliana
  Clone ID: AT_T8I13.C1.o5.tg
atgggcggtacggacgcgaaggacattctcgggttgccgaagactccactgtctttaactcaggagaagaaatctcgaccccagaaagagtcccatagaaaacccgatggcatttctcgcgaggtttatgcgcttaccgggggcgttgcacctcttatgccttcaattgatttaaagcgccgtcctcctgcagatgagaaggttgcttggaaatggctttccttcacaaattctgctaggaaagatgatttgcagctttaccattgggttagagtggttaatgatgttccaccaacaggtgactattcctttgccaaatataacaagtcagttgatattttgaaatacacagacgaggagtatgagaatcatttaacggattctgtgtggaccaaggaagagacagatcagttgtttgaattctgtcaaaattttgatctccgctttgttgtaatagctgatcgatttccagtatcacggactgtggaggaattgaaggatcgttactacagtgtaaaccgggccctgctgcgtgctagagctcagtctccagcagatgttgcaaaccatcctctcatgaagcaatctctccttgtcatgttatctggagaaaacatttctctaaatgctttttttccaatgtattggcataaacaggaaccatatgatattacacgcgatagagagcgcaagcgggcattgtccatggtcctatcccagagtagacatcaggagaagaaagatgctgagatacttgctgaggctaaaagaatcacagagatgcgattggccgcacgtcgtgcagaagaacctgatgtgtctgcgaatgagaacgccggtcttgataaagctgatggggttgttccagggcgtagtgtatctccaacatccaattctcaacttcctgctactgctgtggctccatcaacactaactatggcagattatgcctctacccttgcttctctgcgcatggtgagtgaagtgtctctcccttcttctctttcccttttctacttgcttcatgtatacttgagaacctatggacttgaacaaatggtccaagctgcaagctctgctgttggtcttcgaacgatcaagcgggttgagcagactctgcaagatctcggggttaatttaaagccaaaggttcctaccaaaactgtatgcgatgagcatcttgagctaagaaaagaaatattaacactactgaatcttcagaagcagctgcaatataaggaatcagaaggttcatcacatcgtgaagggtcgtatgccgcaatgccagacactccaaaggatcgtgttttcgcaccggacccattcagttttggagctgaaagaccaatcaagaaggaacaaaaacgcaaggtggtgcacatcagaggtcctggaagacaagcagatactccttcaccagctcataagcgtccgagaaagttgaaagcctctgatctctaa

SEQ ID NO: 2122 - DNA, 1992 bp, Arabidopsis thaliana
  Clone ID: AT_K16F4.C1.o7.tg
atgcagagttggggaattaactctgctattaagctacttacatactccagtgagcttaaggatggacaagcgctctatgcttcttccaattgtcatcctgtgaaggctttaaaccgtgaacctgcgggtcatgccttccattctgctgctctcaaactgcgtggttgtgctaaggaagccacaagcaagaacgaagataccgataagaaggtccctaaggagaaggatggtgaatatattccttcctatgactcccataacatcaaaggaaagaagaagtcggggaagctacaacatgatcactatgcgttgttgggtttgggcaatttaagatatcttgcaacagatgatcagatcagaaaaagttatcgcgatgctgcactgaagcatcaccctgataaactggctactctacttcttcttgaggagacagaagaagcaaaacaagccaaaaaggatgagatagaatctcacttcaagttgattcaagaagcttatgaggttttgatggactcaacaaaaagaagaatatttgactctacagatgagtttgatgacaaagtcccaactgattgtgctccccaagacttcttcaaggtttttggtccagcatttaagagaaacgcaaggtggtcaaattcgcctttaccagatttgggagatgaaaatacaccacttaaagaggttgataggttctacagtacttggtacacttttaaaagctggagagagtttcctgaagaagaggagcatgatatcgagcaagctgaatcccgcgaggaaaagaggtggatggagagagagaatgcaagaaaaactcagaaggctagaaaggaggaatatgctcggattaggactcttgtggacaacgcatataaaaaagacataagaatacagaaaagaaaggatgacgaaaaggctaagaagctgcagaagaaagaagcaaaagttatggccaagaggcagcaggaagaagctgctgctgcagctattgaagaagagaaaaggcgaaaagaagaagaagcaaaacgtgcggcagaggctgctcagctgcacaagagagccaaggaaagagagaagaagcttctgcgcaaagaacgaagtcggctcagagttctctccgcccctgttctgtcccagcgtctgcttggcatatctgatgaacatgtggaagatctatgcatgtcacttaacaccgagcagttgcggaaactgtgtgacaagatggaaaacaaggaagggatggctttggcaaaggtgatcaagaatgggagcaacattgatgatgataaaatagagattgaagaagaagaagttcaagtagctgttaagcagaatggtcatatagaagccaatggtcatgtagaagccaatggtcatgtagaagccaaagtggatactgctactcatgagaagaaagagaaaccttggagcaaggaagagattgacatgctgagaaaaggaacaaccaagttcccaaaaggaacatctcagagatgggaagtcatatcagagtacattggtacaggaagatctgtggaggaaattctcaaggctactaaaacagtacttctccagaaacccgactcagctaaagcttttgactcttttctggagaataggaaacctgccgcttcaatcaactctcctctctctacacgagaggaactcggagaaccaattataccgaccaaagctcatgaagacaacaactcaaccaaaacagagaccgcagaacagaacggtaagaccaaagagaacaacaacagtaacggcaactctgaaccagcagcagcatctggttcagacccagacggttggtctgctgtgcaagaaagagctctggtacaggctttgaagacgttcccaaaggagacaaaccaaagatgggagagagtagcaacagctgttccagggaaaacgatgaatcaatgcaagaagaagtttgctgatcttaaggacgtcatcagaaccaagaaacccacagcctaa

SEQ ID NO: 2123 - DNA, 753 bp, Arabidopsis thaliana
  Clone ID: AT_T4C9.C1.o190.tg
atgatggctttgccgaagctggccggtctccgtcgctgtgggaagagctgccgtctacggtggaccaattatctccgacctgacttgaagagaggtcttctctccgacgccgaggaacagcttgtcatcgaccttcatgctcttctcggcaacagatggtccaagatcgctgcaagattaccaggaagaacagacaacgaaataaaaaatcattggaatactcatatcaagaagaagctccttaagatggaaatcgatccttcgacccatcaacctttaaacaaagtatttaccgatacaaacttagtcgataaatctgaaacttcatcgaaagccgacaatgtaaatgataataaaatcgtagagatcgatgggacaacgacaaatacaatagatgatagcattatcactcatcaaaatagttcaaatgatgattatgaattacttggtgatataattcataattatggagatttatttaatattctatggaccaacgatgaacctcctctagtcgatgatgcatcatggagcaatcataacgttggtattggaggaacagctgcagttgcagcctcagacaagaacaacactgctgccgaggaagatttcccggaaagatcatttgaaaaacagaacggcgaaagttggatgttcttggattattgccaagaatttggtgttgaagattttgggttcgagtgttaccatggttttggtcaaagctccatgaagacgggtcacaaggactag

SEQ ID NO: 2124 - DNA, 861 bp, Arabidopsis thaliana
  Clone ID: AT_T22E19.C1.o5.tg
atggaaaattcgatgaagaagaagaagagcttcaaagaaagtgaagatgaagaactaagaagagggccttggactttggaggaagacacacttctcacaaattacatcctccataacggtgagggtcgttggaatcacgtcgccaaatgtgctgggctaaagagaactgggaaaagttgtagattgagatggttgaattacttgaaacccgacataagacgagggaatcttactcctcaagaacagcttttgatccttgagcttcactctaaatggggtaataggtggtccaagattgcacagtacttgccaggaagaacggataacgagatcaagaactattggagaacaagagttcaaaaacaagctcgtcaactcaacatcgaatctaacagcgacaagttctttgacgctgttcgtagtttttgggtccctagattgatcgagaagatggaacaaaactcatccactactactacttattgttgtccccaaaacaacaacaacaactctcttcttcttccttctcaatctcacgactctttaagtatgcaaaaagatatagattactcgggtttcagcaacatagacggttcttcttcaacttctacttgcatgtctcatctaacaacagttccacactttatggatcaaagcaacaccaatatcatcgatggctcgatgtgtttccatgaaggcaatgttcaagaattcggaggatatgttcctggcatggaggattacatggtaaactcggacatctcaatggaatgtcacgtggcggatggttattcagcgtacgaggatgttacacaagatcccatgtggaatgtggatgacatttggcagtttagggagtaa

SEQ ID NO: 2125 - DNA, 1308 bp, Arabidopsis thaliana
  Clone ID: AT_T30B22.C1.o7.tg
atggaagccactgatccaagcgcagagatcgagctctacaccattcctgctcaatccagttggttcttatgggatgatatacacgaaattgaaagacgcgagtttgcggagttcttcactgagagctcaatcactagaacccccaaagtttacaaggagtaccgagatttcattatcaataagtttagagaggacacttgtcggagactcaccttcaccagtgtccgcaagtttcttgttggcgatgtcaatttgctccagaaagtttttctcttcctcgaaaaatggggattgatcaattttagctcttccctgaagaaaaatgaccatctattgtccgtggataatgctaaaatagaacaagggactcctgctggaattcgagttactgcaacccctaattctcttaggcctataaccgcaccgccccttgttgaggaaagagttgagactggcatcaaagtaccaccgcttacctcttattcagatgttttcagtgatttgaagaagccggatcatgtattggtttgtgcgcattgtggagaacgttgcgattctcctttctatcaacataacaagggtatagtcaacatatgcgaaaagtgtttcaagaatggaaactatggggagaacaacactgcagatgattttaagttgattgggaattcagctgcagctgtgtggacagaggaagagatcctcctcttgctagaatctgtgctgaaacatggagatgattgggaactcatttcacaaagtgtttctaccaagagtagactagattgcatttctaaactcattgagctcccgtttggagagtttctgatgggttctgcttctggaagactcaatccctctatcctcaccgaggatgaaaacacggaacaggtgcaaactgatgggcaggaacatgaggaaacagagacaagggaagaaaaagaagatcgcgtgaatgaagatgagcctccagcaaaaaggaaacgtgttgcactgatatcagagggtgatacgttaaggataagagcgtctgtggcaacagctctaggagctgcggctgcacaagcgaaaatactggctgatcaagaagaaagagaaatggaacagttagctgcgacagtaatagaacaacagctgaagaaactgcagagcaagttgaagtttctagacgacttggaatcgataatggatgaagaagagaaagtgatagagggtgtaaaggaaacaatcatccaagagagggttagcgttttgcaatgcgcgtttagaagcggtattaccaaacgttgggatcatacgtacgtgaaatga

SEQ ID NO: 2126 - DNA, 804 bp, Arabidopsis thaliana
  Clone ID: AT_F6A14.C1.o18.tg
atggggaggacgacatggttcgacgtcgacgggatgaagaaaggagagtggacggcagaggaagaccagaagctcggcgcttacatcaacgagcatggcgtttgtgattggcgttccctccccaaaagagctggtttgcagagatgtggaaagagctgcagattaaggtggcttaactatctaaagcctgggattagaagaggcaaattcactcctcaagaagaagaagaaatcatccaacttcatgctgttctcggaaacaggtgggcagccatggcgaagaagatgcagaatcgaacagacaatgatatcaagaaccattggaactcttgtctcaagaaaagactttcgagaaagggaatcgaccctatgacccacgagcccatcatcaaacacctcaccgtcaataccactaacgcagattgtggtaactcttccaccacgacgtccccgtcgacgacggaaagctctccttcctccggctcgtctcgtcttcttaacaaactcgccgcaggtatctcatctagacaacatagtctcgataggatcaagtacatcttgtcgaattcaataatcgaaagcagtgatcaagcaaaagaggaagaagaaaaagaagaagaagaagaagaaagagattcaatgatgggtcagaagattgacggtagtgaaggagaagatattcagatttggggcgaggaggaagttaggcgtttaatggagattgatgcaatggatatgtacgagatgacttcgtacgacgctgtcatgtacgagagtagtcacatacttgatcatctcttttga

SEQ ID NO: 2127 - DNA, 621 bp, Arabidopsis thaliana
  Clone ID: AT_F13M14.C1.o12.tg
atggcttcgagtccacgctggacggaggacgacaacaggcgttttaagtcagctctgtcgcaattccctccggataacaagcgtttggtgaatgtcgcccagcatctgccgaaacctttggaggaggtgaagtactactacgaaaagttggtcaacgatgtttatctgccgaaacctttagagaatgtcacccagcatctgcagaaacctatggaaatggaggagatgaagtacatgtacgaaaagatggccaacgatgttaatcagatgcccgagtacgtaccactggcggaatcgagtcagtccaaacgcaggaagaaggatacgccaaatccttggacagaagaggaacacagattgtttctgcaaggattgaaaaagtatggggaaggagcttcgacgttgacatcaacgaattttgtgaagacaaagactccacggcaagtgtcaagccatgcacagtattacaaaaggcaaaaatcggacaataagaaggagaaacgccggagtatttttgacataactttggagtctaccgagggcaatccagattctggaaatcagaaccctccggatgatgatgatccgtcccaaggtcaaggcacttgtcttggagtttag

SEQ ID NO: 2128 - DNA, 1002 bp, Arabidopsis thaliana
  Clone ID: AT_F2P9.C1.o5.tg
atggtacggacgccgtgttgtagagcagaagggttgaagaaaggagcatggactcaagaagaagaccaaaagcttatcgcctatgttcaacgacatggtgaaggcggttggcgaacccttccggacaaagctggactcaaaagatgtggcaaaagctgcagattgagatgggcgaattacttaagacctgacattaaacgtggagagtttagccaagacgaggaagattccatcatcaacctccacgccattcatggcaacaaatggtcggccatagctcgtaaaataccaagaagaacagacaatgagatcaagaaccattggaacactcacatcaagaaatgtctggtcaagaaaggtattgatccgttgacccacaaatcccttctcgatggagccggtaaatcatctgaccattccgcgcatcccgagaaaagcagcgttcatgacgacaaagatgatcagaattcaaataacaaaaagttgtcaggatcatcatcagctcggtttttgaacagagtagcaaacagattcggtcatagaatcaaccacaatgttctgtctgatattattggaagtaatggcctacttactagtcacactactccaactacaagtgtttcagaaggtgagaggtcaacgagttcttcctccacacatacctcttcgaatctccccatcaaccgtagcataaccgttgatgcaacatctctatcctcatccacgttctctgactcccccgacccgtgtttatacgaggaaatagtcggtgacattgaagatatgacgagattttcatcaagatgtttgagtcatgttttatctcatgaagatttattgatgtccgttgagtcttgtttggagaatacttcattcatgagggaaattacaatgatctttcaagaggataaaatcgagacgacgtcgtttaatgatagctacgtgacgccgatcaatgaagttgatgactcctgtgaagggattgacaattattttggatga

SEQ ID NO: 2129 - DNA, 1347 bp, Arabidopsis thaliana
  Clone ID: AT_F14L17.C1.o9.tg
atggaagatacgaagaagaaaaagaagaagaatattaacaacaaccaagattccaagaaaaaagagcgtcatattgttacttggtcacaagaggaagatgttatactaagagaacaaataactctacatggaactgaaaattgggcgatcattgcatcaaagttcaaagacaaaagcacaagacaatgcagaagaagatggtatacatacttaaactctgatttcaaaagaggaggttggtcccctgaagaagatatgcttttgtgtgaggcacaaagagtatttggtaatagatggactgagatagcaaaggtggtttcaggcagaactgataatgctgtgaagaacaggtttacaacactttgtaagaagagagccaagcatgaagctatgactaaagacagcaactcaaacaccaaaagaatgttgttcttagacggtatcagtacaccgcgaaaatccgagaatgaaactcctattgctaagaaattgaagagaagtcacattctagatctcacagagatcagtaactatggaagggccgaggcatgtgtgaatcagcagataaggtctccattttcggttttagctcgaaatgccactggtattgatagcttggaagaacagaatcaaacaagcaatgtgaatgagagtgatggtgaagggatgtttcttaagaaggatgatccaaaagtgacagctttgatgcaacaagctgaacttttaagctccttggcgcagaaagttaatgcagacaacacagaacagagtatggagaatgcttggaaggttcttcaggacttcttgaataaaggcaaggagaatgatttattcagatatggaatacctgatatagattttaagatcgaggaatttaaggaccttatagaggatttgaggagtggttatgaagacaatcaattatcttggaggcaacctgatcttcatgactcaccagctagctctgagtatagttccggatcaaccatcatggtggatcagtctggtgataaaacacaaccattctcagcagatactcagacagaacataagcaagttggagaggagttgctcgtcccgaaaaatcctgatgagaatatgcccatctcaggcgaagaaaagttcagctcgcctattcaggtcacgccattgttcagatctttggcagacggtataccaagtccacagttctccgaaagtgtaagcttcgcaccttctttgttcatcatacaatacttaggctttgaaaaaacaatgagtcttaaaagactgattgcttttgtaggagaggagcttcctgctaaaaacactagggatcgagtcctcatctccatgtccaagtgctaa

SEQ ID NO: 2130 - DNA, 1017 bp, Arabidopsis thaliana
  Clone ID: AT_MBK20.C1.o16.tg
atgtcaaagagaccatattgtatcggagaaggactgaagaaaggagcatggactacagaagaggataaaaaactcatctcttatatccacgaccacggtgaaggaggctggcgtgacattccagaaaaagctgggctgaaacggtgtggaaagagttgtagattacggtggactaactatttgaaaccagatatcaagagaggagagtttagctatgaggaagagcagattatcatcatgcttcatgcatctcgtggcaataagtggtctgtcatagctagacatttgccaaaaagaacggataacgaggtcaaaaactattggaacacacatctcaagaaacgtttaatcgatgatggcattgatcccgtgacacacaagccactagcttcttctaaccctaatccagttgagcccatgaagttcgatttccaaaagaaatccaatcaggatgagcactcttcacagtctagttctacaactccagcatctcttcccctttcctcgaatttgaacagtgttaaatccaaaattagcagtggtgagacgcagatagaaagtggtcacgtgagctgcaagaaacgttttggacgatcgagctctacatcaaggttgttaaacaaagttgcagctagagcttcttccatcggcaacatcttatcaacatccatagaaggaaccttgagatctcctgcatcatcttcaggactcccagactcgttctctcaatcatatgagtacatgatcgataacaaagaagatctcggtacgagcattgatctcaacatccccgagtatgatttcccacagtttcttgagcaactcattaacgatgacgacgaaaatgagaacattgttgggcccgaacaagatctccttatgtccgatttcccatcaacattcgttgatgaagacgatatacttggagacataaccagttggtcaacttatcttcttgaccatcccaattttatgtatgaatcggatcaagattccgacgagaagaacttcttatga

SEQ ID NO: 2131 - DNA, 933 bp, Arabidopsis thaliana
  Clone ID: AT_MQN23.C1.o17.tg
atgggaagatctcctagctcagatgaaactggtctgaagaaaggtccatggttgcctgaagaagatgataaactgatcaattatattcacaaacatggccatagcagctggagtgcccttcccaagctcgctggtcttaacaggtgtgggaagagttgcaggctacgatggacaaactatttgagaccagacattaagcgaggaaaattctctgcggaggaagaagagaccatcctgaaccttcatgcggttctaggcaacaagtggtcaatgattgcaagccacttacctggacgaactgacaatgagatcaagaatttctggaatactcatttgaagaaaaagctgattcagatgggttttgaccccatgacccatcagccaagaaccgatgatatcttctcaagtttatctcagctcatgtctctgtctaacctaagaggacttgttgatctgcagcaacagtttccaatggaagaccaagcgctacttaatctccaaactgagatggctaagctccaattgttccaataccttcttcaaccttctcctgctcccatgagtatcaacaacattaaccctaacattctcaatctcctcatcaaagaaaactccgttaccagtaatatcgacctcggtttcctctcctctcatcttcaagacttcaacaacaacaacctcccttccctcaaaaccctagacgataatcacttcagtcaaaacacttctccaatatggctccatgaaccaccgagcttgaaccaaactatgttgcctacgcatgatccttgtgctcagagtgtagatggtttcggcagcaaccaagcctcctcaagccatgatcaagaagtagcagtcacagactctgtagattggcctgatcatcatctatttgatgattccatgtttccagacatttcttatcaatcttaa

SEQ ID NO: 2132 - DNA, 984 bp, Arabidopsis thaliana
  Clone ID: AT_MTG13.C1.o4.tg
atggggaggcaaccatgttgtgacaaagtagggttaaagaaagggccatggactattgaagaagacaagaagctcatcaacttcatcctcaccaatggccattgctgttggagagctcttcccaagctttctggactattgcggtgtggtaaaagctgcagattaagatggataaattatttaagacctgatttaaaaagaggtcttttatcagaatatgaagaacaaaaggtcattaatctccatgcgcaacttggcaatagatggtcaaagattgcctctcatctaccaggaagaactgataatgaaataaagaaccattggaacacacacataaagaaaaagctaaggaaaatgggtattgaccctttgacccataagcctctctctgaacaagaagcttcacaacaagctcaagggagaaagaaaagtttagtgcctcatgatgacaagaacccaaaacaagatcaacaaaccaaagacgaacaagaacaacatcaattagagcaagctttggagaagaacaacacatcagtgtctggtgatgggttttgcattgatgaagtcccattgctcaatccacatgagatcttgatcgacatctcttcttctcatcatcatcattctaatgatgataatgtcaatatcaacactagtaaatttacttctccttcttcctcttcctcttctacgtcgtcgtgtatatcatcagtagtaccgggtgatgagttctccaagttttttgatgaaatggagattcttgacctcaagtggctttcatccgatgattctttaggggacgatattagcaaagacggcaagttcaacaacagtactgttgatacgatgaacttgtgggacatcaatgatttgagcagcttggatatgtttatgaatgaacatgatgatggttttattggaaatggaaatggatgttcaagaatggttttagatcaagattcatggacatttgatctcctctag

SEQ ID NO: 2133 - DNA, 588 bp, Arabidopsis thaliana
  Clone ID: AT_F23N20.C1.o2.tg
atgaacaaaacccgccttcgtgctctctccccaccttccggtatgcaacaccgtaagagatgtcgattgagaggtcgaaactacgtaaggccagaagttaaacaacgcaacttctcaaaagatgaagacgatctcatcctcaagcttcatgcacttcttggcaatagatggtcattgatagcgggaagattgccaggacgaaccgacaacgaagttaggatccattgggaaacttacctaaaaaggaagctcgtaaaaatgggaatcgacccaaccaatcatcgtctccaccatcacaccaactacatttctagacgtcacctccattcttcacataaggaacatgaaaccaagattattagtgatcaatcttcttcggtatccgaatcatgtggtgtaacaattttgcccattccaagtaccaattgctcggaggatagtactagtaccggacgaagtcatttgcctgacctaaacattggtctcatcccggccgtgacttctttgccagctctttgccttcaggactctagcgaatcctctaccaatggttcaacaggtcaagaaacgcttcttctattccgatga

SEQ ID NO: 2134 - DNA, 912 bp, Arabidopsis thaliana
  Clone ID: AT_K5K13.C1.o13.tg
atggatttttcatgtttccaagaatacccttttgagtttcattgcagaggaacaacatttaatgggtttagagaaaacaatgcagtgtctgaaacagtagaagagttctgtaataaaagaaggatgcagaagaagagtgatgatttgaagactaagaagaagaagaaacagagtgtttctagggtttgtagtagaggacattggaggatctctgaagatactcagcttatggagcttgtttcggtttacggtcctcaaaactggaaccacattgcagagagtatgcaaggaagaacaggaaagagctgcagattgaggtggtttaaccagttagatccgaggattaacaagagagctttcagtgatgaagaagaagagagactacttgctgctcatagagcttttggtaacaaatgggctatgattgctaagcttttcaatggaagaacagataatgccttgaagaatcattggcatgttctcatggcaaggaagatgagacagcaatcaagttcttacgtccaaagattcaatggttctgctcatgaatctaacacagatcacaaaatcttcaatctttctcctggtaatgtagatgatgatgaagatgtgaatctgaaaaagtgcagctgggaaatgctaaaagagggaactactaacctgaaagctcagtatctccaagaagaatatagttcttcacgcatgccgatgcagggtccacatcatcactactcaaccttccctgcagattccttggcactgacactgcatgtctccatccaggaaccatcatcatcatcgtcattatcactgccatcatcatcaacaactggagaacatacaatggtgaccagatattttgagaccattaaacctccagcatttatagattttctaggagttggtcactaa

SEQ ID NO: 2135 - DNA, 867 bp, Arabidopsis thaliana
  Clone ID: AT_k19m22.C1.o100.tg
atggaggttatgagaccgtcgacgtcacacgtgtcaggtgggaactggctcatggaggaaactaagagcggcgtcgcagcttctggtgaaggtgccacgtggacggcggcagagaacaaggcattcgagaatgctttggcggtttacgacgacaacactcctgatcggtggcagaaggtggctgcggtgattccggggaagacagtgagtgacgtaattagacagtataacgatttggaagctgatgtcagcagcatcgaggccggtttaatcccggtccccggttacatcacctcgccgcctttcactctagattgggccggcggcggtggcggatgtaacgggtttaaaccgggtcatcaggtttgtaataaacggtcgcaggccggtagatcgccggagctggagcggaagaaaggcgttccttggacggaggaagaacacaagctatttctaatgggtttgaagaaatatgggaaaggagattggagaaacatatctcggaactttgtgataacgcgaacgccaacacaagtagctagccacgcccaaaagtacttcatccggcaactttccggcggcaaggacaagagacgagcaagcattcacgacataaccaccgtaaatctcgaagaggaggcttctttggagaccaataagagctccattgttgttggagatcagcgttcaaggctaaccgcgtttccttggaaccaaacggacaacaatggaacacaggcagacgctttcaatataacgattggaaacgctattagtggcgttcattcatacggccaggttatgattggagggtataacaatgcagattcttgctatgacgcccaaaacacaatgtttcaactatag

SEQ ID NO: 2136 - DNA, 1059 bp, Arabidopsis thaliana
  Clone ID: AT_MFC19.C1.o9.tg
atgggctttacaatacccaaaaatcttcgtatatggactttcaaaagcccaaaaacacttatttctgagatttttttttctaagttttatttattgtttcagcttcttctacagtgcaacagagcaacaatggattttttcgacgaagacaggcctagattcgttttccaatctcgtccttcttcttctcacacggcggaggaagaagaagaagctagaatccctaacaagcttttcatttcaatctccgtctcaatctccctcatcatattatctctctccttcttctacttcgaatctgaacctgccaaatcgctactattatggctttccctctctttcctcgtcggtcctttcgctcctagctcgctcaccggaggtaagattcgcgtcggttatggtcagatcttggagccagaacagattcacgatgagtcatccacggataacgaacgtgaatccaggaggaaatcggtgaataagcgatctaaaggttcgacgaagagcgataatccgccggaaaatgcttctgcggtgactgaagtttcgaggaaagtggtgattccgcagtctaaggagagtggatctgtgaatgaaactaaagattggactgctgaagagatcgagattttgaagaagcagttgattaagcatccagctggtaaacctgggagatgggagacggtggcttcagcgttcggaggaagatacaagacagagaatgtgattaagaaggcgaaagagataggtgagaagaaaatctatgagagtgatgattacgctcagtttttaaagaataggaaagcttcagatcctagattggttgatgaaaacgaagagaattctggagctggtggagatgcggaaggtactaaggagatttggagtaatggagaagacattgcattgctcaatgctttaaaagcttttcctaaggaggcagctatgagatgggagaagattgcagctgcagtacctgggaagtcgaaagcagcttgtatgaagagagttactgagcttaaaaaagggtttcggagctcgaaaactccagctaattaa

SEQ ID NO: 2137 - DNA, 621 bp, Arabidopsis thaliana
  Clone ID: AT_F4P13.C1.o8.tg
atggagacgacgatgaagaagaaagggagagtgaaagcgacaataacgtcacagaaagaagaagaaggaacagtgagaaaaggaccttggactatggaagaagatttcatcctctttaattacatccttaatcatggtgaaggtctttggaactctgtcgccaaagcctctggtctaaaacgtactggaaaaagttgtcggctccggtggctgaactatctccgaccagatgtgcggcgagggaacataaccgaagaagaacagcttttgatcattcagcttcatgctaagcttggaaacaggtggtcgaagattgcgaagcatcttccgggaagaacggacaacgagataaagaacttctggaggacaaagattcagagacacatgaaagtgtcatcggaaaatatgatgaatcatcaacatcattgttcgggaaactcacagagctcggggatgacgacgcaaggcagctccggcaaagccatagacacggctgagagcttctctcaggcgaagacgacgacgtttaatgtggtggaacaacagtcaaacgagaattactggaacgttgaagatctgtggcccgtccacttgcttaatggtgaccaccatgtgatttaa

SEQ ID NO: 2138 - DNA, 2484 bp, Arabidopsis thaliana
  Clone ID: AT_F10M10.C1.o200.tg
atggggaagtttcattccaatccaaacatacaaatagaattaaaagacttaacagaactcgaggttggagactcggaagcaaagcaagaggtgatggagttcttggactactggggcttaatcaatttccacccatttccaccaacagatactggttcaacagcctctgatcatgatgatttaggggataaggagtcactgcttaacagtttatatcgatttcaagtagatgaggcttgccctcctcttgttcacaagcctcgtttcacagcacaagctactccatcagggttgtttcctgatccgatggctgctgatgaattgctgaaacaagagggtccagcggtcgaatatcactgcaattcctgttcagctgattgctctcgcaagcgctaccactgcccgaaacaggcagattttgacttatgcacggaatgctttaacagtggcaagttcagctcagatatgtcatcttctgattttatactaatggaacctgctgaggcccctggcgttggtagtgggaagtggactgatcaagagactcttcttctccttgaagctttagaaatcttcaaggaaaattggaatgagattgcagagcatgttgctacaaaaacaaaagctcagtgtatgcttcattttcttcaaatgccaatcgaggatgcgtttcttgatcaaattgactacaaagatccaatctcaaaagacactacagatttagctgtgtctaaagatgataattctgtccttaaagatgcacctgaagaggcagagaacaagaaacgtgttgatgaagatgaaactatgaaagaagttccagaaccagaagatggcaatgaagaaaaagtctctcaggaatcttcaaagcctggagatgcgagtgaagaaactaatgaaatggaagcagagcagaaaacacccaagttagagaccgccattgaagaaagatgtaaagatgaggctgacgaaaacattgctctgaaagctcttactgaagcttttgaggatgttggacattcctccacacctgaagcctctttttcctttgctgatttaggaaaccctgtcatgggactggcagcctttctagtgagattggcaggatctgatgttgctactgcgtcagctcgggcttccattaaatctcttcacagcaattctgggatgttgcttgccacacgacattgttatattctggaagatccaccagacaacaagaaggatccaactaaatcaaaaagtgctgatgcagaggggaatgatgataattcccataaagatgatcagccagaagaaaaaagcaaaaaagcagaagaggtctccttaaattcagatgatagggaaatgccagatactgatacaggcaaagaaactcaggattcagtctctgaagaaaagcaacccggttctcgaactgaaaattctactacaaaactagatgctgtgcaagaaaaaagatctagtaagccagttacaactgacaattctgagaaaccagtggatataatatgtccgtcgcaggacaaatgttcagggaaggagcttcaagaacctttgaaggatgggaataagctttctagtgaaaataaagacgcctctcagtcaactgtctcccagtcagctgcagatgcttctcagccagaagcatcaagagatgtggaaatgaaggatactctacagtcagagaaggatcctgaagatgtggtcaaaacagtaggagaaaaggttcaactggctaaggaggagggtgcaaatgatgttcttagtactccagacaagtctgtttcacagcagcccattggatcagcttctgcaccggaaaatggaacagctggttcgctctttctctcactctctgacacattaattactttacctacattgcatgattcttttatatcttatcggtttgttattgaaatgctgtttgcaggtggaaatccaaatatagaaggaaagaaagagaaggatatttgtgaagggacaaaagacaaatataacatcgagaagcttaagcgcgcagccatctctgctatctcagccgcagcagtaaaagcaaagaatcttgcaaagcaagaagaagatcaaatccgacaactttcgggatcattgatagagaagcagcagctacataaactagaagcaaagctatctatcttcaatgaagctgaaagcttgacaatgagggtaagagagcaattagaaaggtcaaggcaacggctatatcatgaaagggctcagatcatagcagctcgactaggtgtcccaccttcaatgtcctcaaaagcatcgttaccaacaaacagaatcgctgcaaattttgctaatgtagctcaaaggcctccaatgggcatggcctttccacgcccaccaatgccaaggcccccaggtttccctgttcctggttcttttgtagctgctacaacaatgaccggaagttcagatccatctccaggttcagacaatgtttcttcggtttag

SEQ ID NO: 2139 - DNA, 1098 bp, Arabidopsis thaliana
  Clone ID: AT_F21H2.C1.o9.tg
atggggaggtcgccttgttgcgacgagaatggtctaaagaaagggccatggactcctgaagaagatcaaaagcttattgattacattcataaacatggtcatggaagctggagagctctccccaagctcgcagatttgaataggtgtggaaagagttgtagactgaggtggacaaattatttgagaccagacatcaaaagaggaaagttttcagccgaagaagagcaaacaatcctccatctccactccattctcgggaataaatggtcagctattgcgacgcatttgcaaggtcgtacagataatgagataaaaaacttttggaacacacatctaaagaagaaattgatccagatggggatcgatcctgtgactcatcagccaagaaccgacctcttcgcaagtttacctcagctcatagccttggcaaatctaaaagacctaatcgaacaaacatcacaattctcatccatgcaaggcgaagcagcccaactagccaatctacaatatctccaacgtatgtttaattcttcggcttcattaaccaacaacaacggcaacaattttagcccgagtagtattctcgatatcgatcagcaccatgccatgaacctcttaaactccatggtctcttggaacaaagatcaaaaccccgcttttgatccggttcttgaactcgaggctaacgatcaaaatcaagatttatttccactagggtttatcattgatcaacccacccaaccactccaacaacaaaaataccatttaaacaatagtcctagtgagctaccatcgcaaggtgacccacttcttgatcatgtccctttcagtctccaaacacctttgaatagtgaggatcactttatagataatttggtcaaacatccaactgatcatgagcatgaacatgatgacaatccatcttcatgggttctcccttctcttatagacaataaccctaaaactgtcacgtcttctcttccacacaacaatccggcggatgcaagtagcagctcaagctatggaggttgtgaagctgcgtcgttttattggcctgacatttgcttcgacgaaagcctcatgaacgttatatcttag

SEQ ID NO: 2140 - DNA, 711 bp, Arabidopsis thaliana
  Clone ID: AT_T15G18.C1.o120.tg
atgggaagatctccttgttgtgaaaaagctcacacaaacaaaggagcttggactaaagaagaagatcaacgtctcgtagattatatccgtaatcacggtgaaggttgttggcgttctcttcctaaatccgctggattgttgcgttgtggtaaaagttgtagattgagatggattaattaccttcgtcctgatcttaaacgtggtaattttactgatgatgaagatcaaatcatcatcaaactccatagcttactcggtaacaaatggtcattgatagctggaagattaccaggaagaacagataacgaaataaagaattattggaacactcatattaagaggaagcttcttagtcacggtattgatccacaaactcatcgtcagattaacgaatccaaaacggtgtcgtctcaagttgttgttcctattcaaaacgatgccgttgagtattctttttccaatttagccgttaaaccgaagacggaaaattcctccgataacggagcttcgactagcggcacgacgacggacgaggatctccggcagaatggggagtgttattatagtgataattcaggacatataaagctgaatttggatttaactcttgggtttggatcctggtcgggtcggatagtcggagtcgggtcatcggctgattctaaaccgtggtgcgacccggtgatggaggcgcgtttgtcactgttgtaa

SEQ ID NO: 2141 - DNA, 837 bp, Arabidopsis thaliana
  Clone ID: AT_F4F7.C1.o19.tg
atgtcaaatataacaaagaagaagtgtaatggaaatgaagagggtgcagagcagaggaaagggccttggacactcgaggaagacactcttctcaccaattacatttcccataacggtgaaggccgatggaatctgctcgctaaatcttctggaaaaagttgtagattgagatggttgaattaccttaaacccgacataaagcgtgggaatctcactcctcaagaacaacttttaatccttgagctccattctaaatggggtaataggtggtcaaaaatttcgaagtatttaccaggaagaacagacaacgatatcaaaaactactggagaactagagtccagaaacaagcacgccagctcaacatagattccaatagccacaagttcatagaagttgttcgtagcttttggtttccaagactgatcaacgagattaaagacaactcatacaccaacaatattaaagctaatgctcctgatttacttggaccaattttacgagacagcaaagatttgggtttcaacaacatggattgttccacttccatgtcagaagatctcaagaaaacttcacaattcatggatttttctgatcttgaaaccacaatgtccttggaaggatcacgagggggtagtagtcaatgtgtgagtgaggtttatagctccttcccttgcctagaggaggagtacatggtggccgttatgggcagttcagacatttcagcattgcatgattgtcacgtggctgattccaagtacgaggatgatgtgacacaagatctaatgtggaacatggatgacatttggcagtttaacgagtatgcacactttaattag

SEQ ID NO: 2142 - DNA, 924 bp, Arabidopsis thaliana
  Clone ID: AT_F9G14.C1.o150.tg
atgacctcaaccaatccggtggtcgccgaagtaataccggcggaaacttctacagatgctacagagacgacgattgcaacgacggaagctggtgaagcaccggagaagaaggtgaggaaagcttacacaatcaccaagtctagagagagttggactgaaggagaacacgacaagtttctggaagctcttcaattgtttgatcgtgactggaaaaagatagaagattttgttggttcaaagacagttattcagatcaggagccatgcccaaaaatactttctaaaggtccaaaaaaatgggactttagcacatgttccaccccctaggcctaagcgcaaagctgctcatccatatcctcaaaaggcatcgaaaaatgctcaaatgtcgcttcacgtttccatgtcctttcctactcaaataaataacctgcctggatatactccatgggatgatgatacatctgcattgttaaacattgctgtaagtggggttattccaccagaagatgaacttgatactctttgtggagcagaaggcatgcgttctcatctgtactcagtttttatattttgctttgttgatgttggatcaaatgacatgataagtgaaactagtccttcagcatctggtatcggaagctcaagcagaacactatcagattctaagggtttgagactggcgaaacaagctccctcaatgcatggtcttcctgattttgctgaggtttataacttcattgggagtgtgttcgatcctgacagcaaaggccgcatgaaaaagctcaaggaaatggatcctataaatttcgaaactgttttgctgttgatgagaaacctcacagtgaacttgtcaaaccctgactttgaacctacttctgaatatgttgatgctgcagaggaaggtcatgaacacttaagctcttag

SEQ ID NO: 2143 - DNA, 891 bp, Arabidopsis thaliana
  Clone ID: AT_T6H22.C1.o4.tg
tggggaaaggaagagcaccatgctgcgacaagaacaaagtgaagagagggccatggagccctcaagaagatctcactctcatcacttttattcaaaaacatggccatcaaaactggagatctcttcccaagcttgctggattgttgagatgtgggaaaagttgccgactaagatggataaactatctgagaccggacgtgaagcgaggcaactttagcaaaaaggaggaagatgctatcattcactaccatcaaacccttggaaacaagtggtcaaagatcgcgtccttcttgccgggaagaactgacaacgagatcaaaaacgtgtggaacacgcatctcaagaaacgactcactccatcttcttcttcttcatccctctctagcactcatgaccaaagcacaaaagcagatcatgacaagaactgtgacggggctcaagaagaaatacattcagggttaaatgagagccaaaactcagctacttcgtcacatcaccaaggcgagtgtatgcacacaaaaccagagcttcatgaggttaatggactcaacgagatccagttcctgctcgaccatgatgactttgatgatataacctctgagtttcttcaggataacgatatcttatttccgctagactctcttcttcataaccaccaaactcacatttcaacccaagaaatgactcgagaggtaaccaaatcgcaatcatttgatcatcctcaaccggatatcccatgcggatttgaagacacaaacgaagaatccgacttgaggagacagctggttgaatcaaccacacctaacaatgagtacgacgagtggttcaacttcattgacaaccaaacttactttgatgattttaatttcgtcggagaagtatgtctatgaa

SEQ ID NO: 2144 - DNA, 2424 bp, Arabidopsis thaliana
  Clone ID: AT_F8K7.C1.o13.tg
atgccagcttctgaagatagaagagggaaatggaaaaggaagaagagaggggggttatcggcggcgaggaaaccgaaacaagaggaggaagatatggaggaagaagacgaagagaataacaacaacaacaacgaagaaatggatgacgttgaaaatgccgatgagcttcagcaaaacggcggcgcaactcccgatccgggacttggtattggcgaggtagttgaagattctggttcgcgcatctctgatttcccggcagtggttaagcgtgttgtgatccggccacacgcgtctgtaatggctgttgtggcggctgagagagctggtttgataggggagactagagggcaaggttcacttccagctctggagaacatttcgtttgggcaattgcaagcgttatctactgtacctgctgattctcttgatcttgagaggagtgatggatcgtcttcggcttatgttatctctccaccacctattatggatggagaaggagttgttaaacggtttggggatctggttcatgtcttgcctatgcattcagattggtttgcaccaaacacagtagatcgacttgaaaggcaagtggtgccacagtttttctctgggaaatcgccaaatcatacacccgaaagttatatggaattcaggaacgccattgtttccaaatatgtagagaaccctgaaaagacactgacgatttctgattgccaaggattggtagatggtgttgacattgaagattttgcacgagttttccgttttcttgatcactggggaataatcaattactgtgccactgcccagtcacatcctggccctttgagagatgtatcggatgtgagggaggacacaaatggcgaggtcaatgtgccgtctgctgctttaacatctattgatagtttgatcaaatttgacaagcccaactgtagacacaaggggggtgaagtctattcatccttgccaagtttggatggtgacagccctgacttggacatcagaattcgtgaacacctatgtgatagtcattgcaaccattgttctcgaccgcttccaactgtgtacttccaatcgcaaaagaagggggatatactcttatgctgtgattgttttcaccatggaagatttgttgttggacattcttgtcttgactttgtaagagtggatccaatgaaattttatggcgatcaagatggagacaattggactgatcaggaaactctcttgcttcttgaagctgtggaactctacaatgaaaattgggttcaaattgctgatcatgttggttccaagtcaaaagctcaatgcattcttcattttcttcgattacctgtggaggatggtctattagataatgttgaggtttctggtgtaactaatacggaaaaccctacaaatggatatgaccacaaaggaacagattcaaatggggatttacctggatattccgagcaaggttctgacactgagatcaagcttccatttgtgaagtctccgaatccggttatggcattggttgcatttttggcatcagctgttggacctcgagttgctgcgtcctgtgcccatgaatccctctcggttttatctgaggacgataggatgaaatctgagggaatgcaagggaaagaagccagcttgcttgatggagaaaatcaacagcaagatggagcacacaaaacatcaagccaaaacggagcagaagcgcagactccactgccacaggataaggttatggcagcatttagagccggtctatcagctgcagcaacaaaagcaaaattgtttgctgatcatgaggaacgcgaaatccagagactttctgctaatatcgttaatcaccagctgaagaggatggagctgaaattaaagcagttcgcagaaattgaaacactgttgatgaaagaatgcgaacaagtagagaaaacccgtcagagattttctgcagaacgggctcgtatgctctcagcaagatttggatctcctggaggaatctctccacagactaataatctccaaggcatgtctctatccacaggtggtaacaacatcaattctctcatgcatcagcaacatcagcaacaacaagcttccgcaacttctcaaccaagcataatcccaggattcagcaacaacccgcaagttcaagcacagatgcatttcatggcacgacaacaacaacaacaacaacaacaacaacaacaacaacagcaagctttctcgtttggcccgagattacctctcaatgcaatacagaccaatgcaggatcaacagcttcaccaaacgtcatgtttggcaacaaccaactaaataaccctgcagcagctggagcagcatcgatcaaccagccttcgtttagtcacccgatggttaggtcttccacaggttcaggctcagggtccggcttaggcttaaactaa

SEQ ID NO: 2145 - DNA, 1011 bp, Arabidopsis thaliana
  Clone ID: AT_T15B16.C1.o4.tg
atgggaagacattcatgttgttacaaacagaaactgaggaaaggactttggtctcctgaagaagatgagaagcttcttcgttacatcactaagtatggtcatggttgctggagctctgtccctaaacaagctggtttacagagatgtggaaaaagttgtagattaagatggataaattatttaagaccagatttgaagagaggagcattttctcaagatgaagaaaatctcattattgaacttcatgccgttcttggcaatagatggtctcagatagctgcacagcttcctggaagaaccgacaatgaaatcaagaatctttggaattcttgtttgaagaagaaattgaggctgagaggaattgacccggttacacacaagctcttaaccgaaatcgaaaccggtacagatgacaaaacaaaaccggttgagaagagtcaacagacctacctcgttgagactgatggctcctctagtaccactacttgtagtactaaccaaaacaacaacactgatcatctttataccggaaatttcggttttcaacggttaagtctagaaaacggttcaagaatcgcagccggttctgacctcggtatctggattccccaaaccggaagaaaccatcatcatcatgtcgatgaaaccatccctagtgcagtggtactacccggttcaatgttctcatccggtttaaccggttatagatcctccaatctcggtttaattgaattggaaaactcattctcaaccgggccaatgatgacagagcatcagcaaattcaagagagtaactacaacaattcaacattctttggaaatgggaatctgaattggggattaacaatggaggaaaatcaaaatccattcacaatatcgaatcattcaaattcgtccttatacagtgatataaaatcagagaccaatttttttggcacagaggctacaaatgttggtatgtggccatgtaaccagctccagcctcagcaacatgcatatggccatatataa

SEQ ID NO: 2146 - DNA, 1005 bp, Arabidopsis thaliana
  Clone ID: AT_F6N7.C1.o15.tg
atgactgttcctggtctcggaccttcctttacagccgccgtttcttcttcttcttcaccaacgacttcttctacggccgtggctgtggcggatgtgacggcgatggtttcttcttcggaggaggatttgagtaagaagattaggaagccttatactattactaagtctagagagagctggacggagcctgagcatgataaattccttgaagctcttcaattgtttgatagagactggaagaagattgaagcttttattggttcaaagacagtgattcagatacgaagtcatgctcagaagtattttcttaaggtacaaaagagtgggaccggtgaacatctccctcctcctcgacctaaaaggaaagccgctcatccatatcctcagaaggctcacaagaatgtgcaactgcaagtaccagggtcattcaagtcaacatctgaaccaaatgacccaagttttatgtttaggcctgagtcttcttcaatgctgatgacttcgccaaccactgctgctgcggctccatggacaaataatgcgcaaacaattagcttcactcccctcccaaaagcaggagcaggagctaataacaattgttctagtagttctgaaaatactccaagaccacgatccaacagggacgcaagagaccatggaaatgttggccattcattaagagttttaccggactttgcccaagtatacggcttcattggaagtgtgtttgacccatatgcaagtaatcatctacaaaagctgaagaagatggaccccatagatgttgaaacagtgttactattgatgagaaatctatccatcaacttgtctagtcctgactttgaggatcatgtaagtattttactccacaaactactagtcaattttaactcgaaaccctataccagaactaacctcaagactcttattgatttcaaaaacaatagagacggcttctttcgtcttatgatatcggatctgagacagcaactgatcatggtggagtga

SEQ ID NO: 2147 - DNA, 807 bp, Arabidopsis thaliana
  Clone ID: AT_F17P19.C1.o16.tg
atgaccaaatctggagagagaccaaaacagagacagaggaaagggttatggtcacctgaagaagaccagaagctcaagagtttcatcctctctcgtggccatgcttgctggaccactgttcccatcctagctggattgcaaaggaatgggaaaagctgcagattaaggtggattaattacctaagaccaggactaaagagggggtcgtttagtgaagaagaagaagagaccatcttgactttacattcttccttgggtaacaagtggtctcggattgcaaaatatttaccgggaagaacagacaacgagattaagaactattggcattcctatctgaagaagagatggctcaaatctcaaccacaactcaaaagccaaatatcagacctcacagaatctccttcttcactactttcttgcgggaaaagaaatctggaaaccgaaaccctagatcacgtgatctccttccagaaattttcagagaatccaacttcatcaccatccaaagaaagcaacaacaacatgatcatgaacaacagtaataacttgcctaaactgttcttctctgagtggatcagttcttcaaatccacacatcgattactcctctgcttttacagattccaagcacattaatgaaactcaagatcaaatcaatgaagaggaagtgatgatgatcaataacaacaactactcttcacttgaggatgtcatgctccgtacagattttttgcagcctgatcatgaatatgcaaattattattcttctggagatttcttcatcaacagtgaccaaaattatgtctaa

SEQ ID NO: 2148 - DNA, 648 bp, Arabidopsis thaliana
  Clone ID: AT_MUK11.C1.o8.tg
atggcgtcaagtcagtggacgaggtcggaggataagatgtttgagcaagctttggttctttttcctgaaggatctcctaatcggtgggagagaatcgctgatcagcttcataaatctgctggtgaagttagggagcattacgaggtcttggttcatgatgttttcgagattgattctggtcgagttgatgtccctgattacatggatgactcggcggctgcggcggcgggttgggattccgctggtcagatctcttttgggtctaaacatggcgagagtgaacgcaaaagaggaactccttggacagagaacgaacacaaattgtttctgatcggattaaagagatatggtaagggagattggaggagtatctcgagaaacgttgtggtgacgaggacaccgacgcaagtcgcgagtcacgctcagaagtattttctgagacagaactcggtgaagaaggagaggaaaaggtcgagcatccatgatataactacggttgatgctactttggctatgcctgggtctaacatggactggactggccaacacgggagtcctgttcaggcgccgcagcagcaacagattatgtctgagttcggtcagcaattgaatcctggtcatttcgaggattttgggtttcggatgtga

SEQ ID NO: 2149 - DNA, 810 bp, Arabidopsis thaliana
  Clone ID: AT_K7M2.C1.o6.tg
atgagtttgtggggagggatgggaggaggatggggaatggtagaagaaggttggagaaaagggccttggactgctgaagaagaccgccttttgatcgattatgtgcagcttcacggtgaagggcgatggaactctgttgcgaggctcgcggggttgaagagaaatgggaaaagctgcaggttaagatgggttaactacctaagaccagacctcaagagaggacaaatcactcctcatgaagaaaccattatccttgagttacatgctaagtggggcaataggtggtccacgattgcacgtagtttaccgggaagaacagacaacgaaatcaagaactattggcgaacccatttcaagaagaagacgaagtctccaactaacagtgcggagaagacaaagaaccgaatcttgaagaggcaacaatttcagcagcaaagacaaatggagttgcagcaagaacaacagttgcttcaattcaatcaaatcgacatgaaaaagatcatgtcgttactagatgacgacaacaacaatggtgataacaccttcagcagtagcagtagtggcgaaagtggagcattatatgtacctcatcagatcacacattcaacaacaacttctggttgtgaaccaaatagtaacgggtattacccggtggttccggtaacaatacctgaggctaatgtgaatgaagataacgctatttgggacggtttatggaatctggattttgaaggacaaggaagttttggtggcgctgcttgtgccccaaggaagcactatttccagaacatggtcattcccttctgttaa

SEQ ID NO: 2150 - DNA, 1014 bp, Arabidopsis thaliana
  Clone ID: AT_MQM1.C1.o9.tg
atgaatttaggacaggaaattagtgtcggatcgtcttggagcaaggatgatgatattgctttcgagaaagcccttgcaatttataacgataaaacagagattcgttggaaaaaaattgctacagttgttccgggaaaaactttagaacaagttatagagcattacaacattttagctcgtgatgttatgttgattgaatctggatgtgtacgtcttccagattatgatgattttttagaagaaccaaatcacaatgcttttggtaaagaaagaagcatattggaaggtggcaacgatcgcaaatatgagtctaaacacaaaggtaaatcaaaactaaagcaaaaacgacgaaggggtgttccttggaagccttttgaacacagacaatttctgcatggtttgaaaaaatatgggaaaggtgattggcgtagtatttctcgtcactgtgtagtgacaagaacatcaactcaggttgcaagtcatgctcaaaaatactttgcacatatcaactcagaggataaaaagagaaagaggccaagcattcatgacatcactattgcggaaaacaaaagtatctcaacaaaacaaagaccaatcacatggcaaaaaataaacaacaatggtgctactgcttccaacactcaagccaatcaaaccactttgcaaccatcacttgacattcctatatatggtacacacaacaacatatggaatgcacaagccactcaagtcatttcacagccatcacaaaaccatcctacatatgatgcacccatcatatggaacacacaagtcgcttcgcaaccatcggccaatattcctatgtatggaacgtccaccataagtcaaccaatggttggaccaatgctctcaccttttggaacaaacttgaaccacttggctccatctcatatgacttctggagttcaacatgattcagtaccttactactcaggtcctagtgcaccgatcaacatggattcaataccatacaacattgacttatataactag

SEQ ID NO: 2151 - DNA, 1299 bp, Arabidopsis thaliana
  Clone ID: AT_F4P9.C1.o38.tg
atggccatgaaagctcccgatcccggcggatctggggaaattctcccgagcactccctctctttccgaaactacgtctggaggcgccgcagcagcttctaagtcggctcaattgccgtcttcttcttccgatatcgataatattcacgtacctagctactccagttggttttcatggaccgacattaacgattgcgaggtccggtcactgccggaatttttcgattcgagatcttcatccaaaaaccctaagttttatctctacttgaggaactcgattattaagcagtacagagacgaccatcctcggaagattagtttcactgacgttcggagaactctcgtcagtgatgttgtctctattcgtcgcgtctttgatttcctcgattcatggggacttatcaactataatagctccgcctctgctaagccgctcaagtgggaagaaaaagaggccggaaaatccgccggagatgctgcttctgagccagccacaactgtcaaagaaactgccaagagaaactgcaatggctgcaaagcaatttgcagcatagcttgtttcgcctgtgataagtatgacttgacattgtgtgcgaggtgctatgttcgtagtaattatcgtgttggtattaactcctcggagtttaaacgagttgagattagtgaggagtcaaagccagagtggtctgataaggaaattctgctgctgctggaagctgttatgcactatggagatgattggaagaaggttgcatcgcatgttattggtagaacggagaaggattgtgtttctcagtttgtcaagcttccgtttggggaacagtttgtaaaagagtctgactctgaggatggtttagagatgtttgatcagatcaaggactctgatattcctgaatctgaaggaatagataaagacggttcttctcccaacaagcggatcaaattaacacctcttgcagatgcaagcaacccaataatggctcaggctgcttttctttcagctttggctggcacaaatgttgcagaagcagcagctcgagcggcagtgagagctttatctgatgtagactacgaggctgacaaaaacgccagtagagacccaaatcgacaagatgccaatgctgcatcgagtggtgaaaccactagaaacgaatctgaaagagcttgggcagatgcaaagtctttaattgagaaggaagagcatgaggtagaaggagcaatcaaagagactgttgaagttgaggttagtaacaatctgcaactttccatagactttttattatatggttatactcaatga

SEQ ID NO: 2152 - DNA, 750 bp, Arabidopsis thaliana
  Clone ID: AT_F2H15.C1.o21.tg
atgatgtgtagtcgaggccattggagacctgcagaagacgagaagctaagagaactcgtcgaacaatttggtcctcataattggaacgccatagctcagaagctctctggtcgatctggtaagagttgtagattgagatggtttaatcaattggatcctaggattaaccgaaaccctttcacggaggaagaagaagaaaggcttttagcgtctcatcggatccatgggaacagatggtctgtgatcgctagattttttcccggtcgaactgataacgctgttaaaaaccattggcacgtcatcatggctcgtcgtggccgagaacggtccaagctccgtccacgaggccttggccatgatggcacggtggctgcgactgggatgattggtaattataaagactgcgataaggagagaagattggcaaccacaaccgctatcaattttccttatcaattctctcatattaatcattttcaagtcctcaaagagttcttgaccggaaagatcgggttcagaaatagtactactccaatacaagaaggagcaatagaccaaactaaacgaccgatggagttctacaattttcttcaagtaaacacggattcgaagatacacgaattgatagataattcaagaaaagacgaagaagaagatgtcgatcaaaacaaccgaattcctaacgagaattgtgttccatttttcgactttttgtctgttggaaactctgcctctcagggtttatgttaa

SEQ ID NO: 2153 - DNA, 1011 bp, Arabidopsis thaliana
  Clone ID: AT_MBK20.C1.o15.tg
atgtcaagaaagccatgttgtgtgggagaaggactgaagaaaggagcatggactgccgaagaagacaagaaactcatctcttacattcatgaacacggtgaaggaggctggcgtgacattccccaaaaagctggactaaaacgatgtggaaagagttgtagattgcgatgggctaactatttgaaacctgacatcaagagaggagagtttagctatgaggaggaacagattatcatcatgctacacgcttctcgcggcaacaagtggtcagtcatagcgagacatttgcccaaaagaacagataacgagattaagaactactggaacacgcatctcaaaaagctcctgatcgataagggaatcgatcccgtgacccacaagccacttgcctatgactcaaacccggatgagcaatcgcaatcgggttccatctctccaaagtctcttcctccttcaagctccaaaaatgtaccggagataaccagcagtgacgagacaccgaaatatgatgcttccttgagctccaagaaacgttgttttaagagatcgagttctacatcaaaactgttaaacaaagttgcagctagggcttcttccatgggaactatactaggcgcctccatcgaaggaaccttgatcagctctacaccgttgtcttcatgtctaaatgatgacttttctgaaacaagtcaatttcagatggaagaatttgatccattctatcagtcatctgaacacataattgatcatatgaaagaagatatcagcatcaacaattccgaatacgatttctcgcagtttctcgagcagtttagtaacaacgaaggggaagaagctgacaatactggaggaggatataaccaagatcttcttatgtctgatgtctcatcaacaagcgttgatgaagacgagatgatgcaaaacataactggttggtcaaattatctccttgaccattccgatttcaattatgacacgagccaagattacgacgacaagaacttcatatga

SEQ ID NO: 2154 - DNA, 2112 bp, Arabidopsis thaliana
  Clone ID: AT_T30D6.C1.o16.tg
atggcttctagttcaatgagcacctcatcatggacagctagagaggacaagcaattcgaaatggcgttggcgaaattcgacaaggacactcctgaccgttggcaaaaaattgcaagggcagttggtgggaaatcaactgaagaagtaaagcgacactatgaattgctccttagggatgtgaatgacattgagtcaggacgctatccacaacctagattatgttccgcggcggcgatagctgctgcgttcacttcaatgtcgatgtcacagaaccgcgcttacgctgactcgcgatttcgctttcctttcttctcttcttcacctccggcagaagaatctccaaccgatcataagtcttcttcgaattctaaatcggagactaaacctgactccgatgagcctaaaggatctggtttcgatcctgagtcattggaaagaggtgctaaagctcttcgtgaaatcaatagctctcctcattccaaacaggtgtttgatctaatgcgaaagcaggagaagactcgattagctgaattagcggctgagaaagaacataatgaagctattcaagctagcaaggacattgaaagacagcggaaattggcagaggatcagagaaatttagtgcagcaacaggcccaagcgaaagcgcaaaatcttagatatgaggatgagttggccaggaagagaatgcagacagataatgaagctcagagacggcataatgctgaattggtttcgatgcaagaagcatcttctatacggaaagagaaagcaagaattgccacggaagaacagattcaagcacagcagcgcgagactgagaaagagagagcggaacttgagcgagaaacaattcgcgtgaaagctatggctgaggctgaaggccgagctcatgaagctaaactcactgaggagcagaatagaagaatgcttctagataagataaatggtgaaagggagaaatggcttgcagcaatcaacacgactttcagtcacattgaaggaggagtaaggaccttattaactgatcgaagtaaattgattatgactgttggaggagttacggcattagccgctggggtttacacaactcgagaaggtgctagggttacctggggttatatcaatagaattcttgggcagccatcactgatcagagaatcttccatgggccgattcccatgggcaggctcagtgtctcagtttaagaacaaacttagcacagctgcaggggcagcagcatctgcagaaggagaaaagcctcttgaaaatgtaattctccatcgttctttgaagacgagaattgagcgtcttgcaagagccacagcaaataccaagtcacataaagcaccattccgaaacatgatgttttatgggcctccaggtaccggaaaaactatggtggcgagggagattgctcggaagtcgggtcttgattatgctatgatgacaggaggagatgttgctcctcttggtgcacaggctgttacaaagatccatgaaatatttgattgggctaagaaatcaaacaaagggttactgcttttcatcgatgaagctgatgctttcctatgcgaacgtaacagcacttacatgagtgaggctcagcgcagcgctctgaacgcgttgctctttcgaaccggtgatcaatcgcgggacatagtccttgtcctggctacaaacagacctggagatctcgacagtgcagtcactgacaggatcgacgaagttatcgagtttcctctccctggtgaagaagaacgcttcaagctcctcaagctctatctcaacaagtacctaatgggtgacgacaagaaaggtgagaaagactcaaaccttaaatggagcaacttgttcaagaagaagaagtcacagaagataaccattgaaggagacctaaccgaccaagtgattaaagaagctgcaaaaaagacagaaggcttttctggtcgtgaaatcgctaagcttgtcgccggtgttcaagctgcggtatatggacgacaggattgtgtcttggattcccaactttttgaagaaattgtggattataagatcgaagaacatcaccagagaatcagacttgcgactgaaggtggccaatcgtttccgtag

SEQ ID NO: 2155 - DNA, 786 bp, Arabidopsis thaliana
  Clone ID: AT_F20P5.C1.o26.tg
atgtcacgtagttgctcacagtgtggaaacaacggccacaactctcgcacatgtccgacggacataactaccaccggtgacaacaacgacaaaggcggcggggagaaagccatcatgctttttggcgtccgcgtcacggaagcttcatcatcttgttttagaaaaagtgttagtatgaacaatctctctcaattcgatcaaactcctgatcccaacccaaccgatgacggtggttacgcttcagacgacgtcgttcacgcctccggtagaaaccgtgaacgcaaacgaggaactccatggacagaggaagaacatagattgtttcttactggattgcataaagttggaaaaggtgattggagaggaatctctagaaactttgttaaaactcgaacacctactcaggtagcgagtcatgctcagaaatattttctccggcggactaatcagaatcgtcgtcgtcgtagatcaagcctcttcgatatcactcccgattcgtttataggatcatcaaaagaagagaatcagttacagactccattggagctaatccgtccagttccgattcctattccgattccaccgtcgcggaagatggctgatttgaatcttaacaagaaaaaaactccagcgacaacggagatgtttccgctgtcgctgaatttgcagaggccgtcttcgtcgacatcgtcatcgtccaatgaacagaaggcacgtggctcacgtgcctcctcggggttcgaggcgatgtcgagtaatggagatagtataatgggagtggcttga

SEQ ID NO: 2156 - DNA, 1746 bp, Arabidopsis thaliana
  Clone ID: AT_K13P22.C1.o2.tg
atgatcatgtacggaggaggaggagcagggaaggacggtggatccaccaatcacttatcagacggaggagtgatattgaagaaaggtccatggacggcggcggaagatgagatacttgctgcgtacgttagagagaacggtgaagggaattggaacgccgttcagaaaaacacaggtttggctcgttgcggcaaaagctgccgtcttcgatgggccaatcacctccgaccaaatctgaaaaaaggctctttcaccggtgacgaagaacgtctcatcattcagcttcatgctcagcttggtaacaaatgggctcgcatggctgctcagttaccgggaagaacagacaacgagattaagaactattggaacacgagattgaaacgacttcttcgccaaggacttcctctttatcctccagatattatccctaaccatcaactccatccacatccacatcatcaacaacaacagcaacataaccatcatcatcatcatcatcaacaacaacaacaacatcaacaaatgtattttcaaccacaatcttcacaacgaaacacaccatcatcttcccctcttccatctccaacaccagcaaacgcaaagtcctcatcatccttcacttttcataccacgactgctaacctcctccatccacttagccctcacactccaaacacaccatctcaactctcttccacaccgcctccaccaccactttcctctcctttatgttcccctcgcaacaaccaatacccgacccttcccctctttgccctcccgcgttcccaaatcaacaacaacaacaacggaaatttcactttccctagacctccacctctccttcaaccgccttcatcactcttcgcaaaacgttacaacaatgctaacactcctcttaattgcatcaaccgcgtctcaaccgcaccattttcccctgtttcaagagactcctacacttcctttcttacattgccttacccttccccaaccgctcaaaccgctacttaccacaatactaataacccttactcttcctctccttccttctctttaaacccttcttcttcttcttaccctacatcaacttcttccccaagctttcttcactcccattacactccttcttccacctcatttcataccaacccagtttactccatgaaacaagagcagctcccttcaaaccaaattccccaaatagatggcttcaataacgtcaacaacttcacagacaacgagagacagaatcataaccttaacagttccggtgctcatagaagaagtagtagctgcagcctcttagaggatgtcttcgaagaggccgaagctttagcctctggaggcagaggccgacctccaaaacgaagacaactcacagcttctcttccgaaccacaacaacaacaccaacaacaacgacaacttcttctcggttagtttcggacattatgattcttctgacaacttatgttccttgcaagatttgaaatcaaaggaagaagagtctcttcaaatgaacacaatgcaggaggacatagctaagcttcttgattggggaagtgatagtggagagatctctaatggacaatcatctgttgtcactgacgacaatcttgttcttgatgttcatcaattagcttcactattcccggctgattctacagccgtcgtagccgcaacaaacgaccaacacaacaagaataataacaataattgttcctgggatgacatgcagggaataaggtag

SEQ ID NO: 2157 - DNA, 357 bp, Arabidopsis thaliana
  Clone ID: AT_T10P12.C1.o11.tg
atgacagagtctattgatttgaatcgattagagtccgagtctgataacaacaccgacgacgttactcctatttttgcaattgatgactctgcaaaagggtatttttctcttaataggaggaatgatgtccaatgccaacaccgttggttaaaggttcttgatccaagcctccaaaaaggagcttggaaaaaagaggaagataaactcttaagtgagttggttaaaaattatatatgtaattatgtatatatattcctttcgatactatttaactataataaaaaatcaaatattaatagttatttttttggtacatcaaaaaggataaaatttattatatttctattttataaatga

SEQ ID NO: 2158 - DNA, 444 bp, Arabidopsis thaliana
  Clone ID: AT_MGF10.C1.o19.tg
atggcggactctaatcaattcaatatgccaaaaccactcttgagcgcaaacgaagacaccatcatgaatcgacgtcaaaataaccaggtaatgatcaagaccgagcagatcaagaagaagaacaagagatttcagatgaggaggatatgtaaacccacaaaaaaagctagcatcatcaaaggacaatggactcctgaagaagacaagttattggtgcagctagtggaccttcacggaactaaaaaatggtctcagattgctaagatgcttcaaggacgagttggaaaacagtgcagagaaaggtggcataaccatctccgtcccgatatcaaggtctcttattttattttattttcattttcttattttcataggagaaacaaaaacaaaatatcatcttcgatactttcaaattcattacatgatacattgagaatcttctaa

SEQ ID NO: 2159 - DNA, 1326 bp, Arabidopsis thaliana
  Clone ID: AT_F27J15.C1.o31.tg
atggagagtgtggtggcaacatggagcagagaagaagagaaagcattcgagaacgcaattgcgttgcattgtgtagaggaagagataacagaggatcaatggaacaaaatgtcgtcaatggtaccaagcaaagccttagaagaagtaaagaaacattaccaaatccttttagaagatgtcaaagcaatcgagaatggtcaagttcctttacctcgttatcatcaccgcaaaggtctcatcgtagatgaagcagcagcagcagctacttctcctgccaacagagactctcattcctctggatcatctgagaagaaaccaaatcctggcacctccgggataagtagctccaatggaggaagaagtggtggctcgagagctgagcaagagagaagaaaagggattccatggactgaagaagagcatcggttgtttcttttgggtttggacaagtttgggaaaggagattggagaagcatttcaaggaactttgtgatctcaagaactccaacacaagttgcaagtcatgctcaaaaatacttcatcaggcttaactcgatgaaccgagatagaaggcggtctagcattcacgacatcaccactgaaccctggttaagaatctttgatgtgagaactgggagaataatggctggagtagatggtcatgttgttgacaactcatggcctataattagatgggctgggggaaaagatgataaatactttgccacacttatcaaaaacactactgctacgcaagaaggcgcggctgtgaattttgatgatgttgtgggcatgtcttggtctcctactgaaccaatcctttcactgttgaaaggggatgtcaagaaccagcctaaaaaggttgtttttctgcaaataccgggctatgtggagctgatgcacaaggatattctcagcgttagcgactgtaagatgtactggcagagcaaaggaaagtatcttgctgtccaagttactcgacatacgtgctctctgtttgagcttttccgcttcaataaggtacaaggcattaccaccgaggctcttgaagtggatgagaaaatccttgctttcgcgtgggagccgagcggtcacaggtttgccgtgattcacggagatcaatcaaagccaaatgtcagtttctattctatggagacaccccaaaaccctggaaaagtttcaaagctagctacctttgacgacaaggaagctgatgctctcttctggtcgccaagaggcaagcacatcgttctcgctggtttgaaagctgcttcaatggccatctcgagtttttcgacgtggataagcttgagatgtagtaggtag

SEQ ID NO: 2160 - DNA, 1032 bp, Arabidopsis thaliana
  Clone ID: AT_T8G24.C1.o3.tg
atgatgatgaggaaaccggacattactacgatcagagacaaaggcaagccaaatcatgcatgtggtggtaataacaacaaaccgaagctaagaaaaggactttggtcgcctgatgaagatgagaagctgataagatacatgttgactaatggacaaggatgttggagtgacatcgctagaaatgctggtcttttacgttgtggtaaaagttgtcgccttcgctggatcaattacttgaggcctgatcttaaacgtggatccttctctcctcaggaggaggatctcatcttccatttgcattccattcttggtaacaggtggtctcaaatagctactcggcttccaggtagaacagacaacgagatcaaaaacttttggaactcgacattgaagaagcggcttaagaacaacagcaacaacaatacttcatcaggatcatcacctaacaatagtaatagtaattccttggacccaagagatcaacatgtggatatgggaggcaactcaacttcattgatggatgactatcatcatgatgaaaacatgatgacagtggggaacaccatgcgcatggactcttcctccccattcaatgttggaccaatggttaatagtgtgggcttaaaccaactttatgatcccttgatgatatcagtgccggataacggatatcaccaaatgggaaacacagtgaatgtgttcagcgttaatggtttaggagattatggaaacacaattcttgatccaattagcaagagagtatcagtagaaggtgatgattggttcattcccccctcggagaataccaacgtcattgcttgtagtacaagcaacaacctaaacttacaggcccttgatccttgcttcaatagcaaaaatctttgtcattcagaaagcttcaaggtagggaatgtgttggggatagagaatggttcttgggaaatagaaaaccctaaaatcggagattgggatttggatggtctcatcgataacaactcttcttttcccttccttgatttccaagtcgattga

SEQ ID NO: 2161 - DNA, 516 bp, Arabidopsis thaliana
  Clone ID: AT_F10O5.C1.o6.tg
atgaaggacgtttatgccaaggagccatggttgctggaccattccaacgatccttttttcaaggaagacgagtggtactacttctcggcaaggactcagatctccgagaaaaagattggacatggtaactactcgaagcggaagatcaccagagacgacaacgatggcatcgaccgagggaagtggaggtggacccggaggaagaagataagtttgaggatagtcgtctggaagattcagaagtataagaagtccaagaaggacaagaaggatcatcagcatgaagcatcttcttcctctaagccgcagccgatcaagaaaaagaagtccaagaaggatcatcatgacgaagcttctacttcttacttggagcagcagcctatcaatattgagtgtgagtctcttctagctgcttatttggaacaggagcagccactgctatgggatgttccgaacaaatcatcatcttcttgctctgttgcggaaacagaaagcagaatggagaaggagacatga

SEQ ID NO: 2162 - DNA, 525 bp, Arabidopsis thaliana
  Clone ID: AT_T13D8.C1.o13.tg
atgaagtcaagacgtgaacaatcaatcgaagaagcaatcgtcgcaaattatttgaagatgatgatcgataacgtaaacgtttggcctcgccacttcctccgaagcgaagacgtgtactgcaagaatccgtggacgcttttcgttactagagatcctataatcctacacttcggacgatacttcttcgttaatcggagtgtgaattcaggtttaaccgatggatgtgaatacggttgttggagaatcatcggtcgtgatagagtgatcaagtcggtgacgaccgggaagattctagggttaaagaaggtttataagttctgtgaaactgatcggaaaccgaaatcggtttttaagttcttggaaaaggagaagagaagagtaagagatagacgaatctgggcgatggaagagtataggtttgcaagtacgtggaaacaagattacgtgatctgcaagattcgacgtctgtatccacaaccatttgactacatgttggcccagcacattcgaggttactataaatga

SEQ ID NO: 2163 - DNA, 264 bp, Arabidopsis thaliana
  Clone ID: AT_T6A9.C1.o33.tg
atggtatggttcttctttagttgtgatgaatataacgaagaaatattgaaaacgaattcgggttattggaaagaaactgtatccaacacaccaatcattggcaagtggataactagtaatggtgttaaaattggtgagaaacaagttttggttttccaatcgtatgaaaacatcaatggatccaaatccgattgggtaatgcacgtgtatcaaccaacgtttttgcctcctaatcaggtaatattccgaatttatgatgtttaa

SEQ ID NO: 2164 - DNA, 1422 bp, Arabidopsis thaliana
  Clone ID: AT_MHK10.C1.o12.tg
atgtcaaaccacccgaagatcacatcggcgcatcagaatgtggaggagaagctaagggaacttcaggagaggttctgtcatcttcaagctgctaggaaagaagggcggcatggtgaccttgcgcttttagaagcccaaatctctcagaatattcgggagtggcaagctgaactcactgctccttctcctgaatcttctctgttggttcgtcctactccattaccatacttctctatggtttatggttccaattctttgaaaaatagtgaatctggtgaaggtattagccaattccttgaggagtttgctcctctgttgaaattagacgaggaggatgatgcaactagtacgctaaaagaacatgctggagcaaagcctgatcctgagggtttttctcaaagcttgtgccctcctgaatggacatctgagaattttagtcaaagtcctttcaacggaaatttctcctgcggctttgaggatgctcttaatagcacagaaacacatggccagcaactccattatggatatgaagggtttgatccaagcataaactccgctcctgatttccatgaccaaaaactcagcagcaacttggatataacttctcagtatgattatattttctccgaagtgcgtcaggaactagataacagcccttccactaagcttgattcttctgaagagattgacaactttgctgaattttctactccatcaagtgtccgtgtgcctccatctgcttttctgggacctaagtgtgcactatgggattgcacaaggcctgctcagggctccgagtggtacctggattactgcagtaactaccatgggactctagctctgaatgaagattcgcctggcacagcacctgtattgaggccagggggcatcagtttgaaagataatctattgattgatgctcttcgtgcaaagactcagggtaagaatgttgggatcccagtgtgtgaaggagctgttaacacaaaatgcccatggaacgcagcagagctatttcatcttgaactggttgaaggcgaaacaattagagagtggctcttctttgacaaacctagaagagcatatgatagcggaaaccgaaagcaaagatcacttccagattacagtggaagaggttggcatgaatcaagaaaacaactgatgaaggaacaagaaggccagaagagatcttactatatggatccacaacctccaggtccctttgagtggcatctctttgaataccaaatcaatgaatctgacgcatgtgcgttatatcgcctagaacttaaagtaggaaatggaaagaagagtcctaagggaaagatttcaaaagaccctctggctgatctgcagaagaagatgggacagtttaaagtggcttcagacaaaccctctcctccaaccaaaggtcgtaaggagtga

SEQ ID NO: 2165 - DNA, 231 bp, Arabidopsis thaliana
  Clone ID: AT_T27C4.C1.o5.tg
atggtgaatccggtgggtttcagattccgtccgaccaaagaggagatcgtcgaccattacctccggccaacaaatttcgatggtgacacgagccatgtcgataggaatatcatgtttatgcaagataatcgcaatgattacagacctccaaactcattaactggtgtcttcagtgattgtagcagtgatgataatgattctgatttactatctccaaaaacagtaagctaa

SEQ ID NO: 2166 - DNA, 1044 bp, Arabidopsis thaliana
  Clone ID: AT_T13D8.C1.o17.tg
atgaaagttgaagacgaagcaacttatgagcttatcaaagacgaactgatgaaagcagaagacgaagcaacttattggctaatcaaagaagaactgatcaaagcagaagacgatgtaatcatctcacgttatctgaagcgtatgatcgttaacggggattcgtggcctgatcacttcatcgaagatgtagacgtgttcaacaagaatccaaatgaggagtttcattctcagagccctagattcgtgatcgttaaaccacgaacagagaattgtggtagaaccgatggatgtcaatctggttgctggaggatcattggtcgtgataaactgataaaatcgaaggagactgggaagattctagggttcaagaagattctcaagttctgcctaaagaagaaacctagagaatacaagagaagttgggtaatggaagagtacaggcttaacaataacttgaactgcaagcaagatcatgtgatttgcaagattcggtttatgttcgatgctgaaatcagtttcttgctagccaagcatttctcgtgtctctccactagatcaccgcttcctgcaaatcaattgttgccagcttatggagtctgtttcttcgattcagaagcggagggtgcattttatctggagacgataatcggttatgatggaaacacttggcctagctacgttaccaacgatgtgtaccgtttgcatccgttgacgcttgtggatcctcaagatgacaagtttaaagagttcggaacctgtatctttgctaacaggacaaagacttgtggtaaaaccgatgaatgtgatggtggtggttgctggaggatcgtagaaggtcatagagttatcaagtcaaaaggtaaggttcttggttacaggaggatttttcaattttcggaaaatgaggaaccaagaaatgtttgtgaaggagaagatccgaagaaaactgcttggttcatagaagagtataggcctgacgaaaataataagaaggataaagtgttatgcgttatcaagttcttaatcccactcaaccaaaggtaa

SEQ ID NO: 2167 - DNA, 1071 bp, Arabidopsis thaliana
  Clone ID: AT_MHJ24.C1.o4.tg
atggggaaaactaacttggcacctggttttcggtttcatccgactgatgttgaacttgtgagatactacttgaagaggaaagttatgggaaaaaagttccaagttgatgccattgctgaggtcgacatttacaagttcgaacctcctgatttacccgacaaatcatgtctagggactggagatcttaagtggtacttcttctgtccaagagaaaagaagtatcccaaaggcggtaaggcaaaccgctctactgaatgtggttactggaagaccacagggagagacagagatgtttcttataatgacgaagtcactgggaagataagaactctgatttatcactacgggaaaatacctcgcggtgatcggactgattgggtcatacatgaatatagacttgaagacaaagtactggctcaaaagaatgttcctcaggatacttatgtgctttgcgttctctttaagaaaaatggacttggaccaagacatggatctcaatatggtgctccatttaaggaagaggattggagtgataaggaagaagaatatactcagaatcatcttgtagctggtcctagtaaagaaaccagtctagctgctaaggcctcacactcgtacgctcctaaggatggtttgacaggagtgatctcagaatcttgcgtctctgatgtgccgccactaactgccacagtgcttccacctctaacaagtgatgttatagcttacaatcccttttcttcttcacctcttcttgaggttcctcaagtatctctcgatggtggcgagttaaattcgatgcttgatctcttttctgttgacaatgacgactgtttacttttcgacgatttcgactaccataatgaggtaagacatcctgatggttttgtaaacaaggaagctccggtgttcttaggagatggcaatttcagtggaatgtttgacctgagcaatgaccaagtcgtagagctacaggatctgatacagtcacccactcctcatcctccttctcctccagctcaagctagtattcctgatgactcaagaagcaacggtcagactaaggacgattaa

SEQ ID NO: 2168 - DNA, 1419 bp, Arabidopsis thaliana
  Clone ID: AT_F5D14.C1.o12.tg
atgacgtacacggaatttgtacgtacactaagcgaggctttcagtttgaagtccacagagatcaatcccataattagttactggatgccaggagagatgttagtgatgatagatactaaacgtcttcctgtctacattgacagtcaagtggggactcatggtgacgatgctgaaagtgaccgtgtgtgtgatagtgtttcaaatgttgatgaaaataatgagaccgtagatgagcaagacgacgttgaagacgataaaacagatgaggatgaagaggagggggacaacaaagatggtgatgggtatgatgattatcagggtgacgatggatctatgggggaaagtaccctcgatcctactattgatggtaatgaaagtactggcgaagattatgattacaacaagtggaacgatataattgtaaaagaatatggaatatggaatgttgaggagaacgtcattctcacacaactgactattcaacatccagggaaattcagtcgtttgttggcagagtgtacgtacacaagtcagcgtgtacctggcgaagataacatttctcactcgggtgaccatacaccagttgtgactccaagaagtatgtgtcaacatgatgaagaacttgtaggttattacctgcacagaagaaacgaagggcttgagatcgagctcgaaataatcccattaatggacttatacaagtttgatccttgggaacttccagagaaatccttcttgccaaatcgagatatggaatggtttttcttctgtcatcgcgacagaaaataccagaacggatctcgaataaacagagcaactaaatctggttattggaaagccactggcaaagatcgaaaaatcgtttgccactcttcttcttcttcatcatcttcctctatcaccggctgccgaaaaaccctagttttttatatgggtcgagctccttttggtggtagaaccgagtgggtaatgcatgagtatcgcctcttcgacaacgatacttcacaaggatcactaaacttcaagggagacttcgcgctgtgtcgtgtgataaagaggaatgagcatacgcttaagaaatgtgaaattatctcaccagaggtttcagatgagtcattaagcaataatgttaacaatttttgtcaagcaagtgacctagaaaagggttcttgtgatgcaagtaacacacgtttgtcttctcctgatttcatccttgaatcatcttttcagggaaattcacattcaaaaacagaagaagattccggtttccaagtatttacattacccgaattcgaatatccgctagaggtttttgcagatttgaatttcgatttggaaatggaggatccattcatgttcgattatcatccagagcctcatatgaacaatgaagtcatgagccatcacattcgtgggtaa

SEQ ID NO: 2169 - DNA, 741 bp, Arabidopsis thaliana
  Clone ID: AT_MIG5.C1.o2.tg
atggctccagtcggattacctccaggctttagatttcatccgactgacgaagaactcgtaaactattatctgaaaagaaagatcaacggtcaagaaatcgagcttgatataattcccgaggttgatctctacaaatgcgagccatgggacctcgcagagaagtcgtttctaccaagtagagatccggagtggtatttttttgggccacgtgaccggaagtatccgaacgggtttaggacgaaccgagcaacgagaggtgggtactggaaatcgaccggcaaagatcggagagtgacaagtcaaagcagagcgattgggatgaaaaagactttggtttattataaaggaagagctcctcaagggatccgtacggattgggttatgcatgagtatcgtctcgatgataaggattgtgacgatccctcttcgctccaggactcgtatgcattgtgtcgggtattcaaaaagaacggaatatgttcggagttggaatcagaacggcaattgcaaacgggacaatgtagcttcacaacggcgtcaatggaggagatcaattcgaataacaacaacaattataataatgattatgagacaatgtcgccggaggtgggagtttcctccgcctgcgttgaagaagtagtcgatgataaagacgattcgtggatgcagtttataacagatgacgcatgggacacgtcatcaaatggtgcagctatgggacatggtcaaggggtttattga

SEQ ID NO: 2170 - DNA, 954 bp, Arabidopsis thaliana
  Clone ID: AT_MJK13.C1.o16.tg
atgggtctccaagagcttgacccgttagcccaattgagcttaccgccgggttttcggttttatccgactgacgaagagctgatggttgaatatctctgtagaaaagccgccggtcacgacttctctctccagctcatagctgaaatcgatctctacaagtttgatccatgggttttaccaagtaaggcgttattcggtgaaaaagaatggtattttttcagcccgagggataggaagtatccaaacgggtcaagacctaatcgggttgccgggtcgggttattggaaagccaccggtacggataaagttatctcgacggagggaagaagagttggtatcaagaaagctttggtgttttacattggaaaagctccaaaaggaaccaaaaccaattggattatgcatgagtaccgtctcatcgaaccctctcgtcgaaatggaagcaccaagcttgatgattgggttttatgtcgaatatacaaaaagcaaacaagcgcacaaaaacaagcttacaataatctaatgacgagtggtcgtgaatacagcaacaatggttcgtcgacatcttcttcgtctcatcaatacgacgacgttctcgagtcgttgcatgagattgacaacagaagtttggggtttgccgccggttcatcaaacgcgctgcctcatagtcatagaccggttttaaccaatcataaaaccgggtttcagggtttagccagggagccaagttttgattgggcgaatttgattggacagaactcggtcccggaactcggactgagtcataacgttccgagtattcgttacggtgacggtggaacgcagcaacaaactgaggggattcctcggtttaataataactcggacgtctcggctaatcagggttttagtgttgacccggttaacggatttgggtactcgggtcaacaatctagtgggttcgggtttatttga

SEQ ID NO: 2171 - DNA, 1095 bp, Arabidopsis thaliana
  Clone ID: AT_MJK13.C1.o17.tg
atggagagcaccgattcttccggtggtccaccaccgccacaacctaaccttcctccaggcttccggtttcaccctaccgacgaagagcttgttgttcactacctcaaacgcaaagcagcctctgctcctttacctgtcgccatcatcgccgaagtcgatctctataaatttgatccatgggaacttcccgctaaagcatcgtttggagaacaagaatggtacttctttagtccacgagatcggaagtatccaaacggagcaagaccaaacagagcggcgacttcaggttattggaaagcgaccggtacagataaaccggtacttgcttccgacggtaaccaaaaggtgggcgtgaagaaggcactagtcttctacagtggtaaaccaccaaaaggcgttaaaagtgattggatcatgcatgagtatcgtctcatcgaaaacaaaccaaacaatcgacctcctggctgtgatttcggcaacaaaaaaaactcactcagacttgatgattgggtgttatgtagaatctacaagaagaacaacgcaagtcgacatgttgataacgataaggatcatgatatgatcgattacattttcaggaagattcctccgtctttatcaatggcggctgcttctacaggacttcaccaacatcatcataatgtctcaagatcaatgaatttcttccctggcaaattctccggtggtggttacgggattttctctgacggtggtaacacgagtatatacgacggcggtggcatgatcaacaatattggtactgactcagtagatcacgacaataacgctgacgtcgttggtttaaatcatgcttcgtcgtcaggtcctatgatgatggcgaatttgaaacgaactctcccggtgccgtattggcctgtagcagatgaggagcaagatgcatctccgagcaaacggtttcacggtgtaggaggaggaggaggagattgttcgaacatgtcttcctccatgatggaagagactccaccattgatgcaacaacaaggtggtgtgttaggagatggattattcagaacgacatcgtaccaattacccggtttaaattggtactcttcttaa

SEQ ID NO: 2172 - DNA, 963 bp, Arabidopsis thaliana
  Clone ID: AT_T13D8.C1.o22.tg
atggaggaagatgcagcttttgatctactcaaagccgaactcttaaacgcagaagacgatgcaataatctcacgttatctgaagcgtatggtcgtcaacggagactcatggcctgatcacttcatcgaagacgcagacgtgttcaacaagaatccaaatgtggagttcgatgctgagagccctagcttcgtgatagttaaacctcgaacagaggcttgtggtaaaaccgatggatgtgaaactggttgctggaggatcatgggtcgtgataaaccgataaaatcgacggagactgtgaagattcaagggttcaagaagattctcaagttctgcctaaagaggaaacctagaggatacaagagaagttgggtaatggaagagtataggcttaccaataacttgaactggaagcaagatcatgtgatttgcaagattcggtttatgtttgaagctgaaatcagtttcttgctagccaagcatttctacactacatcagaatcacttcctcgaaatgagctgttgccagcttacggattcctttcatcagataagcaattggaggatgtatcttatccggtgacgataatgacttctgaaggaaacgattggcctagctacgttaccaacaatgtgtattgtctgcatccattggagctcgttgatcttcaagatcggatgtttaatgattacggaacctgcatcttcgctaacaagacttgtggtaaaaccgatagatgcattaatggtggttactggaaaattttgcaccgtgataggctgatcaagtcaaagtccgggatagttattggtttcaagaaggtgtttaagtttcatgaaacggagaaagaaagatacttctgtggtggagaagatgtgaaggtaacttggactctagaagagtataggcttagcgtgaagcagaataaattcttgtgcgttatcaagtttacttatgataactaa

SEQ ID NO: 2173 - DNA, 1569 bp, Arabidopsis thaliana
  Clone ID: AT_F9L11.C1.o7.tg
atggacttgtcggttgagaacggaggtttagctccaggttttaggtttcatccgacggacgaagaacttgtcgtctattatctcaaaagaaagatccgtcggaaaaaactcagagtcgaagcaatcggcgagactgatgtctataagtttgatcctgaggaattacctgagaaagcgttgtataagactagagatcgtcaatggttctttttcagcttaagggataggaaacatggaagtaggtcaagtagagctactgaacgtggctattggaaagcaacagggaaggatagagtcattcattgtgattcgagacccgttggagagaagaagactcttgttttccatagaggcagggcacctaatggcgaacggactaattgggtgatgcatgagtatacattgcacaaagaggagctcaagaggtgtggtggtgaagatgttaaggatgcttatgttctttacaagatttataagaaaagtgggtctggtcctaagaatggtgagcaatatggagctccttttattgaagaagaatgggctgaagatgatgatgatgatgttgatgagcctgctaatcagctcgttgtttcggctagtgttgataatagtttatgggggaaagggcttaaccaatctgaattggatgataatgatattgaagagctgatgagtcaggttagagatcagtctggtccaacattgcagcagaatggggtgtctggactgaactctcatgtagacacgtataatctggagaacctggaggaagatatgtatttggaaatcaatgatcttatggaacctgaacctgaaccaacttctgtggaagtcatggagaataactggaacgaggatggttctggtctcctgaatgatgatgatttcgttggtgctgattcatatttccttgatttgggagtgacaaatcctcagttagattttgttagtggtgatttgaaaaatgggtttgcacaaagtcttcaggtgaatacttctttaatgacttaccaggccaataataaccagttccagcagcaatcagggaagaaccaagctagtaactggccactccgtaacagctataccagacagataaacaatggatcatcgtgggtgcaggagctaaacaatgacggacttaccgttacccggtttggtgattcatctgaattcctaaaccctgttccttctggtataagtacaactaatgaagatgacccgtcaaaagacgagtctagtaagtttgcttctagtgtatggactttcctggaatccattcctgcaaagccagcatatgcatcagagaatccatttgtgaagctgaaccttgttagaatgtcaaccagtggtggtcgtttcaggtttacttctaaaagcacaggtaataatgttgttgttatggatagtgactcagcagtgaagaggaacaagtctggaggaaacaacgataagaagaagaagaagaacaaaggtttcttttgcttatcgatcattggggctttatgtgctttgttttgggtgatcataggaacaatgggaggttcagggaggcctttgttatggtga

SEQ ID NO: 2174 - DNA, 795 bp, Arabidopsis thaliana
  Clone ID: AT_MIJ24.C1.o160.tg
atggctaagaaagagaagatcgaggaggaattcgagaagggtaacgataaagaatggtttattataacggagaggaacaaagttgatcaaggtttaagccaaacaaagagagttggtaatggtgcgaaaaggcagaaacgtgttgacactaacggaggatattggcacgcaacagtggctgcccaaaagatcaacgctggagatggtgtcgttggcaacaaaaggccacttgcatactacgataggaaaccatcagaagacgtcaaaactgattggttaatgcaagaatactctcttgatcacaacaacgacaagggattacactttgtgcaagatttatcttactccacaagcaacaaagaagttggagaagagaagaagaagcagaagaaaggagaacctgtggaagcatcggaagggcagcagccttgtaatgccgagtatcatcaaccgctagcacctctagattcttgccaaccgcagcctcatgatttggctgagcagctggatttgcatcaaccagaacagttgcagctgcaacagcctcatgatattgtgtatcaaccacagtattgtttacttccagaacaacatcagctgcagccttttcctgataacttttctgagttgaacagctttcaacagcaaccagtgatgatcccagacgatttagaagatttcttggctgaattaatggagccacattcactggatggagatgaagaatccaacaattatgggttttttgaaggcttatttgacacagaaggaattaatgataaaacattacactaa

SEQ ID NO: 2175 - DNA, 597 bp, Arabidopsis thaliana
  Clone ID: AT_T27C4.C1.o7.tg
atgtatagatgcacatttaacccacctgaagaagaactcattaactattacttgaataacaagatcacagagaatgatgatctagtggggaagcaaatcgccgaggtcaatatattgcaccatgaacctgcagatttacctgggctggcgaagatagaatcgagtcatacttggtacttcatatcgccggtggagaagtttgggaagctcaaccgaacgaagagggtgtcgaggtcagggcactggaagataaccggaaatagtcgtaccattaaggacgttgatggtaaccctatcggtttaaagaaatttcttgttttccaagaaaacaaaagatcttcttcttcctcgttatccaccactaccacccaacaacagaagaccaattggattatccatgaatttcattcctttctcccccatcccaacaagatgctgacggagaacaagaacgaagattatggcggagattattgtaatggcttagacgagcttctccaatcactggaacaaggtgaatccagcggcctccttttcggagaaaatggacacgcgtgtgaacaagataccgcagaaaactccaatgtgactatgtga

SEQ ID NO: 2176 - DNA, 1344 bp, Arabidopsis thaliana
  Clone ID: AT_F13M14.C1.o24.tg
atgggtcgcgaatctctggctgttgtgtcctcgccgccatcggcgactgcgcccagtactgctgtgtcggctacctcgcttgctcctggctttcgatttcatccgactgatgaggaactcgtgagctattacttgaagaggaaggttctgggtaaacctgtacgcttcgatgcgattggagaggtagatatctacaagcatgagccctgggatttagcagtgttttcgaagttgaaaactcgggaccaagaatggtacttcttcagtgcgttagataagaagtacggtaatggtgctaggatgaatcgagcaactaacaaagggtactggaaagcaactggaaaagacagagaaatccgccgggatattcagttgctcggtatgaaaaagacgcttgttttccacagcgggcgtgctccagacggccttcggactaattgggtcatgcacgagtatcgccttgtggaatatgaaactgaaactaacggaagcctgctgcaggatgcatatgtgttgtgcagagtgtttcacaagaataacattgggccaccaagtgggaacagatatgcgccattcatggaagaagaatgggctgatggtggaggagctctgattccaggaatagacgttagggtcagggtagaggctctaccacaagccaatggaaacaaccagatggaccaggaaatgcattcagcaagcaaggatctcattaacatcaacgagctaccgagagatgctactccaatggacatcgaacctaaccaacagaatcatcatgagagtgccttcaagccacaggagagtaacaaccatagtggttatgaagaagatgaggacacactcaaacgcgagcacgcagaagaagatgagcgtcctccttctctatgcattctcaacaaagaagctccactacctctcctgcaatacaaacgtagacgccaaaacgagtccaacaacaactcaagcaggaacacacaggaccattgttcgtccacaataacaaccgtcgacaatacaaccaccttaatctcatcatctgctgctgctgctaccaacactgccatctctgcattgcttgagttctcacttatgggtatctccgacaagaaagaaaaccagcagaaagaggaaacttctcctcctagtccaattgcatctcctgaagagaaggttaatgatctccagaaggaggttcaccagatgtctgttgaaagagaaactttcaagcttgagatgatgagtgcagaggctatgatcagcattctccagtcaagaatcgatgcgctgcgtcaggagaacgaggaacttaagaagaagaacgccagtggacaagctagttaa

SEQ ID NO: 2177 - DNA, 621 bp, Arabidopsis thaliana
  Clone ID: AT_MAC12.C1.o3.tg
atggaggtggagaagaggattgtagtgaatggaggaatgaaattgccaataggatacagatttcacccaaccgagcaagagcttatccttcattacttgctcccaaaggcctttgcttctcctttgccttcctccatcatccctgtctttgacctcttcttctctcatcctcttagtttcccaggggaccaaaaggagaagcagaggtacttcttttgcaagaagagagaagtgtcaagtaatgagcatagaatcaagatttcctctggtgatggttattggaaacctattggtaaagagagaccaatcattgcctgtggtaaaacatttgggattagaagaacacttgctttctatgaaacaaacaagtcttcttcttattgcaacaaaactagatggagcatgacagagtattgtcttgcgggatttgcgtcggctaaggtgtctggagaatgggcagtgtacaatgtttatgagaggaaaggctcaaaaggaagaaaacagaggaaatcaagagagggagatgatgaagaattgagatgcatcgaccattttacggttgggtcaaatcatgaaaccggtccaccaccgccttctcctcctacctcagctgatgagtaa

SEQ ID NO: 2178 - DNA, 1356 bp, Arabidopsis thaliana
  Clone ID: AT_F13M14.C1.o23.tg
atgggtcgcgaatctgtggctgttgtgactgcgccgccctcggcgactgctccgggtactgcttcggtggcgacctcgcttgctcctggcttccgatttcatccgactgatgaggaactcgtgagctattacttgaagaggaaggttctgggccaacctgtacgcttcgatgcgattggagaggtcgatatatacaagcatgagccctgggatttagcagtgttttcgagattgaagacaagggaccaagaatggtacttctacagtgcattagataagaagtatggaaacggtgctaggatgaaccgagcaactaacagagggtactggaaagctactggaaaagacagagaaatccgccgtgacattctgcttctcggtatgaaaaagacacttgttttccacagtgggcgtgcaccagacgggcttcggactaattgggttatgcatgagtatcgccttgtggaatatgaaaccgagaaaaacggaaacctggtgcaagatgcatatgtgttgtgtagagtcttccacaagaataacattgggccaccaagtgggaacagatatgctccgttcatggaagaggaatgggctgatgatgaaggagctctgattccaggaatagacgttaagctcaggctagagccgccgccagtagccaatggaaacgaccagatggaccaggaaatccagtcagccagcaagagtctcatcaacatcaatgagccaccgagagagacagctccactggatatcgaatcggaccaacagaatcatcatgagaatgacctcaagccggaggagcataacaacaataataattatgatgaaaacgaggaaacactcaaacgcgagcagatggaagaagaggagcgtcctcctcgacctgtatgcgttctcaacaaagaagctccattacctcttctgcaatacaaacgtagacgccaaagcgagtccaacaacaactcaagcaggaacacacaggaccattgttcgtccacaacaacaactgtcgacaatacaaccactttaatctcatcatctgccgctgccaccaacactgccatctctgcattgcttgagttctcactcatgggtatctccgacaagaaagaaaagccgcagcaaccgctacgtcctcacaaggaacctttgcctcctcaaactccacttgcatctcctgaagagaaggttaatgatctccagaaggagattcaccagatgtctgttgaaagagaaactttcaagcttgaaatgatgagtgcagaagctatgatcagtattctccagtcaaggatcgatgcgctgcgtcaggagaacgaggaactcaagaagaacaatgctaatggacaataa

SEQ ID NO: 2179 - DNA, 897 bp, Arabidopsis thaliana
  Clone ID: AT_F20D21.C1.o15.tg
atgagtttgcctccaggattcaggtttcatcccactgatgaagaactggtggcttactatcttgataggaaggtcaacggccaagccattgagctcgagatcatcccagaagttgatctttataaatgcgagccatgggacttgcctgaaaagtcatttttgccgggaaacgacatggaatggtacttttacagcacaagggataagaagtatccaaatggctctaggacgaaccgtgcgacccgagcgggttactggaaggccacggggaaagatcgtacagtagaatcaaagaagatgaagatgggaatgaagaagacactggtttattatagaggaagggctcctcatggccttcgtactaattgggtcatgcatgaatatcgtctcacgcacgctccttcctcctccttgaaggagtcgtatgcattgtgccgagtgtttaagaagaacatacaaattccaaagagaaaaggggaagaagaagaagcagaagaagagagcactagtgtaggaaaagaagaggaagaagaaaaggagaagaagtggagaaaatgtgatggtaattatattgaagacgagagcttgaaaagagcatccgcggagacatcttcatcagagctaactcaaggggtccttttagacgaagcaaacagctcatccatatttgctcttcatttctcatcttctcttctggacgatcatgatcatcttttctcaaactattctcatcagcttccatatcatcctcctcttcaactccaagatttccctcaactttctatgaacgaagcagagattatgtcaatccaacaagactttcaatgcagagactctatgaacgggacacttgacgaaatcttctcttcttccgccactttccccgcttccctttga

SEQ ID NO: 2180 - DNA, 1188 bp, Arabidopsis thaliana
  Clone ID: AT_T28K15.C1.o2.tg
atgaattcattttcccacgtccctccgggttttagatttcacccgacagatgaagaacttgtagactactacctgaggaaaaaagtcgcatcgaagagaatagaaattgatttcataaaggacattgatctttacaagattgagccatgggaccttcaagagttgtgcaaaattgggcatgaagagcagagtgattggtacttctttagccataaagacaagaagtatcccacagggactcgaaccaatagagcaacaaaagcagggttttggaaagccaccggaagagataaggctatctatttgaggcatagtctaattggcatgaggaaaacacttgtgttttacaagggaagagccccaaatggacaaaagtctgattggatcatgcacgaataccgcttagaaaccgatgaaaacggaactcctcaggaagaaggatgggttgtgtgtagggttttcaagaagagattggctgcagttagacgaatgggagattacgactcatccccttcacattggtacgatgatcaactttcttttatggcctccgagctcgagacaaacggtcaacgacggattctccccaatcatcatcagcagcagcagcacgagcaccaacaacatatgccatatggcctcaatgcatctgcttacgctctcaacaaccctaacttgcaatgcaagcaagagctagaactacactacaaccacctggtacaacgaaatcatcttcttgatgaatctcatttatcgttcctccaacttcctcaactagaaagccctaagattcaacaagataacagtaattgcaactctcttccttatggaacaagcaacatcgataataactcgagccataatgctaacttgcagcaatcaaatatcgcgcatgaggaacaattgaatcaaggaaatcagaacttcagctctctatacatgaacagcggcaacgagcaagtgatggaccaagtcacagactggagagttctcgataaatttgttgcttctcagctaagcaacgaggaggctgccacagcttctgcatctatacagaataatgccaaggacacaagcaatgctgagtaccaagttgatgaagaaaaagatccgaaaagggcttcagacatgggagaagaatatactgcttctacttcttcgagttgtcagattgatctatggaagtga

SEQ ID NO: 2181 - DNA, 519 bp, Arabidopsis thaliana
  Clone ID: AT_F14D16.C1.o24.tg
atgtcagaggtgttaacacgcgggtttcgatttcgcccagctgatgaagaagtgacagactaccttatgcggaagacacaatcgccggagttcagctgctttatcaaaaccatagacttgtacgacaaggatccgtgggtacttgggcatgtgagagatccgtgttacaatcactatgaatggtattactttgttaagaaaaaccccctcgggaatgagtacttagataagcctagattgaacgggtttgaacatccacgcttgaaatgggatgtgttgaagcagatacatgatgctctgagttctggtcagaacgtcccaccaagtgtctttacttacggattccgatttcatccgactgatcaagagctactctctttgtacctcactccaaaggcccattcaccagacttcagctgcttcataagagagagagagagctatatgccatggagccatggcttcttgaacatgttagatctcctttttacaaggacagtgaatggtactactttgtga

SEQ ID NO: 2182 - DNA, 1116 bp, Arabidopsis thaliana
  Clone ID: AT_T13D8.C1.o21.tg
atggaagataacgacgcagcttatgatcaagtcaaatccgaactgttaaactcagaagacgaagtaataatctcacgttatctgaagcctatggtcgttaacggagattcttggccagatcacttcatcgaagacgcaaacgtgttcaccaagaatccaaatgaggtgttcaattctgagagacctagattcgttatcgttaaaccacgaacagaggcttgtggtaagaccgatggatgtgaatctggttgctggaggaccatgggtcgtgataaactgataaagtcggaggagactgggaagattctagggttcaagaagattctcaagttttgcataaagtggaaacctatagaatacaagagaagttgggtaatggaagagtataggcttaccaataacttgaactggaagcaagatcatgtgatttgcaagattcggcttttgtttgaagcagaaattagtttcttgctagccaagcatttctacactacgtcagaatcacttcttcgacatgagctattgccatcttatggatatttatccaatacacaagaggaggatgaattttatctgaagacgataatgacttcggaaggaaacgattggcctagctacgttaccaacaacgtgtactgtcttcatccattggagcttgtggatcttcaagatgtgatgtttcaaagttacggaacctgcatcttcgctaacgggacttgtggtgaatctgataaatgcgatggtggttactggaagatcctgcacggtgataagctgatcaagtcaaatttcgggatggtcactggtttcaagaaggtatttgagttctatgaaacggtgatacatagatatttttgtgatggagaagaagtgaaggaagaaacagagaggttaggtcatcaacgttgccaaggcttgttgttgccacaccgtcgtggccatgtacaaaccaagagttgcggtgtcgtcaccgtgaaggagaagaggagtttggtagagcaaccggaggagattgtcgctgcacctgagacaccacgccaaggaaaaagtgagcataatgatccactaaagcgaaagaaagcgattggttgcgtgggagagaaagctgagatgtag

SEQ ID NO: 2183 - DNA, 1731 bp, Arabidopsis thaliana
  Clone ID: AT_F23M19.C1.o14.tg
atggttgattcttctcgtgattcgtgtttcaaagctggtaagtttagtgctccaggttttcgatttcaccctactgatgaagagcttgtggtttattatcttaagaggaagatctgttgtaaaaaacttcgagtcaatgccattggtgtcgttgatgtttacaaagtcgatccttctgaattgcctggtaattttcaacaccttcttatcgattttgattcatgtctatcgatgttgaagacgggagatagacagtggttctttttcactccaaggaataggaagtatcctaacgcagctaggtcaagtagaggtactgcaactggttattggaaggcgacaggaaaggatcgagtcattgagtacaattcaagatctgttggactcaagaagactcttgttttctatagaggtcgtgctcctaatggtgagagaactgactgggtgatgcatgagtacactatggatgaagaagagctagggagatgtaagaacgctaaggagtattatgctctttataagctttataagaagagtggggctggtcctaagaatggtgaacagtatggtgctccgttccaagaagaagaatgggttgatagtgatagtgaagatgcagatagtgtcgctgtaccggattatcccgtggtccgttatgagaatggtccttgtgtggatgatactaaattttgcaatcctgtcaaacttcagttagaggatattgagaagcttctcaatgaaatcccagatgcacccggggttaaccaaagacagtttgatgagtttgttggtgttccacagggtaatagtgcagaagtgatacagagcacattgctgaataattcttctggagagtatattgaccctcggacgaatggaatgttcttgccaaatggccagctatacaacagggactcgagttttcagtcccatttgaattcatttgaggctacctctggtatggcacctcttctagataatgagaaggaggagtacattgaaatgaatgatcttctgatccctgagctcggtgcttcttcaacagagaaatccacagagttcttgaaccatggtgaatttggtgatgttaatgaatacgaccaattgttcaatgacatatctgtttttcagggaacttctacagatctgtcttgtctgagtaattttactaataacacatcaggccaaagacagcaattactttatgaacagttccagtaccagacacctgagaaccagcttaataactacatgcatcctagtaccactcttaatcagttcactgacaatatgtggtttaaagatgatcaggctgctctctatgttcaaccaccacaatcttcttctggagcattcacttcacagtcaacaggtgtgatgcctgagtctatgaatcccactatgagtgtaaatccccaatacaaggaaggacaaaatggtggtggaacaaggagccagttctcatcagctctgtgggaattattggaatcaataccatcaacaccagcctctgcctgtgagggtcctcttaaccagacctttgtgcgtatgtctagcttcagccgcatcaggttcaatggaacgtcagtgactagtagaaaagtcactgtagcaaagaagcgtatcagtaacagaggttttcttctgttatcaattatgggtgctttgtgtgctatcttctgggtgttcaaagccaccgttggagttatgggaagacctctcttgtcgtga

SEQ ID NO: 2184 - DNA, 1008 bp, Arabidopsis thaliana
  Clone ID: AT_T10D17.C1.o80.tg
atggcagctgcaccaccgatcgagccggcggtgacgacgacgttccctggcttcaaattctccccgaccgacatcgaacttatatcttattacttgaagaggaagatggatggtttggagagatctgttgagattatacctgaggttgagatttacaacttcgagccttgggatttacctgataagtctatcgttaaatcggatagcgaatggttcttcttctgtgctcgcggtaagaagtatccccacggttcacagaacagaagagcaaccaagataggatattggaaagccacaggaaaagagcgtaatgtgaagtcaggttctgaggtcattggaacaaagagaacgcttgtattccacattggccgcgcgccaaaaggaggaagaacggaatggcttatgcatgagtactgcatgattggagtatcactggatgctctggttatttgccgacttaggaggaatactgaatttcaagggagtacaattcaaaagccaccacaaccaagtttaccactggataagcacgtaaacttgcggaatgaagctatttcagaaagtatttatggttgggaaactatggttgatttctacttatcaagtgagtcagggcaagaactacttagtgaaatagcagaatcttcacaatcttcacaaaatccacaggttcctagtgaagaagatttctatgccgatatactgagggatgaaatagtaaagctagatgatccggcggtatccggtaatacactgatcaatgtaccaaggcttcaaacagagtccaataccacaagagtactacctttacctgacatggtagacaaacaaatgcaatcgttgctacagaaactaccattacaaaatgacactggagaagagaacaacatatccatgtcaaattgctttatcggtatctactcgattaagtctataaaccgagcgcgatgggacgttgttgtttggttactcgttatgatagccgtgttggtgttttatttagtgtga

SEQ ID NO: 2185 - DNA, 1080 bp, Arabidopsis thaliana
  Clone ID: AT_T6A9.C1.o6.tg
atgatgaatccggtgggtttcagattccgtccaaacgacgaggagatcgtcgaccattacctccggccaaaaaatctcgatagtgacactagccatgtcgatgaagtcattagcacagtcgatatctgtagcttcgagccttgggatttaccttccaagtcgatgatcaaatcgagagatggggtttggtatttctttagtgttaaggagatgaagtataacagaggtgatcaacagagaagaagaacaaactctgggttttggaagaaaactggaaaaacaatgactgtcatgcgcaaaagaggaaatcgtgagaagatcggtgagaaaagggttttggtttttaagaatcgagatggttcaaagaccgactgggttatgcacgagtatcacgctacgtccttgtttcctaatcagatgatgacgtatacagtctgcaaagttgagtttaagggtgaagagacagagatctcttcttcttctactggtagtgaaattgaacagattcactctttaatccctcttgtgaacagttctggaggatctgagggttcgtcgtttcacagccaagaattacagaattcaagtcagtctggtgtctttgctaatgtgcagggagaatctcaaatcgatgatgcaactacaccgattgaggaggaatggaaaacatggttgaataatgatggtgatgagcagaggaatatcatgtttatgcaagatcatcgcagcgattacacacctctaaagtcgttaactggtgtcttcagtgatgatagcagtgatgataatgattctgatttgatatctcctaaaacaaattctattggaacttcgagcacttgtgctagttttgctagctcaaatcatcagatagaccaaactcaacattctcctgactcaacagtccagctagtgtcattaactcaagaggtgagccaaggtccgggtcaagtgactgtgattcgagagcataaattgggtgaagagtctgtcaagaagaaaagagctagtttcgtttacaggatgatacacagattagtcaagaaaattcaccaatgttattctatctcaagaacatga

SEQ ID NO: 2186 - DNA, 1470 bp, Arabidopsis thaliana
  Clone ID: AT_T5E8.C1.o130.tg
atggggaaaactcaactcgctcctggatttcgtttccatccgactgatgttgaactcgtgaggtattacttgaagaggaaaatactggggaaaaagctccttgtcgatgctattgctgaagttgacatttacaagtttgaaccccctgatttacctgatatgtcttttataagaagtggggatcttaagtggcacttcttctgccccagggaaaagaagtatgctagtggggtaagggcaaaccgtgcaactgagtgtggctactggaagaccacggggaaggagagaccagttctgtgcaattctgaggttgtgggaaagatcaaaactctggtttatcactttggcaagtcgcctcgtggggagcggactgattgggttatgcatgaatacaggcttgacgacaaagtactgacgcagatgaatgttcctcaggatacttatgtggtgtgtgttctgttcaagaaagatggtcctggacctagaaatggagctcaatatggagctccgtttaaggaagaggactggagtgatgaggaagtacgtactgatgttccttctactagtaatcccacaaaccttcttgagcctagcaaagaaaccactctggctttgactgccccagatgactccaataaggattgttttggtggcatgatatcagagtcatgtgtctcggatttcctaccagctacaactaataccaccagcgagcttccacatccaagtgatgcagctaccactcctatgtctactgcacctctggcagagaccgttcagacccccaacaatgatgacttatattcaatgttggatctatttgatgatgacgaagagttcttagggttcaacaataatgaggtaagatatgatcccggtgtctcagctccagtttgcttagaagaagaaggcattttcaacggactaccagagttgagcagcatgccaaggacggcctcttacgacctagttgaaaactcggagttatacctagagctacaagacctcactgctccattaaatccccaaactgggctacaagacctcactgctccatttaatcctcaaactgggctacaagacctcactgctccatttaatcatcaaactgggctacaagaccacactgctccatttaatcctcaaactgggctacaagaccacactgctccatttaatcatcaaactgggctacaagacctcactgctccatttaatcctcaaactgggctacaagacctcactgctccatttaatcctcaaactgggctacatgacctcacttctccatttaatcctcaaactgggctacaagacctcactgctccattaaatcctcaaactgggaatcgcaatgacccgagaagctcctcctttctgtataatcaaggccattttgacttctctggtggtaatgatgatgatccttatggcttttctgcttccatgagacatagaccaaaaatgtaa

SEQ ID NO: 2187 - DNA, 918 bp, Arabidopsis thaliana
  Clone ID: AT_T16O9.C1.o16.tg
atgagttcgtctaacggaggtgtaccgcctggttttcggtttcatccaacggacgaagaacttcttcattactacttgaagaagaagatttcttatgaaaagtttgagatggaagtcatcaaagaggttgatttgaacaagattgagccgtgggatttacaagatagatgcaaaataggatcaacgccacaaaatgagtggtatttcttcagccacaaggataggaaatatccgacagggtcaaggacaaaccgtgcaacccactccggtttttggaaggcgacaggacgtgacaaatgcataagaaattcttacaagaagatcggcatgaggaagactcttgtattctacaaaggaagagctcctcatggccaaaagacagattggatcatgcacgagtaccgtatcgaagacactgaagatgacccttgtgaagatggatgggttgtttgtagagtgttcaagaagaaaaatctgttcaaagtagggaatgatgttggctcaaacatcagcaataataggcttgaagctcgtagtttcatccgaagagaaagcccttaccaaggaatctcaatgtttgagcttaacaagcctgaagagattagtgttcatcaatatcctcaaccaccaatgtttcaacctcatcacaagcctctttcaataggctatgactattcattggctcttctaccaagagaaagcgagtaccaacaagcgtgtcagccatcaggggttgaggttggcacgtgcaaggcagtaagtgaatggggaatagtgaattgtaacatggtgagtcatgaggactcgtctagagcgatgaggtttgaagatgacggtaacaacacttcttccacggtccagccaccttctaatctgctttcattgcgcggtgaaaatggatttcttgggttgttttaa

SEQ ID NO: 2188 - DNA, 444 bp, Arabidopsis thaliana
  Clone ID: AT_F20L16.C1.o20.tg
atgatgccgatgactgaagaattttacgatgaagaggaagagcttggttgctttagatttaatccttcagaagaagaactcatactcgattatcttctaccaaagcttggcttccaccaaccaaacacgatatatttgttagaagacagggacaacatctacgccaaagagccgtggcggcttaatcacacagagaatgatatctttgaacctaacgagtggttttatttcgtgaaaaggacaaatcgcaaagttaaaggttggaaagccactggagagttaaaagatgtcgtgtcgaagaaaaccggtgaagtgatcgggaagaagaggaatctcaggttctacgttgaaggtgatgagagcaaaacgagtggttggaccatgagggagtattcttccattggcaatcaaaaccaacgtctctgccaccttaaaggaccatga

SEQ ID NO: 2189 - DNA, 831 bp, Arabidopsis thaliana
  Clone ID: AT_F2J7.C1.o1.tg
atgagtgcatcggctagttccgatcctcgccaagtggtgtggaagagcaacccgtcaagacattgtcccaagtgtcaacatgtcattgacaacagtgatgttgttgatgattggccaggattgcctcgaggtgtgaaatttgatccatctgatcctgagatcatatggcatttgctagccaaatctggtttgtcagggttaagctcacaccctttcattgatgagttcatcccaaccgtcaatcaagatgatggaatctgttacactcatcctaagaatttaccaggtgttaagagtgatgggacggtgtctcacttcttccataaagcaatcaaagcttatagcacaggaactcgaaagcgtagaaagattcacgacgatgattttggcgatgtgcgctggcataagacaggaagaacgaaaccggttgtgttggatggtgttcaaagaggttgcaagaagataatggttctctatggcggaaaagctgtgaaaaccaactgggtgatgcaccaataccatttgggaatagaagaagacgagaaggaaggtgattatgttgtttctaagattttctaccagcagccacaacagctagtagtcaagcgaggtgataaagctgaacaggaagtctctgaggatatctttgctgcagtgactccaacagcggatcctgtcactccaaaattagctacacctgagcctcgaaatgctgtgcgaatttgctctgattctcacattgccagtgactatgttactcccagtgactatgtatctgcccatgaggtttctcttgccgaggtaagaatctttgtggttgctttctattga

SEQ ID NO: 2190 - DNA, 1734 bp, Arabidopsis thaliana
  Clone ID: AT_F12G12.C1.o20.tg
atggcggattcttcacccgattcgtgtttcaaaggaggcaaatttagtgctccagggtttcgatttcatccaactgatgaagagcttgtgatgtattatttgaagaggaagatttgtaggaagaggcttagagttaatgttatcggtgttgttgatgtttacaaaatggatcctgaggaattgcctggtcaatcaatgttgaagacgggagatagacagtggttctatttcactccaaggagtaggaagtatccaaacgcagctaggtctaatagaggaactgaaaatgggtattggaaggctacagggaaggatcgagtcattgagtataattctagatcggtgggacttaaaaagactcttgttttctatagaggccgggctcctagtggtgagcggactgattgggtgatgcatgagtatacgatggatgaagatgaactagggagatgtaagaaccctcaggagtactatgctctttataagttgttcaagaaaagtggggctggtcctaagaatggtgaacagtatggtgctccgtttcaagaagaggaatgggttgatgatgataatgaagatgtgaatgctattgctgtagctgtgccagagcaacctgtggttcgttatgaggatgctcgtcgtgtggatgagaggagactttttaatcctgttattcttcagttagaggatatcgatgagcttctcaatggaatccctaatgcacctggtgttcctcaaagatgtattcctcaggtgaatagtgaagaagagctgcagagtacgttggtgaataattctgctagagagttcttgccaaacggtcagcaatacaacaggccctcaagttttgactcattagagaccgctgaggtcacctcagctcctctggtgtttgagaaggaagatttcattgaaatggatgatcttcttctgatccctgaattcggagcttcttcaactgagaaagccgcacagttctcgaaccatggtgaattcgacgattttaatgagtttgaccaattgttccatgacgtttccatgtctttggatatggaacctattgatcagggaacttctgcaaatctgtcttctctgagtgattctgctaactacacatcagaccaaaaacagcaactcctttatcaacagttccaggaccagactcccgagaaccagctgaacaacatcatggatcctagtacaactctcaatcaaatcactagcgatatttggttcgaggatgatcaggccattctatttgatcaacaacaatccttttctggagcatttgcttcaccctcatcaggtgtgatgcctgattccaccaatcctactatgagtgtgaatgcccaaggccatgaaatccaaaatggtggtggaacaacaagccagttctcatcggctttgtgggcattaatggactcaataccttcaacgccagcctctgcgtgtgagggtccccttaaccgaacctttgtacgtatgtctagcttcagccgtatgaggttcaatggaaaggctaatggaacgccagtgagtactaccatagcaaagaagggtattagaaacagaggttttcttctattatcaatcgtgggtgctttgtgtgccatcttctgggtgttggtagccacagttcgagtctcagctccggtgatctgtgtcgtgttgacggtgattgttatcccgatttgtggaactgttgccactgaggaaagagagtatgatccgtag

SEQ ID NO: 2191 - DNA, 1185 bp, Arabidopsis thaliana
  Clone ID: AT_T7I23.C1.o18.tg
atggaaactcctgtgggtttaagattctgtccgaccgacgaggagatcgtcgtcgattacctttggccgaaaaattccgatagagacacgagccatgtcgatcgattcattaacacagtccctgtctgtagactcgatccttgggagttaccttgccagtcaaggatcaaactgaaagatgtggcttggtgtttcttcagacctaaggagaacaaatatggcagaggtgatcagcagatgagaaaaacgaaatctgggttttggaagagtactggcagaccaaagcctatcatgcgtaatcgccaacagatcggtgagaaaaagattttgatgttttacacgagtaaggaatccaaatccgattgggttatacacgagtaccacggtttctctcataaccagatgatgatgacatacacactctgtaaagttatgtttaatggtggcatgagagagaagtcttcctcttctccttcttcttctggtgttagtggaattgagcagagtcgtcgtgactctttaatccctcagcttgtcaacaattctgagggatcctcacttcacagagaagatccaagtcagtttggtgatgtgctgcaagaagctccaatcgaggatgctaaactgaccgaggaattggtaaaatggctgatgaatgatgaggatgatgctcaaatcgaggatgctataccgattgaggaatgggaaacatggttgaatgatattgatgatgctaaggagaagagtatcatgtttatgcatgataatcgaagtgattacagacctccaaactcattaactggtgtcttcagtgatgatgttagcagtgatgataatgattctgatttgctaactccaaaaacaaactctattcaaacttcgagcacttgtgatagttttggtagctcaaatcatcgcatagaccagatcaaagacctgcaagaatctcctacctcaacaatcaacttagtgtcactaactcaagaggtgagccaagctctaataaccagtattgataccgccgagaagaagaagaatccttatgatgatgcacaagggactgagattggtgagcataaattgggtcaagagacgatcaagaagaaaagagctggtttctttcacaggatgatacaaaaattcgtcaagaaaattcacctatgttcttccatctcaagaacttga

SEQ ID NO: 2192 - DNA, 579 bp, Arabidopsis thaliana
  Clone ID: AT_MUB3.C1.o5.tg
atgaatctaccaccgggatttaggttttttccgaccgatgaagagctcgtcgttcacttcctccaccggaaagcttccctcttgccttgtcaccctgatgtcatccccgaccttgatctttaccattacgatccttgggaccttcccgggaaagctttgggagaagggaggcaatggtacttctatagtagaaagacacaagagagagtgacaagcaatgggtattggggatcaatgggaatggacgagccaatctacacaagctccacacacaagaaagtgggaatcaaaaagtatctaactttctatctcggagattctcagactaattggatcatgcaagaatattccctcccggattcctcttcttcatctagtcgatcttctaagagatcaagccgtgcttctagttctagtcacaaacccgattatagcaagtgggtgatatgcagagtgtatgagcaaaattgcagtgaggaggaagacgatgatgggacagaactctcatgtttggatgaagtgtttttgtctttagatgatcttgacgaaatggaagaggacaggcagcttggaaaatag

SEQ ID NO: 2193 - DNA, 1053 bp, Arabidopsis thaliana
  Clone ID: AT_T6A9.C1.o7.tg
atggcgaatccggtgggttttagattccgtccgactgacggggagatcgtcgacatttacctccgaccgaaaaatctcgaaagtaacacgagccatgtcgatgaagtcattagcacagttgatatttgtagcttcgacccttgggacttaccttcccattctaggatgaaaacaagagatcaggtttggtatttcttcggccgtaaggagaacaaatatggtaaaggtgatcgacagataagaaaaaccaagtctggtttttggaagaaaactggcgttaccatggatataatgcgcaaaacgggagatcgtgagaagatcggtgagaaaagggttttggtgtttaagaatcacggtggttccaagtccgattgggctatgcatgagtatcacgctacgttctcgtctcctaatcagggtgaaaggagagaattttcagttgctactggtagtggaattaagcatactcactctttaatccctcctaccaacaattctggagttttgagtgtagagacagagggatcgttgtttcacagccaagaatcacagaatccaagtcagttttctggctttcttgatgtggatgcactagatagggacttctgcaatattttgagtgatgatttcaaaggcttctttaatgatgacgatgagcagagtaagattgtttctatgcaagatgatcgcaacaaccacacacctcaaaagccattgaccggtgtcttcagtgatcatagcaccgatggtagtgattctgatccgatttctgcaacaactatttccattcaaactttaagcacttgtcctagttttggtagctcaaatcctctataccaaatcactgacttgcaggaatctcctaactcaatcaagttagtgtcattagctcaagaggtgagcaaaacaccgggaaccggtattgataatgatgcacaagggactgagattggtgagcataaattgggtcaagagacgatcaagaacaaaagagctggtttctttcacaggatgatacaaaaattcgtcaagaaaattcacctaagaacatga

SEQ ID NO: 2194 - DNA, 582 bp, Arabidopsis thaliana
  Clone ID: AT_K7B16.C1.o4.tg
atggacatttctgcgcagagatttgccatgaacggaagaagcatgagactccctcccgggtttcggttcgatcccgatgatgaagatcttgtgttcgagtatctcgccaagaaggtcctccaccgtccaatggacttcgatctccctgagctccgttcttgcaatgttgatccatgggacttgctaggagagaagaacaaggaagtgtattacttcgtgaagaaggaagagcgagagaggaagggaagagagacgttatccggttattgggaagagtgtgaagaagaggaagtaatggaggctggtggtcgtgattgtattcatttagaaggaaggagaaagacatttgctttctttattggaaaaaaacctcgagggacaataactccatggatcatgtacgagttccgacttctttcctctagagctacaaggtggtcatcgtcccctctacctcggggtgaggtaggaaaatggagggcggtgaaagtcgtagtgaaggaagagaatgatgaagagatggtggaggatgagcacgagtctgacgagtctgatggcgaggaagttattcaaagccggtga

SEQ ID NO: 2195 - DNA, 1185 bp, Arabidopsis thaliana
  Clone ID: AT_F23N19.C1.o7.tg
atgaattcgttttcacaagtacctcctggcttcagatttcatcctactgatgaagaacttgtagactactacttgaggaaaaaagttgcatcaaagagaatagaaatcgatatcatcaaggatgttgatctttacaagattgagccatgtgatcttcaagagttatgcaagataggaaacgaagagcagagcgaatggtacttctttagtcataaagacaagaagtatcccacgggaactcgaaccaatagagccacgaaagcaggattttggaaagccactggaagagacaaggctatatatataagacatagtcttatcggtatgaggaaaacacttgtgttttacaaaggaagagccccaaatggtcagaaatccgattggatcatgcacgaatatcgcttagaaacaagtgaaaatggaacccctcaggaagaaggatgggtagtatgtagggtattcaagaagaaattggcagcgacagtgaggaaaatgggagattaccattcatcaccatcgcagcattggtacgatgatcagctctcttttatggcctccgagatcatttctagttctccacgacagtttcttcccaatcatcattataaccgccaccatcaccagcagacattgccttgtggcctcaatgcattcaacaacaacaatcctaacttgcaatgcaagcaagagctcgagttacattacaatcaaatggtacaacatcaacaacaaaaccatcatcttcgtgaatctatgtttctccagcttcctcagctcgaaagccctaccagtaattgcaattctgacaacaacaataacacaagaaatattagtaacttgcagaaatcatcaaatatatctcatgaggaacaattgcaacaagggaatcaaagtttcagctctctgtattacgatcaaggagtagagcaaatgactactgactggagagttctcgataaatttgttgcttcacagcttagcaatgatgaagaggctgcagccgtggtttcttcttcttctcatcaaaacaacgtcaagattgacacgagaaacacgggttatcatgtgatagatgagggaataaatttgccggagaatgattctgaaagggttgttgaaatgggagaagagtattcaaatgctcatgctgcttctacttcttcaagttgtcagattgatctctag

SEQ ID NO: 2196 - DNA, 1113 bp, Arabidopsis thaliana
  Clone ID: AT_F4P13.C1.o14.tg
atggcgagggcttggattgtcgatggtcgaggaattgcagccaaagttaaaaatgcctctctttcttcagctttgcagatccaagactgtggagctcatataaaatgccccaactgcacttaccgcattgacaatagcaatgtactgattccatggcctggccttcctaaaggtgtcaagtttgagccaactgatgaggacattatcgaatttttggaagctaaatgtgggattggtggctctgaacctcatgtgcttatcgaagagttcattcgtcctgtcactgaagatgttggaatcaattacactcaccctcaaaaccttcctggtgcaaacaaagatggagtgagtgtcttcttctttcacaagacagtgcaggcatatggaacaggacagaggaaacgcagaaagatcacaccgacacttgtgaacgatgaaccagttcgttggcacaagacaggcagaaccaaacctgtgatgctcagtggagtccaaaggggttgcaagaagatcatggtgctctacaagagcgctagaaagggaacgaagcccgagaaatcaaactgggttctgcatcaataccatctaggaacagaaggaaaggagataggagactatgttgtttccaagatcacatatcagcagcagaagcttggggaaaatcctgatgaaggtgagagtagttccggggttagaggtggcccaacaacaccaaagacgaatactcctacaccacctagccttgtagatggtgtcgctggagatgaagaagcttttgatgatttaaagatgtttgatccattttttgaggaactggacagcattcctgaagctgctttagggaagatgtggtccaaaaaagctcgaatggatgaggaatttgttgtgaacctaagtgaagataacttaatatgcgacgaaagcatggaagcttcgtctctttgggaaaatcaggttctccccaatcctagccttggaactgttggggacttcgatggtttttcgatatcagatctggagaatgcagatttggggactccccctgatttcctcactgtaagatcctgcttgaaaaaaaccttgtttactttcggaaaattcaatggaacataa

SEQ ID NO: 2197 - DNA, 2421 bp, Arabidopsis thaliana
  Clone ID: AT_F22C12.C1.o26.tg
atgactctacagtctcagagctcacactgtttaaatgtacactcctctatggttagagatatcgagaagtgtgaacaaaaaacaaagagagatatcgagaagaaaaacacgaaatcaggcggtgttagattgaacagtaggagactgattcatggtcgtgtcgccgagaaaggtacaaagagtctgccttctttgacccaagttacttttgaaggagaggaactgaaattgaaaagtggttctcattatttcaaaagcttagatgatgccattgatttcttcgattacatggttagatctcgtcccttctatacggcagttgattgcaataaagtaattggtgtcttcgtgagaatgaatcgtcccgatgttgcgatttctctctaccggaagatggaaattcgccggattccacttaatatctacagcttcaatattctgataaaatgtttctgcgactgccataagttgtctttttctttgtctacatttggcaagctcactaaacttggtttccagcccgatgttgttacctttaacacgctgctccacggcttatgtctcgaagataggatttctgaagctttagctttgtttggttatatggttgaaactggatttctcgaagctgtagctctgtttgatcaaatggttgaaattggattaaccccagttgtcatcacattcaacacactgataaatggtctctgcctagaaggtcgagttctcgaagcagcagctttggtcaataagatggtaggaaaaggtctacacattgatgttgtcacttacggaacaattgttaatggcatgtgtaagatgggtgacactaagtctgccttgaatctgcttagtaagatggaagaaacccacatcaaacccgatgttgtgatctatagtgccatcattgatcgcctttgcaaagatgggcatcatagcgatgctcagtatcttttcagtgaaatgcttgagaaaggaattgcgccaaatgtgtttacctacaactgtatgatagacggtttttgtagctttggtagatggagtgatgcccaaagattgttgcgtgatatgattgaaagggaaatcaatcctgatgttttaacttttaatgcattgatcagtgcatcagtcaaagaagggaagttgtttgaggctgaaaaattgtgcgacgagatgctccataggtgtatatttcctgatacagtcacatataactcaatgatttatggattttgcaagcataatcgtttcgatgatgcgaaacacatgtttgatttgatggctagtccagacgtagttacttttaataccatcattgacgtatactgtagggctaagagggtagatgaaggaatgcaacttctccgtgagatatctagaagaggattagttgctaatacaactacttacaacactcttattcacgggttctgtgaagtggacaatcttaatgctgcccaagaccttttccaggagatgatttctcatggtgtgtgtcctgataccattacttgtaacattttgttgtacggtttctgcgaaaatgagaaactagaagaggcactggaattgtttgaggttatccaaatgagtaagattgatcttgatactgttgcttataacatcatcatccatggaatgtgcaagggtagtaaggtggacgaagcatgggacctattctgtagtctgcccatccatggtgtggaacctgatgttcaaacttacaatgtaatgatatctgggttctgtggaaaaagtgcaatctcagacgcaaatgtgttattccataaaatgaaggacaatggacatgaaccagataacagcacatacaatacactaatcagagggtgtcttaaagctggtgaaatagataaatctattgaacttatctcggagatgcgaagcaacgggttcagtggagatgctttcaccattaaaatggcggaggagataatatgccgtgtttcagacgaagagatcatcgagaattacctgaggccaaagataaacggtgaaacatcttcaatcccgagatatgttgtggaattggcagaggagctgtacactgtagagccttggctgcttcctcgacaaacagctccaattctcaaccctggcgagtggttctactttgggaaacgcaatcgaaagtatagtaacttggaaggtgttcattgcgagggatcgtggatactcgaagacggttgcatcgcagtcctgtccaaggagacgggtgaggaaattggtggaacgacgagatttaggtattactataggaacaagggggataaagagagtcgtctgaagatgagcaattggtttatgagagagtatcgtctctattacaaatccaggagagtcttcaatggacgtcaggttttctgcattatcacttgtaatgatgaacattttatcgaataa

SEQ ID NO: 2198 - DNA, 957 bp, Arabidopsis thaliana
  Clone ID: AT_T13D8.C1.o25.tg
atggcggacacactgctcaacgcagaagacgaagtaataatctcacgttatctgaagcctatgatcgttaacagagtatcatggcctgatctcttcatcgaagacgcagacgtgttcaacaaggatccatatgtgaagttccatgctgagatccctagcttcgtgatcgttaaaccacgaacaaaggcttgtggtaaaaccgatggatgtgattcgggttgctggaggatcattggtcgtgataagctgataaagtcggaggagactggtaagattctagggttcaagaagatactcaagttctgcctaaagtggaaacctagagaatacaagagaagtttggtaatggaagagtataggcttaccaataacttcaactggaagcaagatcatgtgatttgcaagattcggcttttgtttgaagcagaaattagtttcttgctagccaagcatttctacactacatcagactcacttcctcgaaatgtgctgttgccagcttatggattctgttcaccagataaacaagaggaggacgaattttatccggtgacgataatgatttcagaaggaaaagattggcctagctacgttaccaacaacgtgtattgtctgcatccatcggagcttgtgaatgttcacgatgggaagtttcatgataacggaatctgcatcttcgctaacaggacttgtggtgtaaccgataaatgcaatgaaggttactggaagattaagcaccgtgagaagctgatcatgtcacggtacgggcagaccattggttggaagaaagtttttcagttttatgaaacggagaaagaaagacattttggtaatggagaagaagtgaaggtaacttggactctaaaagagtataggcttaccagaaaaatgaacaagaataaagtggtgtgcgttatcaagtataaggtaaagtgtttaccgaggataactagctag

SEQ ID NO: 2199 - DNA, 759 bp, Arabidopsis thaliana
  Clone ID: AT_F3M18.C1.o9.tg
atgagatctgataaggttggtagcatcaaagatttaccaagcttaccggcaggagtcaaattcgatccgtcggataaagagatccttatgcatttggaggcgaaggtatcatccgataagcgaaaacttcatccgttgattgatgaatttatacctacgcttgaaggagagaatggaatttgttatacgcatcctgagaaacttcctggagtaagcaaggacgggcaagtacggcacttcttccaccggccatcaaaggcttatacgaccggaacacgaaaacgaagaaaagtgagcacagatgaggaaggccatgaaacaaggtggcacaaaacaggcaagactcgacctgttttgtctcaatcaggagaaaccggtttcaagaagatcctagtgctctacaccaactatggtcgccagaagaagcctgagaagacgaattgggtgatgcatcagtatcatttaggtagcagcgaggacgaaaaagacggtgaaccagtcctctctaaagtcttctaccaaacacagcctaggcaatgcggttcgatggaacctaaaccgaaaaatctcgtaaacctaaaccggtttagttatgaaaatattcaggccggtttcgggtatgagcatggtggtaaaagtgaagagacgacgcaggtgattcgagagttggtagttcgtgaaggcgatgggtcatgttcgtttcttagttttacttgtgatgcaagtaagggtaaagaaagcttcatgaagaatcaatag

SEQ ID NO: 2200 - DNA, 969 bp, Arabidopsis thaliana
  Clone ID: AT_T13D8.C1.o18.tg
atggaggacgacgacgcagcttatgatctaatcaaacacgaactgttatactcagaagacgaagtaataatctcacgttatctgaagggtatggtcgttaacggagattcttggccagatcacttcatcgaagacgcaaacgtgttcaccaagaatccagataaggtgttcaattctgagagacctagattcgtgatcgttaaaccacgaacagaggcttgtggtaaaaccgatggatgtgattcgggttgctggaggatcattggtcgtgataaactgataaagtcggaggagactgggaagattctagggttcaagaagatactcaagttttgcctaaagaggaaacctatagactacaagagaagttgggtaatggaagagtataggcttaccaataacttgaactggaagcaagatcatgtgatttgcaaaattcggtttatgtttgaagctgaaattagtttcttgctaagcaagcatttctacactacatcagaatcggttcttgaaaatgagctgttgccatcttatggatattatttatccaatacacaagaggaggatgaattttatctggacgcgataatgacttcggaaggaaacgagtggcctagctacgttaccaacaacgtgtactgtctgcatccattggagcttgtggatcttcaagatcggatgtttaatgattacggaacctgcatcttcgctaacaagacttgtggtgaaactgataaatgcgatggtggttactggaagatcctgcacggtgataagctgatcaagtcaaatttcggaaaggtcattggtttcaagaaggtatttgagttctatgaaacggtgagacaaatatatctttgtgatggagaagaagtgacggtaacttggactatacaagagtataggcttagcaaaaacgtgaagcagaataaagtgttgtgcgttatcaagttgacttatgatagatag

SEQ ID NO: 2201 - DNA, 1704 bp, Arabidopsis thaliana
  Clone ID: AT_T32M21.C1.o10.tg
atgggtcgtggctcagtgacgtcgcttgctcctgggttccgttttcacccgacggatgaggaacttgttcgctactaccttaagcgtaaggtctgcaacaaaccctttaagttcgatgctatttccgtcaccgacatatacaagtctgagccttgggatctaccagataagtcgaagctgaaaagtagagacttggaatggtacttctttagtatgctggataagaagtacagtaatggttccaagacgaatcgtgctacggagaaagggtattggaagacgactgggaaagatcgggagattcgtaatggttcaagagtcgttgggatgaagaagacacttgtttatcacaagggtcgagctcctcgtggtgaaaggaccaattgggttatgcatgagtatcggctttctgatgaggacttgaagaaagctggtgtgccacaagaagcatatgtgttatgtaggatattccagaaaagtggtacgggtcctaagaatggggagcagtatggtgctccttatcttgaggaggagtgggaagaagatggaatgacttatgtacctgctcaagatgctttcagtgaaggattggctttgaatgatgatgtttatgtcgatattgatgacattgacgagaagcccgaaaatctggtggtctatgatgccgttcctattctacctaactattgtcatggggaatcaagtaacaatgttgaatcaggcaattactcagactctggaaattacattcaaccaggaaacaatgttgtcgactctggtgggtactttgaacaaccaattgaaacttttgaggaagatcggaagcctattatacgggagggtagcattcagccttgttctctgtttccagaggaacaaattggctgtggtgtgcaagacgaaaatgtggtgaatctggaatcttccaacaataatgtgtttgtagctgatacatgctacagtgacattcctattgatcataactatttacccgatgagccattcatggatcctaataacaatcttccactcaacgatggtctgtacctggaaacgaatgatctcagctgtgctcaacaagatgattttaacttcgaagattatctcagcttctttgatgatgagggtttgacttttgacgattctctattaatgggacctgaagattttcttcccaaccaagaagcccttgaccagaaacctgcccctaaagaattggagaaggaggtcgcaggaggcaaagaggcagtggaggaaaaggaaagtggcgaaggatcttcttcaaaacaagatacagatttcaaggactttgattcagctccgaagtacccatttctcaaaaagacgagccacatgcttggagccattcctactccatcttcatttgcttcacagttccaaacaaaggacgcaatgcgtctacacgcagcacaatcttctggttcagttcacgtgactgcaggtatgatgagaatatcaaacatgactctagcagcggacagcggtatgggctggtcatatgacaagaacggtaacctcaacgtagtcctttcattcggggtagtccaacaggatgatgcgatgactgcctcgggaagcaagacaggaattacggcgacaagagctatgttagtcttcatgtgtttatgggttctcctactctctgttagcttcaaaatagtaaccatggtgtctgctcggtaa

SEQ ID NO: 2202 - DNA, 528 bp, Arabidopsis thaliana
  Clone ID: AT_T5P19.C1.o170.tg
atggagccaacacacagagctttgcccgtaggattcaggtttcgttctacaaactgtgagatttcaaactattttttgaagaaaaaagctttaggacaacccatgaaagctcgtacgatacctgaagagtgtcatgatatcttctcaagacatccgcatgatctgcctggttatccaagtgaagaacattggtactatttttgcagaaaacgtgacaaccaagttactagtaactctcataatctctggacaccaatcggagaagaaaccaatgtgctagatccaaagaataatgatgcattagttggtattaagcgtcggtttactcttattgcgcaagaagaagaagaatctgataatatttgtttatctgatgatgaagaagctttaaagtataattggttcatggatgaaattagcctcccacaaacagtagcgaatactgattgggttttatgccatatttttggcaagaagactaaacccgaaactactgatttgtccacaatcgattccgaatccgaatag

SEQ ID NO: 2203 - DNA, 945 bp, Arabidopsis thaliana
  Clone ID: AT_F27G19.C1.o10.tg
atgggtgttagagagaaagatccgttagcccagttgagtttgccaccaggttttagattttatccgacagatgaagagcttcttgttcagtatctatgtcggaaagttgcaggctatcatttctctctccaggtcatcggagacatcgatctctacaagttcgatccttgggatttgccaagtaagcaaacatgtttcacatttgtaggggagtataattgtaactatttaggtaaggctttgtttggagagaaggaatggtatttctttagcccaagagatcggaaatatccgaacgggtcaagacccaatagagtagccgggtcgggttattggaaagcaacgggtactgacaaaattatcacggcggatggtcgtcgtgtcgggattaaaaaagctctggtcttttacgccggaaaagctcccaaaggcactaaaaccaactggattatgcacgagtatcgcttaatagaacattctcgtagccatggaagctccaagttggatgattgggtgttgtgtcgaatttacaagaaaacatctggatctcagagacaagctgttactcctgttcaagcttgtcgtgaagagcatagcacgaatgggtcgtcatcgtcttcttcatcacagcttgacgacgttcttgattcgttcccggagataaaagaccagtcttttaatcttcctcggatgaattcgctcaggacgattcttaacgggaactttgattgggctagcttggcaggtcttaatccaattccagagctagctccgaccaatggattaccgagttacggtggttacgatgcgtttcgagcggcggaaggtgaggcggagagtgggcatgtgaatcggcagcagaactcgagcgggttgactcagagtttcgggtacagctcgagtgggtttggtgtttcgggtcaaacattcgagtttaggcaatga

SEQ ID NO: 2204 - DNA, 1053 bp, Arabidopsis thaliana
  Clone ID: AT_F18O22.C1.o280.tg
atgaaaactctacacaggacttggatagtggatggcccatggatctcaaggaatgtaaagaatgcgtctctgtcttcagctctgcagattaaagactgcggagcttatatcaactgctttaactgctcttaccgcatcgacaacagcaatgtactgactccatggccaggccttcctaaaggtgtgaaattcgagccaaccgatgaggaagtgattgagcatttggaagctaagtgtggtattgatggcttaaaaccacatcttcttatccaagactttatatgttcagtcactcaagatgttggtatcaactacactcaccctcaaaaccttccaggtgtgagtaaagatggaactagtgtcttcttctttaacaagacggcacatgcatatcaaaatgggcagagaaagcggagaaggatcacaccaactagtctcaaggatgatacggttcgctggcacaagactggtcaaaccaaaccggtgatgctcaatggaatccagaagggatgcaagaagatcatggtgctctacaagagcgcgagaaagggattcaaacccgagaaatctaactgggttttgcaccagtaccatttgggaactgaagaaggcgagattggggaatatgttgtctctaagatcacatatcagcaaccaaagcaacaggagaaaaccatcgatgagagtgagagttctggggttcgaggtggccctagcacaccgaaaactagtactattacacaagttagacctgtgatttctgttgatgaggatgaaatagcttttgatgatgattctaagatggttcttgattcatatgccgagggactggagaacattcaagaagcttcttctggttcgacatcagacaaaatagctaaagtgggagggaatgtgagtgttattgaagataacttaatgtccaagaaaattgaagcttcgtcgattcctaatcatggaaatgttgactacggatcaggaaacttttcagtttcagatttggagaatgcagaattagggactctccctgatttactttccgtgagaacataa

SEQ ID NO: 2205 - DNA, 1677 bp, Arabidopsis thaliana
  Clone ID: AT_F13M14.C1.o22.tg
atgggtcgtggctcagtaacatcgctcgctcctgggtttcgttttcatcccacagacgaagaactcgttcgttactatctgaaacgaaagatctgcaataaaccttttaagttcgatgctatctctgttaccgatgtatacaaatctgagccttgggatctcccagacaagtcgaggctgaaaagtagagacttggagtggtacttcttcagtatgcttgataagaagtatagaaatggatcaaagacgaatcgtgcgactgagatgggatattggaagactacagggaaagatcgagagattcttaatggttcaaaagtcgttgggatgaagaagactcttgtttatcacaaaggtcgagctcctcgtggcgaaagaaccaattgggttatgcatgagtatcggttggttgatcaagaccttgataaaactggtgttcaccaagatgcgtttgtgctttgtaggatttttcagaagagtggctccggacctaaaaatggagagcagtacggtgctccgtttgttgaggaggagtgggaggaggaggatgatatgacatttgtacctgaccaagaagatcttggaagtgaagatcatgtttatgtccatatggatgacattgatcagaagtctgaaaactttgtggtctatgatgccattcctattccgttaaactttattcacggggagtcgagcaataatgttgaaacaaactactcagactccataaactatatacaacaaacaggaaactatatggactctggtggctactttgagcaaccagcagaatcttatgagaaagatcagaagcctatcatccgtgaccgtgatggtagccttcaaaatgaaggaattggatgtggggtccaggacaagcactcggaaactttgcaatcttctgacaacatctttgggactgatacatcatgctacaatgattttccagttgagagcaactatttgattggtgaggcgtttctggatccgaacagtaatcttctggagaatgatggtctgtacctggaaacaaatgatctcagtagtactcagcaagatggtttcgactttgaagattatcttaccttctttgatgaaacttttgatccttcgcaactgatgggaaatgaagatgtttttttcgatcaagaagagctctttcaagaggttgagactaaggaactagagaaagaggagacttcaagaagcaaacatgtggtggaagaaaaggaaaaggatgaagcatcttgttcaaaacaagttgatgcagatgcaacagagtttgagccagatgatggatcaatttctgaaaatgcagattacaagtacccgttactaaagaaggcaagccacatgttgggtgctattcctgctccgcttgcaaatgcttctgagttccctacaaaggatgcagctatccggttacacgcagcacaatcatcaggttcagttcatgtaaccgcaggtatgatcacgatatcagacagcaacatgggctggtcatacggcaaaaacgagaaccttgacttgatcctttctttggggttggtccaagggaataccgcccccgaaaaatcagggaatagttcagcatgggcaatgttaatattcatgtgtttctgggttcttctactctcagttagtttcaaagtgagcattttggtctcttccaggtga

SEQ ID NO: 2206 - DNA, 846 bp, Arabidopsis thaliana
  Clone ID: AT_F21B7.C1.o37.tg
atgaagattcttccggttggatcacggttttgtccgacggatctagggttggtgaggctttatcttcgaaacaaggtggagagaaatcagagcagtttcataacaactatggacatccaccaagactacccttggcttcttcctcacgtaaacaatcctttgttcaataacaacgagtggtactactttgttccgcttactgaacgaggtggcaagatattaagcgtacaccggaaggtagccgcaagaggaggaagcgaaggcggcacttggagaagcaacgatgggaaaaaagagatcaaggacggacacatgcaaaagggtgatgggttacgagcaagtgatgacctccaaaaggttgtcttgtgtcggatccgatacaagaaagaggcgaacgtcaacgagtttggactcgttaaccatcaggctcatcagactcaggatgctttaaccggttttgctgatcagcttgagatgatgctagagggacaagaagaccgtgagcagaaagaagaggctgatttaaccggttttgctgatagccttgagacgatgctagagggacaagaagatcatgagcagccagaagatgctgatttaaccggttttgctgatagccttgagacgatgctagagggacatgaagatcgtgagcagccagaagaggctgaattaaccgttactcaacaacaacaacaacaacaacaacaacaacaacgtcaagaagattgtgacgttactcaagagcaagaaaaagatgatgtgatggtactgataaacaatcctaatgatgccctcgcattggggaattatgagattattgatctaactagggttgataaatga

SEQ ID NO: 2207 - DNA, 687 bp, Arabidopsis thaliana
  Clone ID: AT_T5P19.C1.o210.tg
atgttcgatttcaaaatcttcacgttcagttttgctcaaagtaagtatcttgagaacattcgcgaaaagacattaaccgaagtgagtactagtgacatagagcttctccgacgaaattcacagcctttccggcgagctacaccatgctcactcacagtcgaccttcaggcaaactctttcacaccaaagctccaaagttacttgatgatgatgcctggaagaaacaagcgcaaagaaagatcctggccggaaccgcaaacgcaaccacagtcagagattccttcttcttcgtcttctttggcagctgataacatgtctcctccgtcgacgatagcttacgtattaccgccaggttttaagtttatgccaaacgataaagaagtcatcaattgttacttgaaaccttactcggacggcaacaccaacgtattgctcaatgttcctattcatcgcgtcaatatctacgagtcgaatccacagacactttcaggcagaaacgtggcgacactgacggaggatattggcacgcaaaagtggctgcccaaaagatttaaagctggagatggtgtcgttggcaacaaaaggccacttgcatactacgttgggaaaccatcagaaggcgtcaaaactgattggttaatgcaagaatactctcttgatcactcttctcacaacacgacaaggtaa

SEQ ID NO: 2208 - DNA, 810 bp, Arabidopsis thaliana
  Clone ID: AT_MBK5.C1.o27.tg
atgaaggcggagttgaatttgccggcgggattccgatttcatccgacggacgaagagcttgtcaagttctatctttgccggagatgtgcgtcagaaccgattaacgttccggttatcgcagagattgacttgtacaaattcaatccatgggagcttccagaaatggcgttgtacggtgagaaagaatggtacttcttctcgcatagagaccggaaatacccaaacgggtcgagaccaaaccgggcagctggaaccggttattggaaagcgactggagctgataaaccgatcggaaaaccgaagacgttagggattaagaaagcactcgtcttctacgcaggaaaagctccgaaagggattaaaacgaattggattatgcacgagtatcgtctcgctaatgtcgatcgatctgcttctaccaacaagaagaacaacttaagacttgatgattgggttttgtgtcggatatacaataagaaaggaacaatggagaagtatttaccggcggcggctgagaaaccgacggaaaagatgagtacgtcggactcaagatgctcaagtcacgtgatttcaccggacgtcacgtgttctgataactgggaggttgagagtgagcccaaatggattaatctggaagacgcgttagaggcatttaatgatgacacgtccatgtttagttccattggtttgttgcaaaatgacgcctttgttcctcagtttcagtaccagtcctccgatttcgtcgattcgtttcaggacccgttcgagcagaaaccgttcttgaattggaattttgctcctcaagggtaa

SEQ ID NO: 2209 - DNA, 918 bp, Arabidopsis thaliana
  Clone ID: AT_F20O9.C1.o190.tg
atgacttggtgcaatgaccgtagcgatgttcagaccgttgaaagaatcattccctccccgggggcggctgagtcccccgtagcctcacttccggtctcttgtcacaaaacttgcccttcttgtggccataacttcaagtttcacgaacaggctgggatccatgacttgccgggacttcctgctggagtaaaatttgatccgacggatcaagaggtcttggagcatcttgaaggcaaggtaagagatgacgcaaaaaagcttcatcctctcattgatgagtttatccgtaccatcgatggtgaaaacggcatttgttatacccatcctgaaaaattgccaggagtgaacaaggacgggacggtgcgtcatttcttccaccgaccgtcgaaggcatacacgacgggaacaagaaagcgacgtaaagtccacactgattctgacgtcggtggagagacacggtggcacaagacaggaaaaacacggccagttcttgctggaggaagagtgagaggctacaagaaaatcctagtgctctacacaaactacggcaaacaaaaaaaacccgagaagactaattgggtaatgcatcaatatcatcttggcactagcgaggaagagaaagaaggtgagctcgtcgtctccaaagtcttttaccagactcaaccacgtcaatgcggtggctccgttgctgctgcagccaccgctaaggaccgaccttacctccacggcctcggtggaggtggtggccgccaccttcattaccatcttcatcataacaacggtaacggtaagagcaacggcagtgggggaaccgccggagccggtgagtattatcacaatattccggctattatctcgttcaatcagaccgggatacagaaccacttggttcatgactctcaaccttttatcccttaa

SEQ ID NO: 2210 - DNA, 963 bp, Arabidopsis thaliana
  Clone ID: AT_F11P17.C1.o16.tg
atgggggattcgagcatagggccgggccatccgcatctccctcccgggtttcggtttcacccgactgatgaggaactagtagttcattacctcaagaagaaagcagattctgttccacttccagtctcaatcatcgcagagattgatctttacaagtttgatccttgggagcttccaagcaaggcgagttttggagagcacgagtggtacttctttagtcctcgggatcggaagtatccaaatggggttaggccaaaccgggcagcaacttccggttattggaaagcaacgggaaccgataaaccgatatttacgtgcaatagtcacaaggttggtgtcaagaaagcgcttgttttttacggtggaaagcctcctaaagggataaaaacagattggatcatgcatgaatatcgcctcactgatggtaaccttagcactgcggctaagccgcctgacttaaccacgacaaggaaaaactcactacggctagacgattgggttctatgtaggatctataagaagaatagttcacaaagaccaacaatggagagagtattacttagagaggatctaatggaaggcatgctctcaaaatcatctgctaattcttcttctacatcagtactagacaacaacgacaacaataataacaataacgaagaacactttttcgacggtatggtcgtttcttcagacaaacgttccttgtgtggtcaataccgaatgggccacgaggcctcaggatcatcttcattcggatctttcttatcgagcaagaggtttcatcatacaggtgatctcaacaatgataactacaatgtctcttttgtttcgatgcttagtgagattcctcagagttcggggtttcatgcaaatggtgttatggatacgacgtcgtctctagctgatcatggggttttaagacaggcgtttcagcttcctaacatgaactggcactcataa

SEQ ID NO: 2211 - DNA, 1023 bp, Arabidopsis thaliana
  Clone ID: AT_T27C4.C1.o6.tg
atggagaatccggtgggtttaagattccgtccgaccgacaaggagatcgtcgtcgattacctccgaccaaaaaactccgatagggacacgagtcatgttgatcgagtcattagcacagtcactatccgtagcttcgacccttgggagttaccttgtaagatcaaactgaaagatgagtcttggtgtttcttcagccctaaggagaacaaatatggcagaggtgatcaacaaattagaaaaacgaaatctggttactggaagattactggcaaaccaaagcctatcttgcgtaaccgccaagagatcggtgagaaaaaggttttgatgttttacatgagtaaggaacttggtggatccaaatccgactgggttatgcacgagtaccatgctttctctcctactcagatgatgatgacatatacaatatgtaaagttatgtttaagggtgacgtgagagagatttcttcttcttctgcttcttatggtagtgaaattgagcagagtcgtgactctttaatccctcttcttgtgaacgattctgaggaagaagctcaaatcgaggatgctataccaatagaggaatgggaaacatggttgactgatgatggtgttgatgagcaggtgaatcatattatgaatatgaaagatgatcgcaacaaccacaggcctcaaaagccattgactggtgtcttgattgacgatagtagtgatgatgatgatgattctgatttgctatctccaacaacaaattctattgaaaattcgagcacttgtgatagttttggtagctcagaccaaatcaacttagtgtcactaactcaagaggtgagccaagctctgataaccagtattgatacacccgagaagattaagagtccttatgatgatgcacaagggactggggctggagggcaaaaattgggtcaagagactcgagagaagaaacgagctggtttctttcacaggatgatacaaatattcgtcaagaaaattcaccaatgttcttctatctcaagaacataa

SEQ ID NO: 2212 - DNA, 945 bp, Arabidopsis thaliana
  Clone ID: AT_MYF24.C1.o11.tg
atggaagaaaatcttcctccggggttcagatttcatcctacagacgaggagctcataacgcattatctatgtcggaaagtctccgatataggattcaccggtaaagctgtcgtcgacgttgatctcaacaagtgtgaaccttgggatttgccagccaaggcttcaatgggagagaaagagtggtatttcttcagccaaagggatcggaaatatccaaccggtttaagaacaaaccgggcaacagaagctggttactggaaaaccaccgggaaagataaagaaatataccgaagtggagtgttggttgggatgaagaaaaccctagttttctacaaaggaagagctcccaaaggtgagaaaagcaattgggttatgcatgagtacaggcttgagagcaaacaacctttcaaccccacgaataaggaggaatgggtagtgtgtagggttttcgaaaagagcacggcagcaaagaaagcacaagaacaacaacctcaatcttctcaaccatcttttggatctccatgcgatgcaaactcatcaatggcaaatgagtttgaagatattgatgagcttccgaatctgaattcaaactcatcaaccatcgattacaataatcatatccatcaatattcgcaacgcaatgtttactcagaagacaacacaacaagtacggctggtctcaacatgaacatgaacatggctagtactaatcttcagtcttggacaacaagtctccttggtccgcctttatctccaatcaactctttgttgctcaaggctttccaaatcaggaactcttatagtttcccaaaagagatgatccccagtttcaatcattcttctcttcaacaaggagtctccaatatgatccaaaatgcttcaagttcgtctcaagtgcaaccccaaccgcaagaggaagcgtttaatatggactccatatggtga

SEQ ID NO: 2213 - DNA, 1005 bp, Arabidopsis thaliana
  Clone ID: AT_F14G6.C1.o2.tg
atgatgcttgcggtggaagatgtgttaagcgaactcgccggagaagaaaggaacgagagaggattgccacctggcttccggtttcacccgacggacgaagagctcattaccttctacttagcttccaaaatcttccatggtggtctctccggcattcacatttccgaagttgatctcaaccgctgtgaaccttgggagctaccagaaatggcgaagatgggagagagagagtggtacttttatagtctaagggacaggaaatatccgacaggtttgaggactaacagagcaactactgctggatactggaaagctaccggcaaagataaggaagtcttctccggcggaggaggacagcttgttgggatgaagaagacgttggtgttctacaaaggtagggctccacgtggcctcaagactaagtgggtcatgcatgagtatcgcctcgaaaacgaccattcacaccgccacacgtgtaaggaggaatgggtgatttgcagagtgttcaataaaacaggagacagaaaaaatgttggattaatccataaccaaatcagctaccttcataaccattcactctcaacaacacatcatcatcatcatgaagccttacctttgcttatagaaccttccaacaaaaccctaaccaacttcccatcactactctacgatgatccacaccaaaactacaataataacaacttccttcatggatcatcaggccacaacatcgacgagctcaaagccttaatcaaccctgtcgtctctcagctcaacggtatcatctttccttcagggaacaacaacaacgacgaagacgacttcgactttaacctcggcgtgaaaacagagcagtcttcgaacggtaacgaaattgacgtacgagattacttggagaaccctctgtttcaggaagcgagttatggtctgttgggtttttcgtcttctcctggacctcttcacatgctactagattctccatgtcctttaggattccagctgtag

SEQ ID NO: 2214 - DNA, 1161 bp, Arabidopsis thaliana
  Clone ID: AT_MIK19.C1.o7.tg
atgaagaatagtaaatgtaacctcatagattcaaagctcgaagaacatcatcatctttgcggatcaaaacattgtcctggatgtggtcgcatgattcaagctgctactaaaccaaattgggttggattgccggcaggagtgaaattcgatccgacagatcaagaacttatagaacatttagaagcaaaagtgaagggaaaagaagaaaataagaaatggtcgtcgtctcatccacttatagatgaatttattcccaccattgatggagaagatggaatatgttacactcatcctcagaagcttccaggggtgacaagagatggcttgagcaaacacttcttccacaaaccatcaagagcttacacaaccggaacaagaaaacgacgtaaaataattcaaaccgatcacgactctgagttaaccggatcatcagaaaccaggtggcacaaaacgggcaaaacaagaccggttatgatcaacggtcaacaaagaggatgcaagaagatattagtactctacacaaacttcggcaagaatcgtcgaccggagaaaacaaattgggtgatgcatcaatatcatttagggattaatgaggaagagagagaaggagaacttgtggtctccaagatattttatcagacacaaccaagacagtgtgttagtaatactaattggtctgatcaccatggttccaaggacgtgatcggaattggtgtcggagatgagatttccagcgtagctgccacgttgcagagtcttggctccggtgacgtcgtttctagggttaatatgcatccccatacaagatcctttgatgaggggacagccgaagcttcaaagggaagagagaaccagcatgtgtctggcacgtgcgaggaagtacatgatgggatcataacatcatcaatgtcatctcatcatatgattcatgatcatcataatcaacatcatcaaatcggagatagaagagaatttcacatgtcatcatcatatcccatgacccctactatcacatcacaacatgagtcaatcttccatgttacaagtactatgccctttcaggggtcggtcgtctggttcgggattagaagacctaattatgggttgtaccacagctacgtgtacagaagacgtaagtttctaacgaatttgtgtatttaa

SEQ ID NO: 2215 - DNA, 639 bp, Arabidopsis thaliana
  Clone ID: AT_MEE6.C1.o16.tg
atgggcccaacatacagagctttgccagtaggtatgaggtttcgtccttcagatttggagttggctgtttactttttgatcaagaaagctttaggacttcccatgaaagctcttactgtgcccgacgaatgtaatgatatcttctcaacacatcctcgcgacttgcctggctatggaagcgaagagcattggtacttctactgcaagaaacccaagaatcaagttactagaacgaaatcttataacctctggataccaacgggagaaaaaactgatgtgttagatccaaagaagaatggcggcgaattagtcggtatcaagcattcgtttactttcattgagaacgaagaagaagaagaatctgataacaagaacggcgatgaagaagaacctccacaatgcaattggttcttggatgaaatcagcctcccattgacagttgtggatactgattggactctgtgtcatatcttttacgagaaggttaaacctgaatttggtaatttgcatatagtcgaatctgaatccgaatccgaagaagaagaagaagatgaaagtgttgataagcctgcagagagtttggatagtgttaaagagaaagatggaactgttcttcctccacctcctgctacaccttag

SEQ ID NO: 2216 - DNA, 1497 bp, Arabidopsis thaliana
  Clone ID: AT_F17A13.C1.o50.tg
atgaacaagagtaatcctgctggttcggtgactggttcggatataatagacgccaagatcgaagaacatcaactttgtggatccaagaagtgtcctagctgcggccacaagctcgaaggcaaaccacaggattgggttggtttaccagcaggagtgaaatttgacccaacggatcaagaattgatagaacatttagaagcgaaagtgttagctaaagacttcaaatctcaccctctcattgacgaattcatcccaaccattgaaggcgaagacggcatttgctacactcatcccgagaaacttcctggagtgactagagatggtttaagccgacacttctttcatagaccatcaaaggcgtacacgacgggaacaagaaagcgaagaaagattcaaacagaatgtgacaataatttgcaaggaagtagtagctccggtgagacgaggtggcataagaccggtaagacaagaccggttatggtaaacggtaagcaaaaaggttgtaagaagattttggttttgtataccaattttggtaagaatcgaaaaccggagaaaaccaattgggtaatgcatcaatatcatttggggacacatgaggaagagaaagaaggagaacttgttgtgtctaagatcttttatcaaactcagcctaggcaatgcaactggtcgtcttctacatcgagcttgaacgctataggtggtggcggcggtgaagcgagtagcggcggaggcggcggagagtatcatatgaggagagatagtgggactactagtggtgggagttgttcttcgtctagagaaattattaatgttaatcctccgaatcgatccgatgaaataggcggcgttggtggtggcgttatggccgtagcagctgcggctgcggcggttgcagctgggcttccgagttatgcaatggatcagctcagctttgttccgtttatgaaaagctttgatgaggtggcgaggagggaaactcctcagactgggcacgctacatgtgaggatgtaatggcagaacaacatcgtcatcgtcatcaaccatcatcatcaacatcacatcatatggctcatgatcatcaccatcatcatcatcaacaacaacaacaacggcatcatgcattcaacataagccagcctacacatccgatatcaaccattatttctccatctacttcgcttcaccatgcctccattaatattcttgacgataatccttatcatgttcatagaatcttgctccccaatgaaaattaccagacacaacagcaactacgtcaagaaggagaagaagaacataatgatgggaagatgggaggaaggtcagcttccggattggaagaactcataatgggctgcacttcttctaccactcatcatgatgtaaaagatgggtcatcatcaatggggaaccaacaagaagcagaatggttgaagtactcaacgttttggccagcccctgactcttctgacaaccaagatcatcatgggtaa

SEQ ID NO: 2217 - DNA, 1896 bp, Arabidopsis thaliana
  Clone ID: AT_F12P19.C1.o8.tg
atggctcctgtttcaatgcctccaggtttccggtttcatccaacagacgaagagcttgtcatatactacctcaagcgaaagattaatggtcggactattgagttagagataatacccgagattgatctttacaaatgcgaaccttgggatttacctgggaagtccttgctgccaagtaaagacctagaatggttctttttcagtcctcgagaccggaaatatccaaacggatcaagaacaaaccgggcgaccaaagcaggttactggaaagccaccgggaaagatcgtaaagtgacttcacattcacggatggttggaacaaagaaaacattagtttattaccgaggaagagcgcctcatggctctcgtaccgattgggtcatgcacgagtaccgtcttgaagaacaagaatgtgactctaaatccggtatacaggatgcctatgcactttgtcgagtatttaagaagagtgctttagccaacaaaattgaagaacaacaccatggtacgaagaagaacaaaggaacgactaatagtgaacaatctacttctagtacttgtttgtattctgatggaatgtatgaaaacctcgaaaactcggggtatccagtctcacctgagacaggaggcttaactcaactcggtaataattcgtcgtcggatatggaaacgatagagaataaatggagtcagtttatgtcgcatgacacgtccttcaacttcccacctcagtctcaatatggaacaatctcatatcctccctcgaaggttgatatagcgttagagtgtgcaagactacaaaatcgtatgttgccaccagtaccaccactttacgtagaaggtctcacacacaatgaatattttggaaacaatgtagctaacgatacagatgaaatgttgagcaagattatagcattggctcaagcctcacatgagccacgaaacagtctagactcatgggacggtggttctgcttccgggaacttccatggagactttaactattccggagaaaaagtctcatgcctagaggcgaacgtggaggctgtagatatgcaagaacaccatgtgaattttaaggaagaaagacttgttgaaaacttgagatgggtaggagtatcaagcaaggaacttgaaaagagcttcgttgaagaacactcaacggtaattcctatagaagatatttggagatatcataatgataatcaagaacaagaacatcatgatcaagatggtatggacgttaacaacaacaatggagatgtggatgatgctttcacactcgagttttcggaaaacgaacataacgagaatcttttggacaagaacgatcatgagacaacgagttcctcatgttttgaggtggtaaaaaaagttgaggttagccatggattgtttgtcacaactcgtcaggtaaccaacacattcttccaacagatagtaccatcgcaaaccgttatagtttatataaatccgacggatggcaatgagtgttgtcatagtatgacatcaaaagaggaggttcatgtccgtaaaaagataaatccgcgaatcaacggagtaagctcaacagttcttggacaatggagaaaattcgcgcatgttattggcttcattcctatgcttctattgatgcgttgtgttcatcgaggtaactctaacaaaaacagaggcagtgaaggttactcgaggcagcctacgagaggagattgtaacaatcggggaacaatactcatgatggaaaatgctgtcgtgagaagaaaaatttggaagaagaagaaagagaaaaatatggttgacgaacaaggttttcggtttcaagatagtttcgtattgaagaagttggggctttctcttgctatcatcttagctgtttctaccataagtcttatttga

SEQ ID NO: 2218 - DNA, 1116 bp, Arabidopsis thaliana
  Clone ID: AT_F20B17.C1.o1.tg
atggagatagggtcgtcatccacggtggctggcggaggacagctttcggtgcctccgggattccggtttcatccaacggaggaggagcttctttactattacctcaagaagaaggtttcttatgaaccaattgatttagatgtaattagagaagttgatctcaacaagctggaaccttgggaacttaaagagaaatgcagaatcgggtcgggtcctcaaaacgagtggtatttctttagccacaaggacaagaaatatccgactgggacccgaacgaaccgggcgacagcagccgggttctggaaagctactggtagagacaaatccatacatctcaacagctccaagaagattggacttcgtaagactcttgtcttctacactggtcgtgctcctcatggccaaaaaaccgaatggatcatgcacgaatatcgcttggacgatagcgaaaacgaaattcaggaagatgggtgggttgtatgcagagtgttcaagaagaagaatcatttcagaggatttcaccaagaacaagagcaagatcatcatcatcatcaccaatacataagcaccaacaatgatcatgatcaccatcatcacattgactccaattcaaacaatcattctcctttgatcctacatcctctggatcatcatcaccaccatcatcacattggacgacaaatccacatgccattacatgagtttgcaaacactctgagccatggctcaatgcatctacctcagctctttagccctgactcagctgcagcggcggctgccgcagcagcatcagcccaaccatttgtgtcgccaatcaacactacggacattgaatgttcacagaatctactgaggttgacttctaacaacaactatggtggagactggtcgtttctggacaagcttctcactacaggcaacatgaatcagcaacagcagcagcaagtgcagaaccatcaagcaaaatgttttggtgacttgagtaacaacgataataacgatcaggctgatcatttgggtaacaacaatggtggttcttcttcatctccagttaatcaaaggtttccgtttcactacttgggaaacgacgctaatcttctcaagttcccaaagtag

SEQ ID NO: 2219 - DNA, 1140 bp, Arabidopsis thaliana
  Clone ID: AT_F3P11.C1.o8.tg
atgagcaacgacaaggacagcatgaacatgtccgatctctccaccgctcttaacgaggaggatcgtgccgggcttgttaatgctcttaagaacaagttgcagaatttggctggacaacactctgatgtccttgaaaacttgactccaccagtcaggaagcgtgtcgagtttctaagagagattcagaaccaatatgatgagatggaagcaaaattctttgaggagagagcagctcttgaagctaagtatcaaaagttatatcagcctttatataccaagcgatatgagattgtgaatggtgtggtcgaagttgaaggtgcagctgaagaagtaaaatccgaacaaggagaagataaatcagctgaagagaaaggagtaccagatttctggcttattgcattgaagaacaatgaaattactgcggaagagataactgagcgagatgaaggggctctcaagtatctcaaagatatcaagtggagtagggttgaagaaccaaaagggttcaagcttgagtttttctttgatcagaatccttacttcaagaacactgtcttgaccaagacatatcacatgattgatgaagatgagcctatccttgagaaggccctcgggacggagattgagtggtatcctggaaagtgtttgacacagaagattctaaaaaagaagccaaagaaaggatccaaaaacacaaagccgatcactaagactgaggactgtgagagtttcttcaactttttcagtccacctcaagttcctgacgatgatgaggatcttgatgatgacatggctgatgaactccaaggacaaatggagcatgattatgatatcggttcaacaatcaaagagaaaatcatctcgcatgctgtgtcatggttcactggtgaagctgttgaggcagatgaccttgatattgaggacgacgatgatgagattgatgaagatgatgatgaagaggacgaggaagatgatgaggatgacgaggaggaggatgatgaggatgatgacgaggaggaagaagcagatcaaggaaagaagagcaaaaagaagtcatcagctgggcacaagaaggctggaagaagtcaacttgcggaaggtcaagcaggtgagaggccaccggaatgtaagcagcagtga

SEQ ID NO: 2220 - DNA, 768 bp, Arabidopsis thaliana
  Clone ID: AT_F6A14.C1.o10.tg
atggtgacagacaagagcaagaaggcgaaaaccgaagaagaaaacgtcgagcaaatcgatgcagagcttgtcctctcaatcgaaaagcttcaagagatccaagacgacctcgagaagataaatgaaaaggctagtgatgaagtgttggaagtggagcagaaatataatgtgataaggaaacctgtttatgacaagcgtaacgagatcatcaaaaccatccctgatttctggttaactgctttcttgagtcaccctgctttaggtgaacttttgactgaagaagaccaaaagattttcaaatatcttagctctcttgatgttgaggatgccaaagatgtgaaatctggatactctatcactttttccttcaatcccaatccattttttgaagatggaaaactgacaaagacttttacctttctcgaagaagggacaaccaaaatcacagccacgcctatcaaatggaaagagggcaaaggcctggcgaatggagtgaatcatgagaagaatggaaacaaacgtgcactacctgaagagagcttctttacctggtttagtgatgctcaacacaaggaggatgttgaggatgagatgcaagacgaggttgcagatatcatcaaggaagatttgtggcccaaccctctcacctacttcaacaatgacgctgatgaagaggactttgatggagacgatgatggagatgaagaggagaaagaaggtgactctgatgaagatgatgacgaagaagacgaagttggtgaggaatga

SEQ ID NO: 2221 - DNA, 2892 bp, Arabidopsis thaliana
  Clone ID: AT_F13E7.C1.o16.tg
atgggtcgcagaggtcgtcttgaaatacagtctggaacttgtaatgtctgctctgctccttgttcatcttgcatgcatcataatgcggaattttccggttcaaagtcagatgagtcatcagatgaaaactcccatggtgtactggcaagccagtgttctttcaacggggacaatcttttgcgttcttctggggttaatgctcccggcagttcacataacacttctagtgaagcgagccatctggttaattccaatcatgatacttcatctgagaatgctgagagtaaggaaattataagatcttctgatatttcccatggcccattattagataggcctcacaaagatcaagattccatgaaggtagattcatgtaatgaccatcaggccagaagcactctagggcagggaaaagtcaaggaaaagtcaggagcaaagaataacgaagagaagaaaaatactttaactggaagttctaagcattcaggaccaagggtcgggaagtcaggagaaaatgttctcttaaataaggcagatgaatcaaacacatctgccatgtctgacagtgagagtgaaaatgatcctgaaatgctagaacttgatgtaaaagtatgtgatacttgtggagatgcgggtcgtgaggatttacttgctatctgtagtagatgcagtgatggtgcagaacacacctattgtatgcgagtaatgcttaaaaaagttcctaagggttattggctttgtgaagagtgcaagtttgctgagaaagcagaaaagcataaactagaaaccaagcgaaaaagagagagtgaagtaaacgttaatacacagatctccagcaaaaggcacatagataaattcgaggcagttcctgattctaaaagattggcagttggggctcaaataggatcacccaagagatctgttctcccaagaatgtccactttatcccgagaaacatcatttaagggcttagagaagccaacgagaaagctagctcattactcatctttcaatagccactccagtgatgacacagaaagcacacgatctactgactcacagctccagtcccctaaaggttcgtttttgaagtccaattcgtttaattctttgagctctagatcaaaagtgagaccagtggatgatgatatgcttccacgacagaagactgggaatgaaaattcttcccttgaagtaaaggaaggattttcaaaaaatgtaggcaaatcaatgtcaagtagatgtattgacgtagggagctctaattgtaatgactcaaaagtaaaaggttcaaagcaactgaaagattggagcacagaagctaacccttcagcatccatttcacgtggcaattcatccattccttatgcaaaaagtccccgtgatttgaaggatttgcagtctgatggtaaacaagtgggggattcatctaagaatgaaaagtgtagttcaagtgagcaaatatcaagtgaagcgaaatgtaaagatgaactggcacaagtagatggtgtaccccggtcgagggaattcagagaggcgggggagaaaaccaaagatgctgttggtaatcaccaaaagcgaaatattggcgaggataataataagggcaataggttgcgagcagcggttgatgctgcactgcgaaaaaaacccagctttagcaaaaacagagggttggagcaatctgatttgcctccagtgtctaatgtggattctggttgtaataaggctttaaaatgtttgtcctcaaaggtgccggtcataagagattggcctgtgggattccaaggattgccaggagggcatccaaatttacggacagacaagcagacaaatacagtaaatgaaaagcagtttacactcgctggtactgatgcaacgactgcttcccaatctgttgagcccgaagttaacgatccttctgtacaatcggtcatgagagatttgcctgtggctgccccaaatgttctgtcgacaacctcagccatcccaaagcctgagtatatttggcaaggggacttggaggtgcagaaaagcagaaatttgtcagcaatgcatagtggaatacaagcgtatctttcaaccttagcttcacctaaggtggttgaagtggtgaaacaatttcctgaaaaagtcaccttgaatgaagtacccaggcttagttcatggcctgcacagtttcaagatacaggtgctaaggaacagcatgtggctcttttcttctttgccaaggacatcgagagttatgagaaaaattataagcctctggtagataacatgattcagaaagatttagccctaaagggaaacctcgagggcgttgagcttttgatatttgcgtccaaccagcttcctcaagattgccagcgctggaacatgttatttttcctttggggtgtattccgaggaaaaaaagagagttgctctaatccaccaaagaacacacccctcccggcatcttgtgtttcgccaaatcgtgatacctttcgccatgagaatccaagcaacaaaaagtctttgactgatcgcacattgagcagaatgcaatcgtgtatgaaggaggaggatgctaaagagggtaaagcgtgcagtggcactgagaaggagaatgcattctctgtttcatatggagaaggtgaagtggatgtagaaactgaggaaggagagataggtgttagcccacagttgaagtatgagaagacggcagggcctgggacagtgaaatccgccgacatgaaccagagagtgaacgtggatgatctgaataaagaagggctgtgtgaaggtccagcgaataaaaagctgaagacagttacaggagtagaaactggatgtagcattgtcaggagggatacatctgttcataaatttgcttcaaggaaattcgtctag

SEQ ID NO: 2222 - DNA, 813 bp, Arabidopsis thaliana
  Clone ID: AT_F20D21.C1.o47.tg
atggctattgcacgaactggagtttatgttgatgattaccttgagtatgcaagcactttccctgcagagctacaaagattactaaacacagttcgcgaactagacgagagatctcaatggcttgcttcacagagttctaaaaagggtaatggtaatcattacaataatggtggtcttgatgaagaggaaacgattgagaaaatgcgtaaagagattgagtctagtcaggaaaatgcgttaagtttgtgtaccgagaaggttttattggcccgacaagcgtatgatcttatagatagtcatgtaaaacgacttgatgaagatctgaataattttgcagaagatttaaagcaagagggaaaaattccaccagacgagccctctgttcttcctccactacctatagttcctaaagcggaaaagcgtaagtccttctatggcacacctcagcccaagaagattgattatagagatagagactgggatcgtgacagggattttgagctcatgcctcctccaggaagcaatcggaaagaccttatgccaattgaagagcagccaatcgatccaaacgaaccaacttactgtgtctgccatcaggtgtcctttggagacatgattgcctgtgacaatgagaattgccaaggaggtgaatggtttcactatacatgcgttggcctcacacctgagaccagattcaaagggaaatggtgccactggcatcttctttggcaccttcccttcatgaccaatgccaccaaactcatctttcttgttacccaacatctagcaagtgcaagtagaagcaaactttag

SEQ ID NO: 2223 - DNA, 3198 bp, Arabidopsis thaliana
  Clone ID: AT_K2A11.C1.o4.tg
atggaatccgaaggagaaaccgcgggaaagccgatgaagaacattgttccgcagacttgccagatctgtagtgacaatgttggcaagactgttgatggagatcgttttgtggcttgtgatatttgttcattcccagtttgtcggccttgctacgagtatgagaggaaagatgggaatcaatcttgtcctcagtgcaaaaccagatacaagaggctcaaaggtagtcctgctattcctggtgataaagacgaggatggcttagctgatgaaggtactgttgagttcaactaccctcagaaggagaaaatttcagagcggatgcttggttggcatcttactcgtgggaagggagaggaaatgggggaaccccagtatgataaagaggtctctcacaatcatcttcctcgtctcacgagcagacaagatacttcaggagagttttctgctgcctcacctgaacgcctctctgtatcttctactatcgctgggggaaagcgccttccctattcatcagatgtcaatcaatcaccaaatagaaggattgtggatcctgttggactcgggaatgtagcttggaaggagagagttgatggctggaaaatgaagcaagagaagaatactggtcctgtcagcacgcaggctgcttctgaaagaggtggagtagatattgatgccagcacagatatcctagcagatgaggctctgctgaatgacgaagcgaggcagcctctgtcaaggaaagtttcaattccttcatcacggatcaatccttacagaatggttattatgctgcggcttgttatcctttgtctcttcttgcattaccgtataacaaacccagtgccaaatgcctttgctctatggctggtctctgtgatatgtgagatctggtttgccttatcctggattttggatcagtttcccaagtggtttcctgtgaaccgtgaaacctacctcgacaggcttgctttaagatatgatcgtgaaggtgagccatcacagttagctgctgttgacattttcgtgagtactgttgaccccttgaaggagccaccccttgtgacagccaacacagtgctctctattctggctgttgactacccagttgacaaggtgtcctgttatgtttctgatgatggtgctgctatgttatcatttgaatcacttgcagaaacatcagagtttgctcgtaaatgggtaccattttgcaagaaatatagcatagagcctcgtgcaccagaatggtactttgctgcgaaaatagattacttgaaggataaagttcagacatcatttgtcaaagatcgtagagctatgaagagggaatatgaggaatttaaaatccgaatcaatgcacttgtttccaaagccctaaaatgtcctgaagaagggtgggttatgcaagatggcacaccgtggcctggaaataatacaagggaccatccaggaatgatccaggtcttcttagggcaaaatggtggacttgatgcagagggcaatgagctcccgcgtttggtatatgtttctcgagaaaagcgaccaggattccagcaccacaaaaaggctggtgctatgaatgcactggtgagagtttcagcagttcttaccaatggacctttcatcttgaatcttgattgtgatcattacataaataacagcaaagccttaagagaagcaatgtgcttcctgatggacccaaacctcgggaagcaagtttgttatgttcagttcccacaaagatttgatggtatcgataagaacgatagatatgctaatcgtaataccgtgttctttgatattaacttgagaggtttagatgggattcaaggacctgtatatgtcggaactggatgtgttttcaacagaacagcattatacggttatgaacctccaataaaagtaaaacacaagaagccaagtcttttatctaagctctgtggtggatcaagaaagaagaattccaaagctaagaaagagtcggacaaaaagaaatcaggcaggcatactgactcaactgttcctgtattcaacctcgatgacatagaagagggagttgaaggtgctggttttgatgatgaaaaggcgctcttaatgtcgcaaatgagcctggagaagcgatttggacagtctgctgtttttgttgcttctaccctaatggaaaatggtggtgttcctccttcagcaactccagaaaaccttctcaaagaggctatccatgtcattagttgtggttatgaggataagtcagattggggaatggagattggatggatctatggttctgtgacagaagatattctgactgggttcaaaatgcatgcccgtggatggcgatccatttactgcatgcctaagcttccagctttcaagggttctgctcctatcaatctttcagatcgtctgaaccaagtgctgaggtgggctttaggttcagttgagattctcttcagtcggcattgtcctatatggtatggttacaatgggaggctaaaatttcttgagaggtttgcgtatgtgaacaccaccatctaccctatcacctccattcctcttctcatgtattgtacattgccagccgtttgtctcttcaccaaccagtttattattcctcagattagtaacattgcaagtatatggtttctgtctctctttctctccattttcgccacgggtatactagaaatgaggtggagtggcgtaggcatagacgaatggtggagaaacgagcagttttgggtcattggtggagtatccgctcatttattcgctgtgtttcaaggtatcctcaaagtccttgccggtattgacacaaacttcacagttacctcaaaagcttcagatgaagacggagactttgctgagctctacttgttcaaatggacaacacttctgattccgccaacgacgctgctcattgtaaacttagtgggagttgttgcaggagtctcttatgctatcaacagtggataccaatcatggggaccactctttggtaagttgttctttgccttctgggtgattgttcacttgtaccctttcctcaagggtttgatgggtcgacagaaccggactcctaccattgttgtggtctggtctgttctcttggcttctatcttctcgttgttgtgggttaggattgatcccttcactagccgagtcactggcccggacattctggaatgtggaatcaactgttga

SEQ ID NO: 2224 - DNA, 1200 bp, Arabidopsis thaliana
  Clone ID: AT_muf9.C1.o60.tg
atggatttggaagctaattgtaaggaaaaactttcatattttcggataaaagagctcaaggatgtgctcactcagctgggactttcgaaacagggaaagaagcaggaacttgtcgaccggatcttgacccttctttctgatgaacaagctgccaggttgttgtctaaaaagaatacagtggcaaaggaagcagttgccaaattagtggacgatacatataggaaaatgcaagtatctggggcaagtgatttagcatcaaaaggacaagtgagttcagataccagtaatctgaaagttaagggagagcctgaagaccccttccaaccagaaattaaagttcgatgtgtttgtggaaactcgctagaaacagactcaatgatacaggtaatctgggatgaactcactgcgtttattccttgtgaggatccaagatgccatgtttggcagcatgttggctgtgttattctcccagataagcctatggatgggaatccaccacttccggaatcattttattgtgaaatctgccgacttactcgagctgacccattttgggttacagtggcacatccactctctccagtgaggctgactgcaacgactatcccaaatgatggtgcaagcacaatgcagagtgtggagagaacatttcaaatcacaagggcagacaaggaccttttggccaaaccagagtacgatgttcaggcttggtgtatgctcttgaatgataaagttctctttaggatgcagtggcctcagtatgctgatctgcaggtcaatggtgtgcctgtacgtgcaattaatcgacctggaggacagcttttgggagtcaacggccgcgacgatggacccattgtgtgttttttatcatcccttttgagtagtaacccttttgaattacatataggagtcaatctctcatacattgaaaatctagcaatcagtgatgtaagttttaaccatttcattttactattttggcagattacatcttgtattagggatggagttaacagaatatccttgagtggaggtgacgttcggattttttgttttggggtcagacttgtgaagcgcaggactctacaacaggtactgataacatatatgcataagaaacattcaaagatttggtcgtatatgtggtcaatgaagagtccaaacataaatgttcaaaaaggaacgaaattaatattctga

SEQ ID NO: 2225 - DNA, 1797 bp, Arabidopsis thaliana
  Clone ID: AT_F15E12.C1.o5.tg
atggcgattcaaactcagcttccttgcgacggagacggtgtatgtatgcggtgccaggtgaatcctccgtcagaagagactctcacgtgtggcacctgtgtcactccatggcacgtgtcgtgtctccttcctgaatcactcgcttcttccactggagactgggagtgtcccgattgctccggcgttgttgttccctccgccgctccgggtaccggaatctccggacctgaatcttccggttcagttctcgttactgcgatccgtgcgattcaggctgatgtgactttgaccgaagctgagaaagccaaaaagaggcagagactgatgagtggtggtggtgacgatggtgtcgatgatgaagaaaagaagaagttagaaatcttttgttctatttgcattcaattgccagagagacctgttacgacaccgtgtgggcacaatttctgtttgaaatgtttcgagaaatgggcagtaggtcaagggaagctaacttgtatgatatgccgaagcaaaattccgagacatgtggcgaaaaatcctcgcatcaacttagctctagtttctgctattcgtttagcaaatgttaccaaatgttctggtgaggcaactgcggccaaggttcatcatattatccgcaaccaagaccgtcctgacaaagcatttactaccgagcgggcagtaaaaactgggaaagctaatgctgctagcggtgttttggttggagaatcttgggaggacaggcaagagtgtaggcagtggggagttcatttcccgcatgttgctggcattgccgggcaagcagcggttggagctcagtctgtggccctctctggaggttatgacgatgatgaggatcatggtgaatggtttctctacacaggaagtggtggaagggatctcagtggaaacaaaagagttaacaagatacagtcttctgaccaggcgtttaaaaacatgaatgaagctctaagacttagttgcaaaatgggctatcctgtccgagttgtaaggtcttggaaggagaagcgttctgcatatgcccctgcggaaggagtgagatacgatggggtctacagaattgaaaagtgctggagtaatgttggcgtacagggtttgcataagatgtgtcgttacctgtttgttagatgtgacaatgagccagctccatggaccagtgatgagcatggcgatcgtccaagacctttgcctgatgttccagagctggagaatgctactgacctgtttgtgagaaaggagagtccatcatggggtttcgatgaagctgagggtcgttggaagtggatgaagtctccacctgttagcagaatggctttggatactgaggagaggaagaagaataagagagcaaaaaaaggaaataatgctatgaaggccagacttctgaaagaattcagttgccaaatctgtcggaaagtgctgagtcttccagtgacgacaccttgtgcacacaacttctgcaaagcatgcttagaagcgaagtttgctgggataactcaactgagagacagaagcaatggcgtgcgtaaactacgtgcaaagaaaaacatcatgacctgcccttgctgcacaaccgatctctccgagtttctccaaaacccgcaggtgaacagagagatgatggagataatagagaattttaagaagagtgaggaagaggctgaagttgcggagtcatcaaacatttctgaagaagaaggagaagaagaatccgaacctccaactaagaagattaagatggataaaaactctgttggtggtacaagtctctcagcttaa

SEQ ID NO: 2226 - DNA, 1869 bp, Arabidopsis thaliana
  Clone ID: AT_F15E12.C1.o8.tg
atggcgattcaaactcagcttccttgcgacggagacggtgtatgtatgcggtgccaggtgacacctccgtcagaagagactctcacgtgtggcacctgtgtcactccatggcacgtgtcgtgtctccttcctgaatcactcgcttcttccactggagattgggagtgtcccgattgctccggcgttgtcgttccctccgccgctccgggtaccggaatctccggacctgaatcttccggttcagttctcgttgctgcgatccgtgcgattcaggctgatgtgactttgaccgaagctgagaaagccaaaaagaggcagagactgatgagtggtggtggtgacgatggtgtcgatgatgaagaaaagaagaagttagaaatcttttgttctatttgcattcaattgccagagagacctgtcacgacaccgtgtgggcacaatttctgtttgaaatgtttcgagaaatgggcagtaggtcaagggaagctaacttgtatgatatgccgaagcaaaattccgagacatgtggcgaaaaatcctcgcatcaacttagctctagtttctgctattcgtttagcaaatgttaccaaatgttctggtgaggcaactgcggccaaggttcatcatattatccgcaaccaagaccgtcctgacaaagcatttactaccgagcgggcagtaaaaactgggaaagctaatgctgctagcggtaagttttttgtgacaatacctcgtgatcattttggtcccataccagctgcgaatgatgtcactagaaaccaaggtgttttggttggagaatcttgggaggacaggcaagagtgtaggcagtggggagttcatttcccgcatgttgctggcattgccgggcaagcagcggttggagctcagtctgtggccctctctggaggttatgacgatgatgaggatcatggtgaatggtttctctacacaggaagtggtggaagggatctcagtggaaacaaaagagttaacaagatacagtcttctgaccaggcgtttaaaaacatgaatgaagctctaagacttagttgcaaaatgggctatcctgtccgagttgtaaggtcttggaaggagaagcgttctgcatatgcccctgcggaaggagtgagatacgatggggtctacagaattgaaaagtgctggagtaatgttggcgtacagggtttgcataagatgtgtcgttacctgtttgttagatgtgacaatgagccagctccatggaccagtgatgagcatggcgatcgtccaagacctttgcctgatgttccagagctggagaatgctactgacctgtttgtgagaaaggagagtccatcatggggtttcgatgaagctgagggtcgttggaagtggatgaagtctccacctgttagcagaatggctttggatactgaggagaggaagaagaataagagagcaaaaaaaggaaataatgctatgaaggccagacttctgaaagaattcagttgccaaatctgtcggaaagtgctgagtcttccagtgacgacaccttgtgcacacaacttctgcaaagcatgcttagaagcgaagtttgctgggataactcaactgagagacagaagcaatggcgtgcgtaaactacgtgcaaagaaaaacatcatgacctgcccttgctgcacaaccgatctctccgagtttctccaaaacccgcaggtgaacagagaaatgatggagataatagagaattttaagaagagtgaggaagaggctgaagttgcggagtcatcaaacatttctgaagaagaagaagaagaatccgaacctccaactaagaagattaagatggataacaactctgttggtgatacaagtctctcagcttaa

SEQ ID NO: 2227 - DNA, 1953 bp, Arabidopsis thaliana
  Clone ID: AT_F12K22.C1.o15.tg
atgacgcctgccacccagtacccatgcgaccccgaaggtgtatgcatgcgatgcaaatcgatgcctccaccggaggaatctctcacttgcggcacgtgcgtcacgccttggcacgtgtcctgccttttgtccccgcccgaaaccctaagtgctactttacagtggctttgtcctgattgctccggtgaaaccaatcctcttcctgtttccggtgttgcggctggatatggatctgttggttcagatcttgtagcggcgatccactcgattgaggcggatgaaactctctctgctgaagagaaggctaagaagaagcagcagttactgagtggtaagggggtcgtcgatgaggatgacgaagaagagaagaagaagacgagtaaaggaaagaaacccatcgatgtgctatctcacttcgagtgttctttctgcatgcagtcgctacaaaaacccgtctcggttcgtgtactctttgctttggctcttatgcttgtgtggtttctcgaatctacaccatgtgggcacaacgcttgcttgaaatgtttcttgaagtggatggggcagggacaccgcagttgtggaacatgccgcagcgtaattcctgaaagcatggttaccaatccccgtatcaacttgtccattgtgtctgctattaggttagcaagagtatccgaaaaggctgatgcgcgtacttcaaaagttgttcactatgttgacaatgaagatcgtccagataaagcatttacaactgagcgcgctaagaaaacagggaatgcaaatgcttccagtggcaagatttttgttacaatccctcgagatcattttggtcctataccagctgaaaatgatcctgttaggaaccaaggtcttttggttggagaatcctggaagggccgacttgcttgtcggcagtggggggctcacttcccacatgtttccggcattgctggacaagcgagttatggagctcaatctgttgtgctcgctggaggttatgatgatgatgaggatcatggagaatggtttctatacacaggaaggactaacacggttcaagcttttgatcaagtatttctaaactttaatgaagctttaagacttagttgtaaactagggtatcctgttcgagttgtcaggtctaccaaggacaagcgttctccatacgcccctcaaggaggactactaaggtatgatggtgtttaccggatagagaaatgctggaggatagttggaatacagatgtgccgtttcctgtttgttagatgtgacaatgagccagctccatggaccagtgatgagcatggagatcgcccaagacctttgcctaatgttcctgagcttaatatggccacagacctgtttgagagaaaagaaagtccatcatgggattttgatgaaggtgaggatcgttggagatggatgaagccaccacctgctagtaaaaaggcagttaaaaatgttttggatcctgaggagaggaaacttttgagggaagccataaagtcggcaaacccgaataccatgagggcaagacttttgaaagaatttaagtgccagatctgtcagaaagtgatgactaatcctgtgacaacgccttgtgctcataacttctgcaaggcttgtttggaatcgaagtttgctgggacagctctagtgagagagagaggcagcggtggacgaaaattacgttcacaaaagagtgtcatgaagtgcccttgttgcccaacggacattgccgagtttgtccagaaccctcaggtcaatagagaagtagcggaggtgatagagaagctgaagaaacaggaagaggaggaaaacgcaaagtctttagatgaaggtcaatgctcaggtaccagccatgaagaagaagatgatgagcaaccaaagaaacggattaagttggacactgacgcagaagtttctgcgactgttgtggaatctgacatgaagtaa

SEQ ID NO: 2228 - DNA, 1143 bp, Arabidopsis thaliana
  Clone ID: AT_F21B23.C1.o40.tg
atgtcaaatccgagtttcaagcttgatgataatgccccaactgtaagctgggctgaatcaaggagtggaggagaaggagactcttctgcctctcaggtcaaggcattgtacatcaagaatttacctagagatataacacaagaacgtctaaaggcattatttgaacatcacgggaaaatactgaaagtggtgatcccaccagcaaaaccaggaaaggaagacagtagatacggatttgtgcactacgcagagaggacaagcgtaatgcgagctttgaaaaacactgaaagatatgagattgatgcttctgcctattcacaaccattaatgcatgcgggaggtcacgcagctggtggaatgtcgatgatgccaatcatgttacctgatggaaggatccgatacgtcttgcaacagcctggactagcagcgatgccacaaccaccaccgaggccttctccaccgtataggggaggcagcggttcgagcagtagcaaacaaagtagcgacaatgtagcctttcatctcttcagatttcaggatcagagaaacttgttcaatttcaagccaagtgaatttaagaaggcactagaggaagcagttttagcagaaaatggggtcgacggtaattgtgtagatgctgaaatcagctccccagattcctctgcgacggaatccgaccaggactatggacctgcttctagatttcaggcaccatctgcgtctggtgatatactttctgttctacgtcatgaaggcatttatacatactgcataggcatggacgacataaggacacgcgacgcttgtggctcagtaatgccattaaaatctctaaaaaggactaaagactcacagccggaagagcttttatgcaaatactgttcaaagttgcggaaatccaatcagtattgtggcatctgcaagagaatatggcaccctccagatgatagagattgggtatgttgtgatgggtgtaacgtatgggacgggttcatgctgaatgcgacaacattacgaatgagcgctttaaggtgcagttatacatcgccgtgcatcttatgttttgattttgtaagtatgaaagactattgtcgaatgactgttctaatttggttatcagcacaacaattactattgccctga

SEQ ID NO: 2229 - DNA, 3105 bp, Arabidopsis thaliana
  Clone ID: AT_MYN8.C1.o4.tg
atgataatcaaacgaaagttgaaaactttgaaacgatgtaattcgactaatgaagaagatgatatagttcggaagaagagaaaggtcaacctcaatggtggtggtagtggtggtgattactattaccctcttaatcttcttggagagattggtgctgggattgttcctggtaagaatggattctctgtttctttgtgtaagcaagtttcgtgttctcctaaagttgaggtggtggaggaagaagaggaggaggaggagataaagtcaacgagattagtttcacggccaccgcttgtgaagacatctagaggaagagttcaggtgcttccttcacggtttaatgactcggttatcgagaattggaggaaagataataaaagtagtggcgaagaacgcgaggaagagattgaagaagaagcatgcaggaaggagaaagtcaaagttagtagtaatcatagtttgaagattaagcaacaggaaactaaatttactcctaggaactataagtatagtagtagtagtgcattgtgtggagagatagatgatgaggataaatgtgaagagattgttagatatggtaatagctttgagatgaagaagcagcgttatgtagatgatgagcctcgtcctaagaaagaaggtgtttatgggccagaggatttttattctggtgatttggtttggggtaaatccgggaggaatgagccgttttggccggctattgttattgatccaatgacgcaagcgcctgagcttgttttgcgttcttgtatacctgatgcagcttgtgttatgttctttggtcactctgggacagagaatgaaagggattatgcatgggttaggagagggatgattttcccatttgtggattatgtagagaggttacaagaacagtctgaactgcgtggatgcaaccctagggattttcagatggcacttgaagaagctcttttggcagaccaagggtttacagaaaagctgatgcaggatattcacatggccgctggtaaccagacttttgatgattctgtctacagatgggttgaagaagctgcaggctcgagccaatatcttgatcacgttgctccaagccaggacatgaagaaatacagaaatccaagagcctgtgtaggatgtggaatggtcctttcttttaagatggcacagaaaatgaaagctctgattcccggagatcaattattgtgtcaaccttgttcaaagctgacaaaaccgaaacacgtttgtgggatatgcaagaggatatggaatcatttggatagtcagagctgggtgcgttgtgatgggtgtaaagtctggattcactcagcgtgtgatcaaatatcacataagcattttaaggtacatgttcatgttgctctttgtcaaatttatcattcccaattactttcatgtattgagatcaatttcatttgttatctgaaggatttgggggaaacagattactattgtcccacatgcagaacaaaatttgattttaaaccagactcaaaatccaaagtcgtatgtaagtgtggatcttgtggacctgaaaggaaagcacttagtgaatgggagaggcatactggttcaaaagcaaaaaattggagaactagtgttaaagttaaaagctccaagctgcctctagaagaatggatgatgaaattagcagagttccacgcaaatgctactgcagcaaaacctcctaaacgaccttctataaagcagagaaagcaaaggttactttcctttcttagagaaaagtatgagccggtcaacgtgaaatggacaaccgagcgatgtgcagtttgcagatgggtggaagattgggactacaacaagatcattatctgcaacagatgtcaaatagcagttcatcaggaatgctatgggacgagaaacgttcgtgacttcacatcatgggtctgcaaagcctgcgagacacctgagatcaaacgagagtgttgcctctgtcctgtaaaaggaggtgcattaaagccaactgatgtggagacactgtgggttcacgtgacatgtgcttggtttcagcctgaagtatgttttgcaagtgaagaaaaaatggaaccagctttggggattttgagtattccatcaagtaattttgtgaagatttgtgtaatatgcaagcaaatacatggctcatgcactcagtgttgcaagtgctctacgtattatcatgccatgtgtgcttcccgagctgggtatagaatggagttgcactgcttggagaaaaatggtcgacagataacaaagatggtgtcgtattgttcttatcacagggctccgaatccagatactgtgttaattatacagacgccttcaggggtcttttctgcgaaaagtcttgttcaaaataaaaagaaatctggtacgaggcttattttagcaaacagagaagaaattgaagagtctgccgcagaggataccataccaattgatccattttcttctgctcgttgtcgactatataaaagaacggttaatagcaagaagaggacgaaagaagaaggtattcctcactacacaggaggactacgtcatcatccatccgcagcgatccaaactttgaacgcattcaggcatgtggcagaagaacccaaatcattttcctcgttcagggaacggcttcaccacttgcagaggacagaaatggaacgggtctgctttggtcgatctggtatacatggatggggcctttttgcgagaagaaatattcaagaaggagaaatggttcttgaataccgtggggaacaagtgagaggaatcattgcagacttaagggaagcaagatatcgaagagaagggaaggattgctacctgtttaagatcagtgaggaagtagtggtggatgcgacagagaaagggaatattgctcgactaataaaccattcgtgtatgccaaattgctatgcaaggattatgagtgtaggagatgacgaaagtcggattgttctgattgccaagaccactgtagcttcctgcgaggagttaacatacgattacttgtttgatccagatgaacctgatgaattcaaggtgccgtgtctatgtaaatcccccaactgcaggaaattcatgaattag

SEQ ID NO: 2230 - DNA, 3027 bp, Arabidopsis thaliana
  Clone ID: AT_T1E2.C1.o10.tg
atggcgaaaggtacggctactggagaatttgtggctgtttcacaggttcgtactgggtgtaaaagagaattgcaatttgttttgaaatctcagtctgagatctgtggtggtgagtctttaggtcggactaggggaagtagaaacttgaatggtgagtctagaagtgtggaggttaagaaatcgattcgcgcgtctggtttaaagagtgggattaagaagatgcgttttagtaaagatgaggaagttggtgaagttgtaatgtctgatactgttggtgttggtttggaggaagaagaagttaagagtgatgttattgatgttgactctgctttggttgaatctatgagtgaagataaaggactagaagagaagaatgatgttgagattgagaatggggatgataatgtggtgatgaatgaggatcacttacttgagcaaactgagaaggtttcagagaaggttatagaggctgagaaggtatgttcgattggaggagacagtgttattgatagagaaatagttgtggcatgtcctgcaggtcttagtgtgatggaaaaaatggcttctagatcttgtaaggttaagttggaaagaggtttggtctatgcgaaaccctgtaaaaggttgacacggtcgatgctgaaggttgagggtatcaagtctgaggttaatgctgatgatgatcatgtaaatccagaaaaggatgctataggtagtgaagataattgtgttgatgtttctggttcagtggcatatgtggtggaggaggagcttcttgagcaaaataatgtggagatatgccttgggcttccaagtagatcatcccagatgaatggtcattctctatgcctcgggcttccaagtagatcattccagatgagtggtcattctcaaggtgttgataagaaggcagtgaatgatacagtagataagccattgaggaggtttactaggtcattggtcaaacaagaaagtgattcagacaatcctaatttgggaaatactaccgaaccagcagacttggtcgatgtagatatgcatgccaatgatgttgaaatggatggttttcaaagtccttcagttactactcccaacaagcgtggcagacccaagaaatttctaaggaatttcccagcaaagctgaaagatatttttgattgtggaatacttgagggactaattgtgtactatgttcgaggagcaaaggtggtgagccctgccatgttcgagttgcatgcttctagcaataacaaacgcccacctgaatatatcttactggagtctggattcacacttcgtgatgtcatgaatgcatgcaaggaaaatcctttggctacactagaagagaaacttcgtgtggtagttggaccaattttaaagaaatctagcctgtgtttgagttgccaaggtccaatgattgagccttgtgatacaaaatcattagttgtgtgcaaatcgtgtttggagagtaaggagccagaattccataacagtccgtctaaagcaaatgatgctcttaacggttcgtctaggccaagtgtggatccaaaatctatccttagaaggtcaaaatccagtcctcgccaaagtaacaggcgagaacaaccaaccagaaagtcaactgagccaggtgtggttccaggaactattctgagcgagtcaaaaaacagctcaatcaaaagcaacagccatgggaaactaaccagaaaggatttgcggctgcacaaacttgtttttgaggatgatatactgccagatgggactgaagtaggttatttcgttgctggagaggtcagtccttcaacgtttgaggcccacgctggatgtgcaagtcgccggaagccgtttcagcacatttatacaaccaatggggtttctcttcatgaactatcagtagcactatcaatggaccagaggttttccatccatgaaaatgatgacctttgcagtatatgtagggatggggtatgtgcttctctaccaagccttccgagtgagaggtggtcctgcaaatattgtgtgaatatggttgagagagagaagttcgtggatagcaatctcaacgccattgcagctgggagagttcagggagttgatgcaattgctgagataaccaatagatgcattcgaattgtcagctcttttgtgaccgagctcccaagtgtatgcgtgttatgcagaggtcatagtttttgcaggttgggctttaatgctcgcactgtgattatctgtgatcagtgtgaaaaggaattccatgttggctgtttgaaagaacgtgacattgctgatctcaaggagctacctgaagaaaaatggttctgttccctcgggtgcgaagagatcaacactacattgggcaatctgatagttcgcggagaagagaagctaagtaacaatattctgaattttttaaggaagaaggaacaacctaatgaagaaaactgtccagattataaaaccactcctgacataagatggagggtccttagtgggaagttgacctcttcagatgataccaaaatattgcttgcaaaggcactttccattcttcatgaacggtttgatcctatcagtgaatctgggaccaagggagatttgataccagccatggtgtatggaaggcaaacaaaggcccaagattttagtggcatgtactgcactatgttggctgtggacgaagtgattgtttcagtgggaatctttagggtttttgggtcagaacttgcagaactccctctggttgctaccagcaaagattgtcaagggcagggttacttccaatgcctgtttgcttgcatcgagaggctacttgggttcctaaacgtgaaacatatcgtgctaccagcagcagatgaagccaaatccatatggactgacaaatttggtttcaccaagatgaccgacgaagaggtgaaagaatacagaaaagactactcggtgatgatctttcatggaacatctatgttgagaaagagtgtaccagcaccgagtgccgtgagtaaaactgaggccagtaaggaggagtaa

SEQ ID NO: 2231 - DNA, 1926 bp, Arabidopsis thaliana
  Clone ID: AT_F12K22.C1.o14.tg
atggcgcgtgacatccaactcccctgcgacggcgacggcgtatgcatgcgatgcaaatccaaccctccgcctgaagaatctctcacttgcggcacgtgcgttacaccgtggcacgtgtcctgtctctcttcacctcccaaaaccctagcttccactctacagtggcattgtcctgattgctccggcgaaatcgatcctcttcctgtttccggcggtgctactggtttcgaatctgctgggtcagatcttgtagctgcgattcgtgcgattgaggctgatgagtcgttgagtactgaagagaaagctaagatgaggcaacggttactgagtggtaaaggtgttgaggaggatgatgaagaagagaagaggaagaagaaggggaaagggaagaatccgaatctggatgtgttatctgctcttggagataacttgatgtgttctttctgtatgcagttgcctgagagacctgtgacgaaaccatgtgggcacaacgcttgcttaaaatgttttgagaaatggatggggcagggaaagagaacttgtggtaaatgccgcagcataattcctgaaaaaatggctaagaatccccgtatcaactcgtctcttgttgctgccattcgattagcaaaagtctctaaaagtgctgctgcgaccacttcaaaggtctttcatttcatcagcaaccaagaccgaccagataaagcatttacaaccgagcgtgcaaagaaaactggcaaggcaaacgctgctagtggaaagatttatgttacaataccaccagatcattttggtcctattccagctgaaaatgaccctgtcaggaaccaaggtcttttggttggagaatcctgggaggacagactcgagtgtaggcagtggggtgctcatttcccacatgttgctggcattgctggacaatctacttatggcgctcaatctgtagcactctctggaggttataaggatgatgaggatcatggagaatggtttctatacacaggaagtgggggtagagatctcagtggcaacaaaaggactaacaaggagcagtcttttgaccaaaagtttgagaagtctaatgcagcattaaaactcagctgcaaattggggtatcctgttcgagttgtcaggtctcacaaggagaagcgttctgcatacgcccctgaggaaggagtgagatatgatggggtttacaggattgagaagtgctggcgcaaagttggagtacaggtctgtcgttacctgttcgttagatgtgacaatgagccagctccatggaccagtgatgagaatggagatcgtccaagacctatccctaatattccagagcttaatatggccaccgacctgtttgagagaaaagaaactccatcatgggattttgatgaaggtgagggttgttggaaatggatgaagccgccacctgcaagtaaaaagtcagtgaatgttttggctcctgaggagaggaaaaatttgaggaaagccataaaggcggcacactcgaataccatgagggcaagacttctgaaagaatttaagtgccagatctgtcagcaagtgttgactcttcctgtgacaacaccctgtgctcataacttctgcaaggcttgcttagaagcgaaatttgctgggaaaactcttgtgagagagagaagcacaggtggacggacactacgctcaaggaagaatgtcctgaactgcccttgttgcccaacagacatatctgattttctgcagaaccctcaggtcaacagagaagtagcggaggtgatagagaagctaaagacccaggaagaggacaccgcagagcttgaagatgaagatgaaggtgaatgctcaggcaccacccctgaagaagattctgagcaaccgaagaaaaggatcaagttggacactgacgcaacagtttctgcgaccatcaggtga

SEQ ID NO: 2232 - DNA, 2094 bp, Arabidopsis thaliana
  Clone ID: AT_T8O11.C1.o2.tg
atggcgataaccgcatacgacgctctcacggagagacaaaaagcccccaaagtcctccttattaacgattttgccatctcttcttcttcatcatcaccacctttcttcaacctcgccgcaactttccgcgacaacatcagatcgttcctccgtgaatatgccgagattgaagattacaccatcgacggagccaccgtctctactattttccttggaagccaagcaaatggcgtcgttttccctctttacatcatcgaacaacaaatctctgattcttctccaaaccctctctgcgatttctgtcgatgctttggttggggtcatcactatgtaacgaagaggaagtatcatatgataatcccaaaccgtgatgaatggaatgagccattgaagagagaaagcttgacgctttcttcacatttgatgcatggtttgattcattgcaatggttttggtcatttgctttgtatcaacactgatcttgatgatcctaatcacctctctggtgaccaaatcatggacttttgggaccgtctttgctctactctccacactaggaagatatctttggatgatacatcgaagaagggagcgatggatctgaggctgctccatggtgttgcatatggtcgaccatggtttgggaaatgggattatatgttttctcatggaagctttggggtcaaaaaagatctgtattggcgagctattctcactcttagctcaatagaagttgacaagatattggaagaattatctggaacaagtaaagggagagtgatgaagaagatcatcgatttctacagaggatccactgaaagccctttggccactctctctgatttgcttcggttcatgcttggtttcatatcaaaagctcccattgagagaaagactgcaatggcactagtagcaatgtctttagatcatgtttcatatcctactcttagagctgatgagaacagtgaggtctgcacatcccctgatcaggaatcagatgataatggatatgaatctggcagagacactgtccttgatgatcataatactacaacatcgggcataaaacctcctcagtattactcatttgatgatttgagcaggagagaacattctagatggcctggaaggaggttgaatgatgcagcccaagcggttctcaaagtgtttaaagagcgaaatagcaccattagtcgccaagaccttcgggaggctgttagaagtagcattggtgatacgggattgattgatttcttgctcaaacacattgacaaagttctaataggtgaccagatagtgcagaggtccacaaacccgaaaagcaggatgttacagttctccctccggacaatcaattcccgtgttcaagagcaaaaacggaaaaagaaaaggaaagtgaagccgcaggaaaccagtgaatgcacatctaccactcctggactgagtccgtacgatgatattctctatctatatcagaatctcttgttaacttatcctgattcagacttatacagtgaagcgtctcaggttatcttgaagtgcaagagctttgtaaaagaatggtcttaccaggaacaaaatcatttaacagttagctgccaggttcttcccaatcatgaagaactactcagagacttcactcggttattaccccctggtgacctcgtggctgttccggaaaacgcaaccatcagagaactgaaatctgcagcagagaaagttctgagggacacttactgcataacagagacatttgaagtgttggagataagaaacaggtatctcgagaagctagacgacaacgtgagtctaaaatcacaagggaatacagagtttatggtgaaagggtttggtctggacataggcacagagttaaggtatgaaggcggatttgatgactggaccgttgactgcaaatgcggagctagagatgatgatggtgagagaatggtggcttgtgatgcttgcaaggtttggcaccacacactttgcaattccatcgaagacgatgaagctgtgccctccgtgtttctctgtaacatgtgttatggagatagcttgagatccaagaaacgcaacctcagcattcgctag

SEQ ID NO: 2233 - DNA, 3402 bp, Arabidopsis thaliana
  Clone ID: AT_T20M3.C1.o8.tg
atgtcgtgtgtcccaaaagaagaagaaggagaagatacccaaatcaaaaccgaactccacgaccacgctgctgataatcctgttcgttacgcctctcttgagagcgtttactccgtttcctcttcctcgtcttcattgtgttgcaagaccgccgctggttcccacaagaaggtcaatgccctcaagctcccaatgagcgatagttttgagttgcagcctcatcggcgaccggagattgttcacgtctattgtcgccgtaagaggaggaggcggcggcggagggagtctttccttgagttagcaatacttcagaatgagggagtggagagagatgatcggattgtgaaaattgaaagtgcggagcttgatgatgagaaggaggaggagaataagaagaagaagcagaagaaaaggaggattggtaatggcgagctcatgaaactgggcgtggattcgactactttaagcgtctctgctaccccgcctttacggggatgtcgaattaaagctgtgtgtagcggaaataaacaagatggatcttcccggagtaagaggaatactgtcaagaatcaggagaaggtagttacagcttctgctacagctaagaaatgggtcaggttgagttatgatggagtcgatcctaaacatttcattgggctgcaatgcaaggttttttggccattggatgctgtttggtatcctggttctatcgtcggatataatgtagagacaaagcatcacattgttaaatatggagatggagatggagaggaattagctcttcgtcgtgaaaagatcaagtttttaatttctcgtgacgacatggagttgctaaacatgaagtttggtactaatgatgtggtcgttgatggtcaagattatgatgaactggttatattggctgcttcttttgaggagtgccaagattttgagcctagagacatcatatgggccaaactaactggtcatgctatgtggccagcaattatcgtggatgagtctgttattgtaaagcggaaaggtctaaacaacaagatctctggaggaagatcagtcctcgtacagttttttggcacccatgattttgctaggtacctaaaagaatataagcttccaggaaggatggatcaacttcagaaagttgctgatactgattgttcggaaaggattaatagtggagaagaggacagctcaaactcgggtgatgattacacaaaagatggagaagtctggttgcggccaacagaacttggagattgcttgcatagaataggcgatctgcaaataattaatcttggaaggatcgtgacagactcagaatttttcaaggatagtaagcatacttggcctgaagggtatacagctacaagaaaattcatatcactaaaagcagatcctaatgcatctgccatgtacaagatggaagtgcttagagatgccgagtcaaagactcgccctgttttcagagtgacgaccaatagcggtgagcagttcaaaggggacactccatctgcctgctggaataaaatatataataggataaaaaagattcagattgcttctgataatcctgatgttttgggtgaaggacttcatgaatctggtacagatatgtttggcttctccaacccagaagtcgataaacttattcaggggctattacaatccagaccaccttccaaggtttctcagcgcaaatatagttcgggaaagtatcaagatcatcctactggttaccgacctgtacgggtggagtggaaagatcttgataagtgcaatgtctgccacatggatgaggaatatgagaacaatttgttcctgcaatgtgataaatgtagaatgatggtccatactagatgctatggccagctggaaccccataatggcattctgtggttatgcaacttatgtcgtcctgtcgctcttgatattcctcctcgatgttgtctttgtcctgtagtagggggcgctatgaagccgacaactgatgggcgctgggctcatctggcttgtgccatatggatcccagaaacatgcttattggatgtcaagaagatggaaccgatcgatggggttaagaaagtcagtaagaacaatgatgccgattttcagtgttcaaataatacttgtcgagtggcatatcatccgctatgtgcacgagctgctggtctctgtgttgaggtactttcatatcctacaggggatcataagcttgcagatgaggataggctttttcttctatcaatggatgacgatgaagcagatcagtgcatccgcctgctttcattttgcaagaggcatcgacaaacgtcaaattaccacctagaaacagagtacatgatcaaacctgctcacaatattgccgagtatctcccacctcctaatccatctggctgtgctcgcactggacgaaaggaacctgaagctcttgctggtgcttcttcaaagcgattatttgttgagaatcaaccgtatattgttggcggatactctcgacatgaattttcaacctacgaacgcatttatggatcaaagatgtcccaaataactactccgagcaatattctatctatggccgagaaatatacattcatgaaggaaacctacaggaagagattagcattcgggaaatcgggaattcatggttttgggatctttgcaaagcttccgcacagagccggagatatggtgattgagtacactggtgaacttgttaggccaccaatagctgacaagagagagcatcttatatacaactcaatggtgggtgccgggacctatatgtttagaattgataatgagcgggtcatagacgcaacaaggacaggaagcattgctcaccttatcaatcattcatgtgagccaaattgctattcaagagtcatcagtgttaatggtgatgagcatattatcatatttgcaaagagagatgtcgcaaaatgggaggagctgacctatgattataggttcttttcaattgatgagcgccttgcatgttactgtggtttcccaagatgccggggtgttgttaatgacacagaagccgaagaacgacaggcaaatattcatgcttctcgctgttctggggcaatatgtgagggcaaaagcagcgaaccggcggtgaggcagacgcaggtgaagtggagagaaggaaagaagttcagagtcgaggtaatgaacaaatgtcccatgtgtccaatcatcaaccttcgtctgaaatgtcaaggatttcctcagtcgcttgtggaccccacattcctccgtgttctctcctcttccgccggaaactgtgtggttaacgatggcttgccactgagtccaatgcagactctctccttcaactactccaacacacaccagtttgctctgcgacctctttcttggtcttttcagtgcgagtaa

SEQ ID NO: 2234 - DNA, 3198 bp, Arabidopsis thaliana
  Clone ID: AT_F13B15.C1.o20.tg
atggttgcgggatcttaccggagatatgagtttgttcggaacagagacgattccgatgatgggctaaaacccttgaaagatctgaatggtcagatatgtcagatctgtggtgacgatgttggactcacaaaaactggcaatgtctttgtcgcttgtaatgaatgtggttttcctttgtgtcagtcttgttatgagtatgagaggaaagatggatctcagtgttgcccgcaatgcaaggctagattcagacggcacaatgggagtcctcgagttgaagtagatgaaaaagaggatgatgtcaatgatatcgagaatgagtttgattatacccagggaaacaacaaggcaagactcccacatcgcgctgaagagttctcttcgtcatctcgacatgaagaatctttacctgtttctcttcttactcatggccatccggtttctggagagattcctacgccggataggaatgctactctgtctccttgtattgacccacaactacctggtatctatcaacttttgcttctgcctgtaagaatcttggacccatcaaaagacttgaactcttatgggcttgtgaatgttgactggaaaaaaaggatccaaggttggaagctgaagcaggataagaatatgatacatatgactggtaaataccatgaaggaaagggaggagaatttgaagggacagggtcaaatggtgacgaactccaaatggttgatgatgctcggcttcctatgagccgtgtggtacatttcccatccgctcgcatgacaccttatcgtatagtgatagttctccggctcatcattttgggagtcttcttgcattatcgtacaactcatcccgtgaaagatgcatatgccctgtggttgacctcagttatttgtgagatctggtttgccttttcttggcttcttgatcagttcccaaaatggtatcccattaacagggagacttttcttgacaggcttgctttaagatacgatcgagatggtgaaccatcacagctagctcccgtggatgtgtttgttagtacggtggacccgatgaaagagcctcctcttgtaacagcaaacacagttctctcaatccttgctgtggactacccagtggataaagttgcgtgttacgtttcggatgacggttcagctatgctaacttttgaagccctttctgaaacggctgagttctcaaagaaatgggtacctttttgcaagaaattcaacattgaacctagagctcctgagttctatttttcccagaagatagattacttgaaggacaagatccaaccttcttttgtcaaagagagacgggcaatgaagagagagtatgaggagtttaaagtgaggatcaatatcctcgtcgctaaagcacagaagattcctgaagatggttggacaatggaggatggtacgtcctggcctggtaacaaccctagagaccatcctgggatgattcaggttttcttaggccatagtggaggtctggataccgatggaaatgagctacctaggctcatctatgtgtcccgtgaaaagcgtcctggatttcagcaccacaagaaggctggagctatgaatgccttgattcgtgtttctgctgttcttactaatggggcgtatcttttgaacgttgattgtgatcattacttcaacaacagcaaggcgattaaggaagccatgtgtttcatgatggaccctgcaatcggaaagaagtgttgctacgtgcagtttccacaacgtttcgatggtattgacttgcatgatcgatacgccaacaggaatactgtcttctttgatatcaacttgaaggggttagatggtatacaaggtcctgtgtatgtgggcactggctgctgtttcaacaggcaggccttgtatgggtatgatcctgttctaacagaggaagatcttgagcctaatataattgtaaagagctgttttggctcgaggaagaaaggaaagagtagaaaaatacctaactatgaagataacagaagcattaagagaagtgactccaacgttccacttttcaatatggaagacattgacgaggacgttgaaggctatgaggatgagatgtctcttctagtatcccagaaaaggctagaaaagcgttttggccagtcgccagtgtttattgcagctaccttcatggaacaaggaggtcttccatcaacaaccaaccccttgactcttctcaaggaggcgattcatgtcataagctgtggttatgaggccaagactgattggggcaaagagatcgggtggatctacggttctgtgacagaagatattcttactggattcaagatgcatgcaaggggttggatatcaatctactgtgttccttcacgccctgcgttcaagggatccgcacccatcaatctctctgatcgtttgaaccaagttcttcgatgggctttggggtctatcgagattcttctgagtagacattgccctatatggtatggctataatgggaggttgaaacttttggagagaattgcctacatcaataccatagtctatccaattacatccatcccgctcctcgcctattgtatgcttccagctttttgcctcataaccaacacgttcatcataccagagataagtaacttagcgagcttgtgtttcatgctgctatttgcatccatctacgcatcagcaatcttggagctcaaatggagtgatgtggcccttgaagactggtggaggaacgagcagttttgggtaatcggtggaacatcggctcatctttttgcagtgtttcaaggtctactcaaagtttttgcagggatagacacaaacttcacagtcacatcaaaagcctcagatgaagatggagactttgcagagctttacgtcttcaaatggacgtctcttctcatcccaccaaccactatcttactggtcaaccttgtcggtattgtggccggtgtctcctatgcaataaacagtggctaccaatcgtggggacctctcatgggaaagctcctttttgctttttgggttgttgctcatctttaccctttcttgaagggtcttttgggcagacagaaccggactccgaccattgtcattgtctggtctgcacttcttgcatccatcttctcattactttgggtccgaatcaacccctttgtttccaccactggggttatgagcaacagtttcatgggtgagtga

SEQ ID NO: 2235 - DNA, 4074 bp, Arabidopsis thaliana
  Clone ID: AT_F1N21.C1.o4.tg
atggctccaccgcgtaaaaggacaagggacttgatgcctaagtttcttaacaccgaaagttttgatgagttcaatcagcggttgaacaatctacctgcagagtcaaatgttacgtctgatgaagatgcacagtttcttgaatcgagaaaatgtcagtcaaagcgatggagaaaggaagaaccattaaagttgaatcttcgtagtccttggaatgttttatgtagtcctgagtcgattagctctgctaagttcattgtggagaagacatgtttgattccagtaccaagttttgaggaggctgctactaatgctagaagatgtttaaatacatcttctataccgggaagtagcggttctgcttccgagacaaacagcggttctgatataacgaagcaagattttaagaacgattctccttcggatagtaagaaggttcagggttctagtactagcaaatctgcaaaaccgaaggtaatcaaggtttattctttcgtggatctggttactacgacaaagaaaggaaacattcaaaccgaggaaagttctttaaaccatgagaagaaacttggaactgttgtggatattgttgagccgatgaaatgtgatgaaaggagtaaggaggttcagggttctagtactagcaaatctgcaaaaccgaaggtaatcaaggtttattctttcgcggatgtggttactacgacaaagaaaggaaacattcaaaccgaggaaagttctttgaaccatgagaagaaacttggaactgttgtggatattattgagccgatgaaatgtgatgaaaggagtaaggaggttcagggttctagtactagcaaatctgcaaaactgaaggtaatcaaggtttattctttcgcggatgtggttactacgacaaagaaaggaaacattcaaaccgaggaaagttctttgaaccatgagaagaaacttggaactgttgtggatattgttgagccgatgaaatgtgatgaaaggagtaaggaggttcagggttctagtactagcaaatctgaaaaaccgaaggtaatcaaggtttattctttcgcggatgtggttactacgacaaagaaaggaaacattcaaaccgaggaaagttctttgaaccatgagaagaaacttggaactgttgtggatattgttgagccgatgaaatgtgatgaagggaccaagtgtgaggttactacgacaaacaaaggaaagattcacaccgaggaaaggtctttgaaccatgagaagaaacttggaactgttgtggatattgttgagccgatgaaatgtgatgaagggagcaagtgtgaggttactacgacaaacaaaggaaacactcaaaccgaggaaaggtctttgaaccatgagaagaaacttggtattggtgtggatattgttgagccgatgaaatgtgatgaagggaccaagtgtgaggttactacgacaaacaaaggaaagattcaaaccgaggaaaggtctttgaactatgagaagaaacttggaattggtgtggatattgttgagccgatgaaatgtgatgaagagaacaagtgtgaggttaatgctgacacatttgatgtggttattgttgagccaatgaaatgtaataaagtgaccaagtgtgaggttaatgttgacacaactggtgtgaatattgttgagccaatgaaatgtaatgaagtgaccaagtgtgaggttaatgttgacacaattggtgtggatattgttgagccgatgaaatgtaatgaagagagcaagtgtgaggttaatgctgacacaatgtctctgcaaaaacgtagcaagagagctgtctctttggtcgaacgtttcacagaagaagagataaagctgcatataatgagtctaaagaagccaagtacacagagcgcagtcgaaggaatgtgtgacctcaaggaggaggaggaatcatgtcaattgtgtgacgatggcacactcttgtttccaccacaaccactatactgcttattatgcagccgccgcatcgatgacagatctttctattatacccctggggaagaagaactaagcaatgcgcaacatcaaatctgcagtccttgtcacagtagatgtaaaaccaagttccctttatgtggagtctttatcgataaacacaaaatgcttaaaaggagtaactttgacaacgcagatacggaggagtgggttcaatgtgaatcttgtgaaaaatggcaacatcagatatgtggtctctacaataagcttaaagacgaagacaaaaccgcagagtatatttgtcctacatgtttattagaggagtgtcaaagtatcaacaacatggcactcgttgactatacggattctggagcaaaagatttgcctgaaactgtcctcagctactttctagagcaaaggctattcaagcgcctcaaggaagaaagataccaaacagcaaaggctactgggaagagcatcaatgatgtacctgaaccagagggtcttactctcagagtcgtgttttcggctgacagaaccttaactgtcaacaaacaatttgccagtttacttcacaaagaaaactttcctagtgaattcccttacagatcaaaggttattcttctatttcagaaagtccatggagttgatatatgcatctttgcattgtttgtccaagagtttggatcagaatgtagccaaccaaaccaacgcagcacatacatattttatctcgattctgtcaaatactttaaacctgagagagtaacattcgcaggagaagctcttcgaactttcgtttatcatgaagtattgattggatatcttgaatattgtaagcttcgaggtttcacgacgagttatatatgggcgtgtccacctaaaataggacaagactacataatgtattctcatcctaagactcagcaaacacctgacactaagaagcttcgcaaatggtatgtgtcaatgctccaaaaagcagccgagcagagggtagtgatgaatgttacaaacttgtatgatcggttcttcgattcgacagaggaatatatgacagctgcgcggttgccttactttgaaggatctttctggtccaatagggctgagattatgattcaagacattgaaagagaaggcaataatgagttgcagaagaaggttaaattgctttctagaagaaaagtaaagactatgagctacaaaactacgggtgatgttgatgttgatgatgttaaaaacattctcctgatggaaaagctggaaaaagaggtattcccaaataagaaggatttaatggtggtggaattgaattattcatgcacacgctgttcgaaagccgtattatcaggattgagatggttttgcgagaagtgcaagaatcttcatttgtgtgaaagctgctatgatgcaggacaagagcttcctggagaacacatatataagaggatggacaaagagaagcatcagctctcaaaggttcaggtgaacggcgtactgttttctacaacagaggataatgatatcatccaagaaaacgatatgttcgaaagcagacaagcgttcttagctttttctcaaaagcataattacaacttccacacgcttcgacatgccaagcattcttcgatgatgatacttcaccatcttcacacctcaaacaagcatcattgctctcaaaactctagcagtctcacctgcacggcctgcaaaaaagatgtttcgacaacgatttacttcccttgtttgctctgtccggattaccgagcttgcactggatgctataccaaaaacagaacccttcgtcatcttcatattttccctacactcccttcagctaatagagcgccgtcgagaaccgtaatggttcttgagatattgaacgcaatatcgcatgcgcttctgtgtcagcacaagaccactaagtcatgctcatacccgaaatgccacgaagttaaagcattgttcactcacaatgtacaatgcaaaatcagaaagaagggaactcgttgtaatacttgctacaaattgtggcagacaataaggattcatgtgtaccattgccaagatctcaattgccccgtaccgcagtgcaggtaa

SEQ ID NO: 2236 - DNA, 1332 bp, Arabidopsis thaliana
  Clone ID: AT_T32A16.C1.o30.tg
atggcatctggtgttttcgaggatgaagctgaaggaactataacgatcaatgaatatatcgaaaggcttgacgcagaagagctggcagcggatttggtgttgggtggagatgaaggagatgagtgtactttcccaaagggttacatgaaaaggcaagcaattttctcatgcattacatgtacaccagaggggaatgctggaatttgcactgcttgttgcttatcttgtcatgatggccatgagcttttggagctgtggactaagagaaattttcgatgtgattgcgggaactcaaagtttggaactttggcttgtaagcttctcccgagcaaagatatagaaaactctgaaaattcttacaaccataatttcaaaggcttgtactgcacttgcgaccgaccttaccctgacccaaatgtggaagaacaagtagagatgattcagtgttgtctctgtgaggattggtttcatgaggagcatctcggtctcacaccttcagacagtgttggtagccagattccaagggatgaggaaagtgagccgatctatgaagatttcatttgtcaaaactgctccccagcatgttcgtttctgacactttatcctgagaacttgtgggttgttgctaaagtagattccactggttctgctaatgcttgttcagagacaattgagttagacaaaaaccacatggattctgaacccggccagccagagaacggtactgatgctgagaaatctgttgtaggaaaatgttctgagacgatcagtgactcagaacctggccagcctgagaacggcactgaagccgagaaatctgttgtgcaaaaatgttctgagaagatcgatgaatctgaagccggccagcctgagaacagtactgaagccgagaaattcgttgtgcggaaatgttctgagaagatcgatggctctgaaaatgttcctgcagctggttgtgttattaggactgatctaaactcgtgtcctgagtttgagaagaaacctttgtttttgaccaaaaactggaggaacatcctatgcagatgcgaaaagtgccttgagatgtataagcagagaaaggtaagctatctacttgatgcagaggacacaattgttgaatacgagaagaaggcgaaggaaaaaagaacagagaaactggagaaacaagaaggtgaagcacttgatcttctgaataatctagaccacgtatccaaagttgagctccttcacggaatcaaagacttccaagacggactccagggtttaatggtatatattgtcaccatctatgaaagaaatttgattacaattctcaggaaccacttcatttaa

SEQ ID NO: 2237 - DNA, 3210 bp, Arabidopsis thaliana
  Clone ID: AT_MYH9.C1.o8.tg
atgaatactggtggtcggctcatcgctggttctcacaataggaatgagttcgtgttgattaatgcagacgagagtgccagaattagatcagtggaagaactaagtggacaaacatgtcaaatctgtggagatgagattgagctaagtgttgatggagagtcttttgtggcatgtaatgaatgtgctttccctgtctgtagaccttgctatgagtatgagagacgagaaggaaaccaatcttgtcctcagtgcaaaactcgttacaagcgcatcaaaggaagtccaagggttgaaggagatgaggaggatgatggaattgatgatcttgattttgagtttgattatagtaggagtggccttgaatctgaaactttctctcgccgcaactcggagtttgatttggcctctgctccacctggctcacagattcctttgttaacttatggagaggaggacgttgaaatttcttctgatagtcatgctctcattgtttctccatcacctggccatatccatagggttcatcaacctcattttcctgaccccgctgcacatccaagaccaatggtacctcagaaagaccttgcggtctatggatatggaagtgttgcgtggaaggatcgtatggaggagtggaagagaaagcagaacgaaaaatatcaggtggttaaacatgatggagattctagtcttggagacggagatgatgctgatattcctatgatggatgagggaaggcagcctttgtctaggaaagtaccgataaagtcgagcaaaataaatccgtacaggatgctaattgttctgcgtcttgtgattctcggtctctttttccattaccgtattcttcaccccgtcaatgatgcttacgccttgtggctaatatctgtgatatgcgaaatatggtttgcggtttcatgggttcttgatcagttccctaaatggtatcctatagaaagagagacatacttggacaggctctcattgaggtacgaaaaagaagggaaaccatctgaactagctggtgttgatgtttttgtgagtacagtggatccgatgaaagagcctccgcttattacagcaaacactgttctgtctattcttgcggttgattatccggtagacagagttgcctgttatgtttctgatgatggtgctgctatgcttacttttgaagccctttcagaaacagcagagtttgctaggaaatgggttcctttctgtaagaaatacactatcgagccacgagctcccgaatggtatttttgccacaagatggattatttaaagaataaagttcaccctgcatttgttagggaacgccgagccatgaagagagattatgaagaattcaaggttaagatcaatgctttagttgcgactgcacagaaagtgcctgaagaaggttggactatgcaagacggtactccttggcccggtaataacgtgcgagatcaccctggcatgatccaggtattccttggaaataacggtgtccgcgatgtagaaaacaacgagttgcctcggctggtttatgtttctcgtgagaagagacccggatttgaccatcacaagaaggctggagccatgaactccctgatacgagtctctggagttctatcaaatgctccttatcttctaaatgtcgattgtgatcactacatcaataatagcaaagctcttagagaagcaatgtgtttcatgatggatcctcagtcgggaaagaaaatttgttatgttcaattccctcaaagattcgatgggattgataaaagtgacagatactctaatcgtaatgttgtattcttcgatattaatatgaaaggtttggatggattacaagggcctatatacgtgggaaccgggtgtgtttttaggagacaagcactttatggatttgatgcgccaaaaaagaagaagactaagcgtatgacttgcaattgctggcctaagtggtgtttgttttgttgtggtctaagaaagaatcgtaagtcaaagacaacggataagaaaaagaagaacagggaagcctcaaagcagatacacgcgctagaaaatatcgaagagggcaccaaaggcactaatgatgcggcgaaatcaccagaggcggcacaattgaagttggagaagaagtttggacagtctcctgtttttgttgcgtctgctggtatggagaatggtgggcttgctaggaatgcgagtccagcttctctgcttagagaagccatccaagtcattagttgtggatacgaagataaaaccgaatggggaaaagagattgggtggatctacggttctgtcaccgaggatatccttacgggtttcaagatgcattctcatggctggagatcggtttactgtacacctaagataccggcctttaaaggatcagcacctatcaatctttctgaccgtcttcatcaagttcttcggtgggcgctcgggtctgttgagattttcttgagcagacattgtcctatttggtatggttatggaggtggtttgaaatggcttgagagattgtcttacatcaactctgtggtttatccatggacctctattccactccttgtttactgttctctcccagctatctgtcttctcaccggaaaattcatcgtccctgagattagcaactatgcaagtatcctcttcatggcacttttcgggtcgattgctgtaacgggcattctcgagatgcaatggggtaaagtagggatcgatgattggtggagaaacgaacagttttgggtgattggaggtgtttcagctcatctctttgctctcttccaaggtctcctaaaggttttagccggtgttgagacaaacttcacagttacatctaaagcagcagatgatggtgaattctctgagctttacatcttcaaatggacatcactcttgatccctccaaccacactactcatcataaacgtaatcggagtcattgtgggaatatctgatgcgatcagtaacggatatgactcgtggggtcctcttttcggaagattgttctttgccttttgggtcatcctccatctatatcctttccttaaaggtctgcttgggaaacaagacagaatgcctacaatcattcttgtctggtcgatccttctcgcctctatccttacgcttctttgggtacgagtcaatccgtttgtggcgaaaggcggtcctatcctcgagatatgtggcttggactgcctttga

SEQ ID NO: 2238 - DNA, 2769 bp, Arabidopsis thaliana
  Clone ID: AT_T4F9.C1.o30.tg
atgacgatccctaattccgatttcatgttagaaaacggagtctgtgatttgccttttactcctgaggaagagaaacggattgtatcggagcttactagcgaatcggaggataatttgaaacaaggcaacttgtattttgtcatctctaaaaggtggtatacaagctggcaggaatatgttgagaattcggctaatgaatgttcaactggagagtcttcggaagctccgaggcctggaccgattgataaccatgatattatcgaaagtgatagcgacattaatgatccacaacttcgtagattgctggtggaaggggaggactacgttttagttcctaaacaagtttggaaaagacttgttgaatgcggaggtcctccgatagaaaggaagttgatctgtcaaggcttttatacaaggagttatagtgtagaggtttatccactctgccttatgttgacagacggacgagatgaaagtagaactgcctctataagggaactttatgagaaggtttgtgctatgacaggggtaccgcaagaaaaggctcatatctgggattacttcgataagaggaaaaacggactgttggatcctttatcttacaagagcctggaagagtcaagccttcatatggaccaagatattcttgttgaagttgatgggttgtcttcctcctctcaatctgctatgagctcgacaggaaatgagttagctctggtacctctggaaccttcaaggtcgattgttacaattgctggggggcctaccctatcaaatggtcattccactacgtccaactttagtctctttccgagaataacttctgaagacgacggcagagattctttgagtattcttggaaaaggagaaaagggaggattagcaggattgagtaatttgggaaatacctgctttatgaatagcgctcttcagtgtttggcccacacacctccaattgttgaatacttcttgcaagattacatgcttgatacttacatgttctatttcctcgtgatggtactcacatgcattctgaatataattctaactcttaattttcagggtgagcttgctatcgcgtttggtgatttgttgaagaaattatggtcatcaggaaggaatgcagttgcaccacgcgcttttaagacgaaattggctagatttgccccacagtttagtggttacaatcagcatgattctcaagaactgcttgctttcttattagatgggctgcatgaagatttgaataaggtcaaacgaaaaccttacatcgaacttaaagattctgacagtcgtccggatgatgaagttgctgaagagctttggaattatcataaggcccgaaatgattctgtaatagttgacgtctgtcaaggccaatacaagtcaactctggtttgtccagtttgcggaaaaatatcaatcacttttgatcccttcatgtacttgtctgtacctttgccatcaacacttacgcgatccatgacaattacggtgttttattgcgatggaagtcgtcttccgatgccatacacagtaatagtgcctaaacagggatctattagagatctcattaccgcattaggtactgcttgttgtttagctgaagatgagagtcttttacttgcagaggtatatgatcacaagatctttagatattttgagattcccctggattcactgagtgcgataaaagatgatgagcatattgtggcgtatcggttgaatcagattccgaaaggatcaagaaaagcaaaactcgaaattcttcatggagggcaggaaagggctgttctggatagtgttagaggcagcgacgtgaagctttttggaactccttttgtgacttatgtcaacacagaaccactaagtggaactgacattgatgcagttatctctggatttttgtcgcctctgcacaaggtccatgccccatctaagattcataacggaagtgataatggccaccttgctgatgctactgttgaccaagcatccggaattttatcatccccagataccgagatagacaatgcatctgatagagagttatccttcaggatattcttgacagatgaacgtggtttgaacattaaaccactgcagtctgaatcttctataagcccgggtaccgttacaagagttttagtcgagtggaatgagggtgagcatgaaagatatgattccagctacttgagtgatcttccagaggttcataaaaagacaaggcaagaatcgatatccctgttttcgtgtttggaggcttttttagcagaagaacctctgggaccagatgacatgtggttttgtccgagctgcaaagaacacagacaagcgaacaaaaagctagacctgtggaagttaccagatattcttgtgtttcatttaaaaaggttcacttacagcagatatctgaagaacaagattgatacgtttgtgaatttcccagttcatgatctagacttgagcaagtatgtgaaaaacaagaatggccagtcatatctttatgaactgtatgccgttagtaatcattacggtggacttggtggtggccactacactgcctacgctaagttgattgatgacaacaaatggtaccatttcgacgacagtcatgtgtcatctgtaaatgaatctgaaatcagaaactcagctgcatatgttcttttctaccgaagagtgagaagtgaaacagagacacaaacagctgagatgtcgactgatatggattattcatgcctaaattctcataatgacaaagcatcatga

SEQ ID NO: 2239 - DNA, 2814 bp, Arabidopsis thaliana
  Clone ID: AT_T4F9.C1.o50.tg
atgacgatccctaattccgatttcatgatcgagaacggagtctgtgattttccgactactcctgaagaagagaaacggattgtatcggagctgattaccgaatcggaggataatttgaaggaagggaacttgtattttgtcatctctaaaaggtggtatacaagctgggagaaatatgttgagcaatcgacaaaagaatatataagtggagagtcctctgaagcttcaaggccaggaccgattgataaccatgatattatcgaaagtgaaagcgacgttaatgatccacaacttcgtagattgttgatggaacgggttgactacgttttagttcctcaagaagtttggaaaagacttgttgaatggtatagcggaggtcctccgatagaaaggaagttgatctgtcaaggattttatactaggagttatagtgtagaggtttacccactctgccttatgttgacggacggacgagatgaaagtagaactgtaatacggttgggaaaacaggcctctataagggaactttatgagaaggtttgtgctttgacaggggtaccacaagaaaagtttttgctgatgaaggacgcattgtttcgttatgaagactttgcagctttgcctcacattgatatttttttttataagcaggctcatatctgggattacttcgataagaggaaaaacggactcttggattctttatcttacaagagcctggaagagtcaagccttcatatggaccaagatattctacttgaagttgatgggtcgtcttcctctcagtctgctatgagctcgacaggaaatgagttagctctggtacctctggaaccttccaggtcgagtgttacaattgctggggggcctaccctatcaaatggtcattccactacgtccaactttagtctctttccgagaataacttctgaagacgacggcagcaattctttgagtattcttggaaaaggagaaaagggaggattagcaggattgagtaatttgggaaatacctgctttatgaatagcgctcttcagtgtttggcccacacacctccaattgttgaatacttcttgcaagattacagtgacgacataaatagagataatcctttgggaatgtgtggtgagcttgctatcgcgtttggtgatttgttgaagaaattatggtcatcaggaaggaactcagttgcaccacgcgcatttaagacaaaattggctagatttgctccacagtttagtggttacaatcagcatgattctcaagaactgcttgctttcttattggatgggctgcatgaagatctgaataaggtcaaacgaaaaccttacatcgaacttaaagattctgacagtcgtccggatgatgaagttgctgaagagctttggaattatcataaggcccgaaatgattctgtaatagttgatgtttgtcaaggccaatacaagtccactctggtttgtccagcttgcggaaaaatatcaatcacttttgatcccttcatgtacttgtctgtacctttgccatcaacacttacgcgatccatgacagttacggtgttttattgcgatggaagtcatcttccgatgccatacacagtaatagtgcctaaaaatggatctattagagatctcattaccgcattaggtactgcttgtttattagccgaagatgagagtcttttacttgcagaggtatatgaccacaagatttttaaatattttgagaatcccctggattcactgagttcgataaaagatgatgagcatattgtagcctatcggttaaatcagatgccgaaaggatcagggaaagcaaaactcgaaattcttcatggagggcagaaaaggcctattctggagagtgttagaggcagagatgtgaagctctttggaactccttttgtgacttatgtcaacacagaaccactaagtggagctgacattgatgcagttctctctcgatttctgtcgcctctgcacaaggtccatgccccatctaagattcataacggaagtgaaaatggccaccttcctgatgctactgttgacgaagcatccgaaattttatcatccccagataccgagatagacgatgcatctgatagagagttatccttcaggatattcttgacagatgaacgtggtttgaactttaaaccactgcagtctgaatcttccataagcctgggtatcgctacaagagttttagtcgagtggaatgagggtgagcatgaaagatatgattccagctacttgagtgatcttccggaggttcataaaacaagtttctctgcaaagaagacaaggcaagaatcgatatccctgttttcgtgtttggaggcgtttttagcagaagaacctctgggaccagatgacatgtggttttgtccgagctgcaaagaacacagacaagcgaacaaaaagctagacctgtggaagttaccagatattcttgtgtttcatttaaaaaggttcacttacagcagatatctcaagaataagattgatacgtttgtgaatttcccagttcatgatctagacttgagcaagtatgtgaaaaacaagaatgaccagtcatatctatatgaactgtatgccgttagtaatcattatggtggacttggtggtggccactacactgcctacgctaagttgattgatgacaatgaatggtaccatttcgacgacagtcatgtgtcatctgtaaatgaatctgaaataaaaaactcagctgcatatgttcttttctaccgaagagtgagaagtgaaacagagacacaaacagtggagatgtcgactgatatggattag

SEQ ID NO: 2240 - DNA, 1803 bp, Arabidopsis thaliana
  Clone ID: AT_MSF19.C1.o4.tg
atggattcttcttcgtttgaagataatgaatgcattgagacttgtaaaccaaacgttttgaatgtaagtgaaaggagagaattgatccacgcattgtctaaccagcctgaagaagcttcggagcttttgaattcatggagcagaaatgagatcatgaagatcatatgtgctgagatgggtaaagaaaggaagtacactggtcttaacaaaccaaagctcatagagaatcttctgaatcttgtgtctcgtcctcttggagagacctcttgttctgaccgtagaaactcgaggaagaaggagaagaagatgatcggttacatcatttgctgtgagaatttagcttgtagagctgcgcttggatgcgatgatacgttttgcagaaggtgttcttgctgcatctgtcaaaagtttgatgataataaggatcctagtttatggcttacttgtgatgcttgtggatcgtcttgtcatttggaatgtggtttgaagcaagataggtatgggattgggagtgatgatcttgatggtaggttttattgcgcgtattgcggtaaagataatgacttgctcggatgctggagaaaacaagtgaaggtggcgaaagagacgcggcgtgtggatgtactttgttatcgtctttctttaggacagaagctgttgagaggtaccacgaagtatcggaatctgttggaacttatggatgaggcggtgaagaagctcgaaggtgatgtgggtccgttgtcgggttgggccatgaagatggctcgaggcatcgtcaatagactttcttcgggtgtgcatgtccagaagctgtgttctcaggcaatggaagctctggacaaagtggtctcaccatcagaatctgtttcaggacaaggtgacaagatgaccgtgagagtagaagagattcaagcaagatcagtcactgtgagagtagactccgaggagccgtcttcttctacacaaaacaagatcacaggtttcaggttgttttgtcgaaagtcgaaggacgaagaatgctcgtctcaggggaattgtgttgtttatctacctgagacgacgtctgccatccaaggacttgaacccgacaccgagttctgtctcagagtggtttcctttaacgaggaaggtgacttagatgagtctgagcttcggttcacaacgttgaaggatgatggagatgaagctggggaccagcaaagccctttgacaaactcaagcagtggtctttgtagtaatccatctttaccagaagatgaatctaataatgtcaataaaagctgcagcaaaggaaatggtgacaaggacaacactgaacactgtagtgcaggagaagtagaatctgagcttgaagaagagaggcttgtaaagaggaaagcaaacaagatagatggaagagacttgcttgtaacaccctgcaagagagatatttataaaggaaagcaaggagggaataaaagattcaaatcaagaacagtatccttgaacgagaaacctgagatcaataatgccgcaaatggagtaggagataaagacttgggtcatattgttaagacgattagatgtttagaggaagaaggacatatagacaagagttttagggaaaggttcttgacatggtatagcttaagagctactcaccgagaagtaagagttgtgaagatctttgttgagacgtttatggaggatctgtcttctttgggacaacagcttgtggatacattctcagaaagtatactgagtaagagatcatcgacaaatggtgtagtacctgctgggatctgcctcaagctttggcattaa

SEQ ID NO: 2241 - DNA, 714 bp, Arabidopsis thaliana
  Clone ID: AT_T4F9.C1.o60.tg
atgaagccacacgaagattgggtttatgaatcatggacagtagattgtgtttgtggtgtgaattttgatgatggtaaagagatggttgattgtgatgaatgtggtgtttgggttcatacatggtgttctcgttatgttaaaggtgatgatttgtttgtttgccacaagtgtaagataaaaaacaatgaagatgaattgtccaagttatcggttactaaatcgttgagaatggagaatttatgtacgcagagtagtgagagtgttgtattgaaggcttgttcagagataccaattgaagaaagggttcatgtacaaggagttcctggtggtgatttgggtttgtttgaatgtgtttcttcggtttttagtcggcagttatggaagtgtagtggttatgtgcctaagaagtttaggtttcagtgtagggagtttccttgttgggatgagaaggagaatgtgtgtgatgttgttggggatgaagatgatagtaatcttgctggtgttttgttgtctatgtcgaaagaaaacggtgtggatggtaagggagacaatgctaggaattgtggttctagagaaattgagagtgatgtagagaaagagaagagcttgctttgtgatcctttgagtatatataagaggagaaacgagtcggtgggtggttttgaagatggggtaaagaagaaggttaaagttgctgataaagaggaagaataa

SEQ ID NO: 2242 - DNA, 3999 bp, Arabidopsis thaliana
  Clone ID: AT_MTE17.C1.o10.tg
atgacgttcgttgacgatgatgaagaggaagacttctctgttcctcaatcagcttccaattattatttcgaagatgatgataaagagcctgtttcgtttgctcgtctcccaattcaatggagcgtggaggagaaagttgatggtagtggtttaggtttttacttgcgaggaagatctgataacggccttttgcctctgcataagcttgttaaggcttggagatacgatctttcgaacttccagcctgagatttctgttcttacgaaggataatatatggattaagcttgaggaaccgaggaaaagctatggggaattgattagaactgttttggtcacgttgcattccattcagtttcttaggaggaatccccaagcgtccgagaaagctctctgggagaaattaactagaagtttgaggtcatatgatgtgaagccatcgcagaatgatttggtggatcatattggtttaatcgctgaagctgcgaaaagagatagaaatttggcgaattcgaagtttatacttgcatttctcacaaaaaagcctaccaaaaggagattacctgacgaggacaatgcaaaagatgatttcatagttggagatgaggacacttatgtagcttccgatgaagatgaattggatgatgaagacgatgatttttttgagtctgtttgtgcaatatgtgacaatggtggcgagattttgtgttgtgaaggaagctgcctgagatcatttcatgctaccaaaaaagatggtgaagattcactttgtgattctcttggctttaacaagatgcaagtggaagcaattcagaaatacttttgcccaaactgtgagcataagatacatcaatgcttcatttgcaagaaccttggctcttctgataactcttctggagcagcagaggttttccaatgcgtgtcagccacctgtggctacttttaccatcctcactgtgtcacaagacggctacgtttaggaaataaagaagagtctgaagcactagaaagacaaatcattgctggagagtatacatgcccattgcacaaatgcagtgtctgtgaaaacggagaggttaagacagactctaatttgcaatttgctgtttgccggcgttgtccaaagtcctaccatagaaaatgcctaccgcgggaaatttcttttgaagatattgaggacgaggatatattaactagggcatgggacggactcttgcacaaccgtgtactcatatattgccaagaacatgagatagatgaagaacttctgacaccagttagagaccatgttaagtttcctttcacggaagagcagaaggtcttcgtgaaagagcaaagaaggatactggaatcacatgtgggacgagataaagcaagacttaaggttaaggatcctgccttacaagatacttgtggaaaagcttctaagaattcctttagaagttcgtttccttcttcaaaagatggtttctccacaaagaagcatggattagtttcatccgtaccagatcattcgaggaaacgtaaggatattgatccatccataaagcataaaatggttccacaaaaatcccagaagatgatggaagactcccgtgaagctggcaaaaacaagctgggagtaaaagaagcccgtgatgctggtaaaagcaagatttcactgggtgagaggttgtttagttatacccaggaacctaatccagtaaaacctgggcgcgtgattcctgttgatagcaagcacaataagactgactcaattgcctccaaggagccaggaagtgaaattcctacattagacaacgactctcaaaggaggctcttggcagtgatgaaaaaagctacggaagaaataactatgggtactattttaaagaaattcaaaattcaatctactatgagtacacactccacaaggaatgttgtggacaagacaatcactatggggaaggtagagggatcagtccaggctatcagaacagcactaaaaaagcttgaggaaggaggaaacattgaggatgcaaaagcagtttgtgagccagaggttctgagccaaatcctcaagtggaaggataagctcaaagtttatcttgctccttttctccatggtgcacgctatacctcatttggtcgtcattttactaatcctgaaaaacttcaacagattgttgataggctgcattggtatgcagatgatggtgatatgattgtcgacttctgttgtggttctaatgactttagctgtctgatgaacgcgaagcttgaagaaacggggaagaagtgcttatataaaaattacgatctttttccagcgaagaataatttcaattttgagagaaaggattggatgactgtaagtaaagatgagttggaaccaggttcaaagctgattatggggctaaatccaccatttggagtcaatgcttctcttgcaaacaagtttattaccaaggctcttgagttccgcccaaagattctcattctcattgttcctcccgagactgaaaggtttcagtttccatctatctcatctgctcctctgtaccattccataacactaatatatcgactcctctctctctctcttgttaaatctatcacttttctcaacaggttagataaaaagaagtcatcatatgtgcttatatgggaggataagacgttcctatctggaaattcattttacctgcctggttctgtcaatgaagaagacaagcaattggaagactggaaccttgttcctccgccactttctctctggagtcggtccgactttgcagccaagcacaagaaaatagcggagaagcattgccatttgtctagggatgtggggagctcaaagttaaagatagtggaagaagaagcaaacgcatctttgcatccacttggagcttctgatggcatgtgtgatgatattcctatggaaaaggatgaacttgaggtagctgaatgcgttaataaaatcttagtctctgagaaaatcgacacagtagaaactgtagcacgtgtacatcagtcagatcacttgtcacggagaagtcagctgaaaaaggagggaaagaccaaagactactctggtaggaagcttgggaaatctatggattctaataatgtggattggaagagcaatgacatggaagaggatcaaggagagttgagtagagcaccagagagcatcaaagtaaaaattcccgaaatgacatctgattggcagagtcctgttaggtcttccccagatgatatatatgctgtctgcacatcaatttccactacaacacctcaaagatctcacgaggctgtagaagcatctctgcctgcaataacaaggacaaaaagtaacttgggaaagaatattagagaacatggttgtaaagtgcagggcactggaaaacctgaagtgagtcgggataggcctagctctgtgagaacttctagagaggacatctacactgttcgtccatcgccagaaaatacgggtcagaaaccgtttgaagcttttgaaccatcttatggtgcaagtttgtcccatttcgacgatggtcttgctgctaagtatggtggtttcggtggaggctatagaatgccggatcctcctttcctaccggatcagtttccattgagaaatggtcctaacgagatgtttgatttccgaggatattcagaccttgatagagggattggtcaaagagaatatccacagcagtacggtgggcacttggaccccatgttagctcctcctcctcctccaaatctgatggacaatgcattcccattgcaacaacgttatgcgcctcatttcgatcaaatgaattaccagaggatgagctctttcccacctcagcctccattgcaacctagcggacataatctcttaaatcctcatgactttccactgccaccgccaccacctagtgacttcgaaatgagtccaaggggttttgcccctggcccgaacccgaactacccttatatgagtcgatctggcggttggattaatgactag

SEQ ID NO: 2243 - DNA, 3255 bp, Arabidopsis thaliana
  Clone ID: AT_MVP7.C1.o7.tg
atgaacaccggtggtcggttaatcgccggttctcacaacaggaatgagtttgtcctcattaatgccgatgagaatgcccgaataagatcagtccaagagctgagtggacagacatgtcaaatctgcagagatgagatcgaattgactgttgatggagaaccgtttgtggcatgtaacgaatgtgcattccctgtgtgtagaccttgctatgagtacgaaagacgagaaggcaatcaagcttgtccacagtgcaaaacccgtttcaaacgtcttaaaggaagtccaagagttgaaggtgatgaagaggaagatgacattgatgatttagacaatgagtttgagtatggaaataatgggattggatttgatcaggtttctgaaggtatgtcaatctctcgtcgcaactccggtttcccacaatctgatttggattcagctccacctggctctcagattccattgctgacttacggcgacgaggacgttgagatttcttctgatagacatgctcttattgttcctccttcacttggtggtcatggcaatagagttcatcctgtttctctttctgacccgaccgtggctgcacatccaaggcctatggtacctcagaaagatcttgcggtttatggttatggaagtgtcgcttggaaagatcggatggaggaatggaagagaaagcagaatgagaaacttcaggttgttaggcatgaaggagatcctgattttgaagatggtgatgatgctgattttccaatgatggatgagggaaggcagccattgtctaggaagataccaatcaaatcgagcaagataaatccttaccggatgttaattgtgctacgtcttgtgattcttggtctcttctttcactaccgtattcttcaccccgtcaaagatgcatatgctttgtggcttatttctgttatatgtgagatatggtttgctgtttcatgggttcttgatcagttccctaaatggtaccctatcgagcgagaaacgtacttggaccgactctcattaagatatgagaaagaagggaaaccgtcgggactatcccctgtggatgtatttgttagtacagtggatccattgaaagagcctccgcttattactgcaaatactgtcttgtctattcttgctgttgattatcctgtcgataaggttgcttgttacgtatctgatgatggtgctgctatgcttactttcgaagctctttctgagaccgctgaattcgcaaggaaatgggttcctttctgcaagaaatattgtattgagcctcgtgctcccgaatggtatttctgccataaaatggactacttgaagaataaagttcatcccgcatttgttagggagcggcgagccatgaagagagattatgaagaattcaaagtaaagatcaatgctttagtagcaacagcacagaaagtgcctgaggatggttggactatgcaagacggtacaccttggcccggtaatagtgtgcgagatcatcctggcatgattcaggtcttccttggaagtgacggtgttcgtgatgtcgaaaacaacgagttgcctcgattagtttacgtttctcgtgagaagagacccggatttgatcaccataagaaggctggagctatgaattccctgatacgagtctctggggttctatcaaatgctccttaccttctgaatgtcgattgtgatcactacatcaacaatagcaaagctcttagagaagcaatgtgtttcatgatggatcctcagtcaggaaagaaaatctgttatgttcagttccctcaaaggttcgatgggattgataggcacgatcgatactcaaatcgcaatgttgtgttctttgatatcaatatgaaaggtttggatgggctacaagggcctatatacgtcggtacaggttgtgttttcaggaggcaagcgctttacggatttgatgcaccgaagaagaagaagggcccacgtaagacatgcaattgctggccaaaatggtgtctcctatgttttggttcaagaaagaatcgtaaagcaaagacagtggctgcggataagaagaagaagaatagggaagcgtcaaagcagatccacgcattagaaaatatcgaagagggccgcgtcactaaaggttctaacgtagaacagtcaaccgaggcaatgcaaatgaagttggagaagaaatttgggcagtctcctgtatttgttgcatctgcgcgtatggagaatggtgggatggctagaaacgcaagcccggcttgtctgcttaaagaagccatccaagtcattagttgcggatatgaagataaaactgaatggggaaaagagattgggtggatctatggttctgttaccgaagatattcttacgggttttaagatgcattctcatggttggagatctgtttattgtacaccaaagttagcggctttcaaaggatcagctccaatcaatctttcggatcgtctccatcaagttcttcgatgggcgcttgggtcggttgagattttcttgagtaggcattgtcctatttggtatggttatggaggtgggttgaaatggcttgagcggttgtcctacattaactctgtggtttacccgtggacctctctaccgctcatcgtttactgttctctccctgccatctgtcttctcactggaaaattcatcgttcccgagattagcaactatgcgagtatcctcttcatggcgctcttctcgtcgattgcaataacgggtattctcgagatgcaatggggcaaagttgggatcgatgattggtggagaaacgaacagttttgggtcattggaggtgtttctgcgcatctgtttgctctcttccaaggtctcctcaaggttcttgctggtgtcgacactaacttcacagtcacatcaaaagcagctgatgatggagagttctctgacctttacctcttcaaatggacttcacttctcatccctccaatgactctactcatcataaacgtcattggagtcatagtcggagtctctgatgccatcagcaatggatacgactcgtggggaccgcttttcggaagactgttctttgcactttgggtcatcattcatctttacccgttccttaaaggtttgcttgggaaacaagatagaatgccaaccattattgtcgtctggtccatcctcctggcctcgattcttacacttctttgggtccgggttaatccgtttgtggcgaaaggcggtcctattctcgagatctgtggtttagactgcttgtga

SEQ ID NO: 2244 - DNA, 5076 bp, Arabidopsis thaliana
  Clone ID: AT_YUP8H12R.C1.o22.tg
atgtcggggcaggtttcaaaccaagggactatgtcccagcaaaatgggaactcccaaatgcagaatttagttggtggtggttcagctcctgctactggtgctggtttaggaccttcacgcgtttctcccgttgacaatgacatcttgaaacttcggcaggctatgcgaatcaggattttcaatatcttacagcaaaagcaaccatctccagctgatgaagcatcaaaggctaaatatatggatgttgctagacgcttagaggaggggctgtttaaaattgctaacacaaaggaagattacgtgaacccgtcaacccttgaacctcggctggcaagtctaatcaaaggcaggcagttaaataactacaatcagcgacacgctaattcttcttcggttggaacaatgatacccactccaggattacaacacagtggtgggaatccaaatttgatgattacttcctcaggtgatgctacaatggctggaagtaataacatcacaactagtgctatgaacactggaaacctgctaaattctggtggcatgcttggaggtaacctgtctaatggataccaacattcatcgagtaactttggtcttgggtctggagggaacatgtcatccatgagctcccagagaaataccggccagatgatgcctacccctggatttgtcaacagtagtactaataacaacagcaataatggccagtcttacttgagtgttgaagcttccaacaatagtggtggattttctactgctcccatgatggtacctcagactcagcaacagcaactgaggcaggatattggtggccaaaatagtcgtatgctgcaaaaccatggaagtcaaatgggtgttggccttagacctggaatgcaacaaaaattgtctaatgtgtctaacagctccataaatggtggtgttggaatgaatgcaaaaagcgtagattcaggtacatcctacaccaatcctatcagaaattcacagcaggcttatgataatcttcagcgttcaggaatgcagggtgatggatatggcacaaacaactctgacccattcggatcgggaaatttgtatggtgctgtaacatctgttgggatgatgacaaatactcagaatgccaatacagcaagtttccaggctgtgtctagaactagctcttctttgtcacatcaacagcagcagtttcagcaacagcctaatcggtttcagcaacaacctaatcaatttcaccaacagcagcagcagtttcttcatcaacagcaattgaagcagcaaagccagcagcaacagagatttataagtcacgatgcttttgggcaaaataatgtggcttctgatatggttactcacgttaaacatgaacctggaatggagaaccctagcgagtctatccactcccaaactcctgagcaatttcagctttctcagtttcagaatcaataccagaacaatgcagaagaccgtcatgcaggttctcagattctccctgtcacaagtcagagtgatatgtgcacatcagttcctcaaaatagccaacagatacagcagatgttgcacccgcatagtatggcttcagactctgtcaacggttttagcaacctctctgttggagtgaaaacagaatctgggatgcgtggtcactggcaatctcagtcacaggaacatactcaaatgtctaatagtatgtcgaacgaacggcacattcaggaggatttccgacaaagaatgtctggaacggatgaagctcagcccaataatatgtctggaggctcaattataggtcaaaatcgtgtctcgactacatcagaatcccttaatccccaaaatcctactgctaccacttgtagaaatggaaatggcaaccgggatccgagattcaaaaatcaacagaaatggctcctctttctacgccatgctcgccactgcaaagcgcctgaagggaagtgtcctgatcgaaattgtgttacggttcaaaagctctggaaacacatggacagttgtgctgcacctcaatgttcatatcctcgttgcctccccacaaagacattgattaatcatcatcgaagttgtaaggaacctaactgccctgtctgtattcctgtgaaggcctacctacagcaacaggcaaatgcacggtcccttgctcgattaaaaaatgaaaccgatgcagccaggtcagtgaatggtggaggaatatcaagtgacgctgtacagacctctgctggagcaaaatcttgtacttcgcctggtgctgatatttcaggtcatttgcaaccatcattaaaacggttgaaggtggagcagtcttctcaacctgtggatgttgagacagaaagttgtaagagctcagttgtttccgtaacagaagcacaatcatctcagtacgctgaaagaaaagatcataagcacagtgatgtacgtgcaccttcaaaatattttgaagtgaaagctgaggtttctgacttttctgtccagacacgacccggattcaaagatacaaaaattggaattgctgaaaatattcccaagcaaagacctgtcagtcaacctgataaacaagatttatctgatgtttcacctatgcaagagactaccaaagtggagaaagaacctgaatcacttaagaaagaaaatctggcagagtctactgaacatacatcaaaatctggaaaaccagagataaagggtgtttcattaactgaattgttcactcctgaacaagtgagagaacatatccgtggtctccgtcagtgggttgggcagagtaaagccaaagcagaaaagaatcaggcaatggagcattcaatgagtgagaattcctgccaactatgtgcagtggagaagcttacctttgagccaccacctatttattgtaccccttgtggtgctcgcatcaagagaaatgctatgtactacaccgtaggagctggtgacactcgtcattacttttgtattccatgttataatgaatcccgcggcgacactatactcgctgaagggacccctatgcctaaggcaagactcgagaaaaagaaaaatgatgaagagactgaagaatggtgggtccaatgtgataaatgtgaggcgtggcagcatcagatatgtgctttatttaatgggagaaggaatgacggagggcaggctgagtatacctgcccatattgctttatagcagaagtggagcaaagtaagaggaagcctttacctcagagtgctgttcttggagctaaagacttaccgcgaacaattctcagtgaccatatagagcagcggttgtttaagaggctgaagcaggaaagaacagagagagccagggctcaaggaaaaagttatgatgagattcccactgccgagtcccttgtgattagagttgtttcatctgttgacaagaagctggaagtcaaacctcgatttcttgaaatttttcgggaggatagttacccaacagaatttgcatacaagtccaaggtagttctgttgtttcaaaagattgaaggcgtagaagtatgcttatttgggatgtacgtccaagaattcggttctgaatgcgcatttcccaatcaacgccgagtttatctctcgtatttggattctgtcaagtacttcagacccgaggttagatcttataacggagaagctctgcgtacttttgtttaccacgaaattctgatcggctacctagaatactgcaagttgcgtggtttcacgagctgctacatatgggcttgtccgccgctgaagggcgaggattatatcttatattgtcatccagaaattcagaagacgccaaaatctgataaactacgagagtggtacttagcaatgttgagaaaagcttcaaaggagggcattgttgcagaaactatcaatctatatgaccattttttcatgcaaactggtgaatgtagagctaaggttacagcagctaggctcccgtattttgacggtgactactggccaggtgcagcagaggatcttatataccaaatgagtcaagaagaagatggaagaaagggaaataagaaaggaatgctcaagaaaaccattactaaaagggctctaaaagcttctggtcagactgatctatctgggaatgcttccaaggatctgcttctaatgcatagactcggtgagaccattcacccgatgaaggaggactttatcatggtccacttgcagccttcttgcactcattgctgcatactgatggtatctggtaatcgttgggtctgcagccagtgcaaacacttccagatttgtgacaagtgttacgaggctgagcagagacgtgaagacagggaaaggcatcctgttaattttaaggataagcatgcgttgtatccagttgagattatggatattcctgcagatacaagagacaaagatgaaatactcgaaagcgagtttttcgacactagacaagcatttctgagtctttgtcaagggaaccattatcagtatgatacattgaggcgggcaaaacattcgtccatgatggtcctttatcatctacataacccaaccgctcctgcctttgtcacgacctgcaatgcgtgtcatcttgacattgaaactggtcaaggctggcgctgtgaagtatgtccagactacgatgtgtgcaatgcctgtttcagtagagatggtggagttaatcatcctcacaagttgacgaatcatccatctttagctgatcaaaatgctcaaaacaaagaagcgaggcaattgcgagtcttgcagcttaggaaaatgctcgatcttctggtacatgcatcacaatgtcgttcggcacattgtcaatatccgaattgccggaaagtgaaagggctattccgacatggtatcaactgcaaagtacgtgcttcgggaggttgtgttctatgcaaaaaaatgtggtatctcctgcaactccatgctcgggcctgcaaggaatcagagtgccatgtacctcgttgcagggacctaaaggagcatctgagaagattacagcagcaatcagattcacggcgcagagcagctgtaatggaaatgatgagacaaagagctgcagaagtcgctgggggctcaggttaa

SEQ ID NO: 2245 - DNA, 3246 bp, Arabidopsis thaliana
  Clone ID: AT_F8B4.C1.o110.tg
atggaggccagtgccggcttggttgctggatcctaccggagaaacgagctcgttcggatccgacatgaatctgatggcgggaccaaacctttgaagaatatgaatggccagatatgtcagatctgtggtgatgatgttggactcgctgaaactggagatgtctttgtcgcgtgtaatgaatgtgccttccctgtgtgtcggccttgctatgagtacgagaggaaagatggaactcagtgttgccctcaatgcaagactagattcagacgacacagggggagtcctcgtgttgaaggagatgaagatgaggatgatgttgatgatatcgagaatgagttcaattacgcccagggagctaacaaggcgagacaccaacgccatggcgaagagttttcttcttcctctagacatgaatctcaaccaattcctcttctcacccatggccatacggtttctggagagattcgcacgcctgatacacaatctgtgcgaactacatcaggtcctttgggtccttctgacaggaatgctatttcatctccatatattgatccacggcaacctgtccctgtaagaatcgtggacccgtcaaaagacttgaactcttatgggcttggtaatgttgactggaaagaaagagttgaaggctggaagctgaagcaggagaaaaatatgttacagatgactggtaaataccatgaagggaaaggaggagaaattgaagggactggttccaatggcgaagaactccaaatggctgatgatacacgtcttcctatgagtcgtgtggtgcctatcccatcttctcgcctaaccccttatcgggttgtgattattctccggcttatcatcttgtgtttcttcttgcaatatcgtacaactcaccctgtgaaaaatgcatatcctttgtggttgacctcggttatctgtgagatctggtttgcattttcttggcttcttgatcagtttcccaaatggtaccccattaacagggagacttatcttgaccgtctcgctataagatatgatcgagacggtgaaccatcacagctcgttcctgttgatgtgtttgttagtacagtggacccattgaaagagcctccccttgttacagcaaacacagttctctcgattctttctgtggactacccggtagataaagtagcctgttatgtttcagatgatggttcagctatgcttacctttgaatccctttctgaaaccgctgagtttgcaaagaaatgggtaccattttgcaagaaattcaacattgaacctagggcccctgaattctattttgcccagaagatagattacttgaaggacaagatccaaccgtcttttgttaaagagcgacgagctatgaagagagagtatgaagagtttaaagtgaggataaatgctcttgttgccaaagcacagaaaatccctgaagaaggctggacaatgcaggatggtactccctggcctggtaacaacactagagatcatcctggaatgatacaggtgttcttaggccatagtgggggtctggataccgatggaaatgagctgcctagactcatctatgtttctcgtgaaaagcggcctggatttcaacaccacaaaaaggctggagctatgaatgcattgatccgtgtatctgctgttcttaccaatggagcatatcttttgaacgtggattgtgatcattactttaataacagtaaggctattaaagaagctatgtgtttcatgatggacccggctattggaaagaagtgctgctatgtccagttccctcaacgttttgacggtattgatttgcacgatcgatatgccaacaggaatatagtctttttcgatattaacatgaaggggttggatggtatccagggtccagtatatgtgggtactggttgttgttttaataggcaggctctatatgggtatgatcctgttttgacggaagaagatttagaaccaaatattattgtcaagagctgttgcgggtcaaggaagaaaggtaaaagtagcaagaagtataactacgaaaagaggagaggcatcaacagaagtgactccaatgctccacttttcaatatggaggacatcgatgagggttttgaaggttatgatgatgagaggtctattctaatgtcccagaggagtgtagagaagcgttttggtcagtcgccggtatttattgcggcaaccttcatggaacaaggcggcattccaccaacaaccaatcccgctactcttctgaaggaggctattcatgttataagctgtggttacgaagacaagactgaatggggcaaagagattggttggatctatggttccgtgacggaagatattcttactgggttcaagatgcatgcccggggttggatatcgatctactgcaatcctccacgccctgcgttcaagggatctgcaccaatcaatctttctgatcgtttgaaccaagttcttcgatgggctttgggatctatcgagattcttcttagcagacattgtcctatctggtatggttaccatggaaggttgagacttttggagaggatcgcttatatcaacaccatcgtctatcctattacatccatccctcttattgcgtattgtattcttcccgctttttgtctcatcaccgacagattcatcatacccgagataagcaactacgcgagtatttggttcattctactcttcatctcaattgctgtgactggaatcctggagctgagatggagcggtgtgagcattgaggattggtggaggaacgagcagttctgggtcattggtggcacatccgcccatctttttgctgtcttccaaggtctacttaaggttcttgctggtatcgacaccaacttcaccgttacatctaaagccacagacgaagatggggattttgcagaactctacatcttcaaatggacagctcttctcattccaccaaccaccgtcctacttgtgaacctcataggcattgtggctggtgtctcttatgctgtaaacagtggctaccagtcgtggggtccgcttttcgggaagctcttcttcgccttatgggttattgcccatctctaccctttcttgaaaggtctgttgggaagacaaaaccgaacaccaaccatcgtcattgtctggtctgttcttctcgcctccatcttctcgttgctttgggtcaggatcaatccctttgtggacgccaatcccaatgccaacaacttcaatggcaaaggaggtgtcttttag

SEQ ID NO: 2246 - DNA, 1878 bp, Arabidopsis thaliana
  Clone ID: AT_msk20.C1.o20.tg
atggatttggattcgatgccgaagccggagtcggagctcatgtcagtcacaagtcaaataatctctgtcttcaactcaatggatctgaattcccagccggaggcactgtccaaggtcatatcactcattactgatcgcgtgaatgatacagattcggattccgatatctatttggattcagattttgaagactatattgcggttatattgaatctcgagccggagccggagctcctatcactcatctatcaagtattcaccctcgtcagctctatgaattcaaagtgggagaagcttatttctgtacgccctcaagtagtacacagattgggaagagacaaaatttatatgaatgatgaacaagtctcgtgtagaaggtataacaagtgggcgtgtctccctaaaaactggtttatgttgtggtttatgggagaagacgacgaaacgcactttctttgcagagcttgcgaaggccagaaccataaagaacataacaacgctccagttgagatcaaacaccatcttcatcccaagcactcacttctgcttgtcaatattgaaatatatcctagagagaggaaatgctattgttgcgacgaagatctcggaactttcttttatcattgctcggcttgcgatttcactctgaatatagcttgtgtggagaaaccaccggtcttatctatagaccatcccaagtggcatgagcatacacttgttctgttttcgagaacaacttccttaacttgcgacgtctgtgccttggcctattcaacatctcctttctatatatgtccaccttgtggctttgtggtccatggaagatgcatagacttaccacgtgtcataaggatctcccgccatccccatcgtatctcttttaccccttcttttcatcaaggaaattggttttgtggtgtttgtcgcagaaagattgaaaatgatttcgggggttattcttgcgttaagtacggttgttcgtatgcggcacattcaaggtgtgccacacaaagcaatgtgtgggatggtgtagaacttgagggagagccagaagaagacattgaagaaattccgccatttgtgaggataagtgatggaatcatacaacatttcattcatcagtatcatcacttgcgacttgatgagaatacatgtagagaatacgacgaggataggctgtgtcaagcgtgcatcacgccaatctattttggcaacttgtactcttgtatgcaatgtggttttgttctccacgaaaaatgtgcagaactttctcgcaaaatacatcatccgatacatccacatatgctcagttttgtagcaagaggcaacggcgttagacgttgctgttcagcttgtccttggttaatcacaactggtttcttctatcggtgtgagagagaagaatgtgatttccaactacacgtgcagtgcgccacagtttcagagccattagtccatgaaagtcatatgcatcctttattcctgacatccaaaccaggagagtggaaagattgtagtgtctgcaaagagtcaaattattctttgacaaatgaaaaatttaattgcattgaggagtgtgactttgctttgtgttttggatgtgccacattacctcaaaaggtgaggtataagtatgataagcatatgctcactctttcttatgggaaggagacaagtaccatgacctattggtgtgaagcttgcgagggagaaatagatccaaagaaaaggttttatatgtgtgatgagtattgttgtgtcaccctacacattaactgtatgcttggggcggacaaatacatggatcccggttcatggtggttatacaaaggcaaccttgatggaacttgctctggttgtatgaaatactattattga

SEQ ID NO: 2247 - DNA, 3081 bp, Arabidopsis thaliana
  Clone ID: AT_T10B6.C1.o80.tg
atggaagctagcgccggtcttgtcgccggttctcataaccgtaatgaactagtcgtcattcacaaccatgaagagccaaagcctctgaagaatctagatggacaattctgtgagatatgtggagatcagattggtttaacagtagaaggagacctcttcgtagcttgcaatgagtgtggttttccggcgtgtagaccttgctatgagtacgagagaagagaaggaacacaaaactgtcctcagtgtaagactcgttacaagcgtctcagaggaagcccaagagtggagggagatgaagacgaagaagatattgatgatattgagtatgaatttaatatcgaacatgaacaagataagcataagcattctgctgaggctatgctttatgggaaaatgagctatggaagaggtcctgaggatgatgagaatgggagattcccacctgttatagctggtggtcatagtggagaatttccagttggaggaggttatggtaatggagaacatgggcttcataagcgtgtgcacccatatccatcatctgaagctgggagtgagggaggatggcgggaaagaatggatgactggaagctccagcatggaaatcttgggccagaaccagatgatgatcctgagatgggactgatcgacgaggcacggcagccactctcgcggaaagttcccattgcctcaagcaagatcaatccatatcggatggtcatcgtcgctaggcttgtgattctagcagtttttctgcggtataggctcttgaatccagtgcatgatgctctgggattatggctgacctctgtgatctgtgaaatctggttcgctgtctcttggattcttgatcagttccccaagtggttccctattgaacgtgagacctatctagatcggctttccctcaggtacgagagagaaggtgaaccaaatatgcttgcccctgtagatgtctttgtcagtacggtggacccattgaaggagcctcccctcgtcacatccaacactgtgctgtcaatcttggccatggactacccagttgagaaaatctcctgctatgtctctgacgacggtgcttcaatgcttacattcgaatctctctcggaaactgctgagtttgcaagaaaatgggttcccttctgtaagaaattctccatagagccacgggcaccggagatgtacttcacgttgaaagttgattatctccaggacaaagtccacccaacatttgttaaggaacgtcgagccatgaagagagaatatgaggagttcaaggtcaggatcaacgctcaagtggcgaaggcctcaaaggttcctctagaaggttggatcatgcaagatggaacaccgtggccagggaacaacaccaaggaccaccccggtatgatccaagtcttcctcggccacagcggaggatttgatgtcgaagggcatgagcttcctcggcttgtgtacgtgtcccgtgagaagcgtcctggttttcaacaccacaagaaagctggcgccatgaatgccctggttcgagtggcaggcgtactcacaaatgctcctttcatgctgaacttggactgtgatcactatgtaaacaacagcaaggccgtgagggaagcaatgtgttttttgatggatcctcagattggaaagaaggtctgctatgttcagttccctcaaaggtttgatggcattgacacaaacgatcgttacgccaacagaaacacagtcttctttgatatcaatatgaaaggtctagatggaatccaaggtccagtttacgttggtactggttgtgttttcaaacgacaagctctgtatggttatgaaccaccaaagggtcctaaacgtccaaagatgataagctgtggttgttgtccttgctttgggcgccggagaaagaataagaaattttccaagaatgacatgaatggtgacgtagcagcccttggaggagcagaaggtgataaggagcatttgatgtctgaaatgaactttgagaaaacatttgggcaatcatccatctttgtaacctcaactttgatggaagaaggtggtgttcctccgtcatcaagtcctgcagtgctccttaaagaggcaatccatgtcataagctgcggttatgaagacaagactgagtggggaactgagctgggttggatctatggctctatcacagaggatattttgacgggattcaagatgcattgccgtggatggaggtctatttactgcatgcctaagaggcctgcattcaaaggttcagctcctattaatctatcagacaggttaaaccaggttttgcgttgggcacttggatcggttgagatatttttcagccggcacagtcctctctggtatggctacaaaggaggcaaactcaagtggcttgagcgttttgcttatgccaacacaacaatctaccccttcacatctataccacttcttgcctactgtatccttccagccatctgtctccttactgacaaattcatcatgccaccgataagcacatttgctagtctcttcttcatctcactgtttatgtcgatcattgtaacgggaatcttggaattgagatggagcggagttagcattgaggaatggtggagaaacgagcaattctgggtcattggaggaatctcagctcatctctttgcggttgtccaaggtctcctcaaaatcttagcaggcattgacacaaacttcaccgtcacatcaaaggcaacagatgatgatgactttggagaactttacgcattcaaatggacaacactgctgatccctccaacaactgtcttaatcataaacattgttggcgttgttgcaggcatctcagatgccattaacaatggatatcagtcttggggacctctatttggtaaactcttcttctccttttgggtcattgttcatctctacccattcctcaaaggtctgatgggtagacagaacagaacaccaaccattgtggtgatttggtcagtgttattggcatctatcttctctttgctttgggtaagaattgatccttttgtgctcaagaccaaaggacctgacacttccaagtgtggcatcaactgctga

SEQ ID NO: 2248 - DNA, 1965 bp, Arabidopsis thaliana
  Clone ID: AT_F9C16.C1.o23.tg
atggattcagagtcagagtcaaagctcatatcattcatttctcaattagtgtctcgcaacaatacggactcggagaacatatcatgcatgatacaaacaatctctctggtcagctcaatggatttgaagtcgcagccgaagccggagtcgaagctcatgtcgctcgttactcaaacaatctctctcttcaactccatggatttgagttcccaacccgagccactgaggaagctcatatcactcattattgaaaaactgtctcacctcaactcggtagattccgattatgagccaaagccagactcagagttcatgtcaaccttttatgaaacatacaagctccagccgaggccagagatcatatcaatcatccatcaaatatactccctctttatctccacagacacaaagtcaaaaccagagccggaggtggattcagagttgatgtttgtccacagctctatggattcggattcagattcagattcagatttggattcggaggaggaggaggaggaggagttgatatcactcctttctgaaatgtactcactctatgcgtttactacaaatgaagagttggagttgcggggtgggccagaagagttgccaaaattcaaatcattcatatcgcttacaagtaaagtaatcactctcgtacgctctcttgatttggattattcagagccggagccagagtcggagttcatttcagtggtagcagtcgttaagcaaataatgtcttttgccaactctatatcaaattcagaaccagagtggcagttcatatcaagcatgactgaaatgatccgtctcattagctctatagatctagaaccagagtgggagccaccaatgcagctagtggcactctttacacacacgttttctcttctctactatttggatcgagattcagagctgtatacactcattgctcaaataatttttatcattgattataccgattcggagccggagtcggaatgggggctagatcagcttatgtccttgtcccctcaatggaaagtacaacttgtacaaggaaaatttcatgtaacgggaaaaatcgagcggaagaacaaagaaaaggggaaatgtcaacccgaaaaccggcatagactctacttagcgaaaggagaggaggcttcccactttatttgcaaagattgcaacggcgaggaccatatagaatgtgaaaagacaccagttgaggtaaaacaccttctacatccaaagcattctcttcagcttgtctcacagaagtcgtcgataattcaaaccagaaaatgcttttgttgtgatgaagatctcaaaaagatattctattattgcacgggttgcgattatgatatgaacatagcttgtgcagagaagccaccagtcttatttatagaccgtcccaagtggcatgcagatacacttgctctgtttcaaagacaagctttcttaacctgcaatgtatgtgccgtggccgattccagctcccctatctatatgtgtcccccttgtgattttgtggtccatcaaagatgtaccggcttaccacgtgtcataaggatatctcgccatcgccatcgtatctctttcaccacttcttttgacgaaggagattggtcttgtggtgtttgtcggagaaaaattgacaatgattatgggggtttttcttgtatcaaggacggttgttcgtatgcagcacattcaagatgtgccacacaaaaaaatgtgtgggatggcatagatcttgagggagtgccagaagagattgaagaagaagaagttgagccgtttgtgacaataagcaaaggagtaatacaccattttagtcatcagaatcatcatttgaggcttgatgagaacagagacagaatctacgacgagaacaagctatgtcaagcatgcatcatgcccatctatttcggtaacttcttctcatgtatgcaatgtgattatattctccaatga

SEQ ID NO: 2249 - DNA, 1911 bp, Arabidopsis thaliana
  Clone ID: AT_MDN11.C1.o17.tg
atggaacaggactccattgttgagaatatgacagatgaggaaaacagcagcagtagcgatgatgattctgaggcgaacctgcagtttgatccagtatgttctatttgtgacaatggtggttatgttctgtgttgtgaaggaagttgcttgagatctttccatccaaccatagctgatggaattgagacagagtgcgaatcgctaggattcactgataagactcaaattcaggcactcgggacctatttgtgtaacaattgtctctataaacagcaccagtgctatgcttgtggcgaattgggatcctctgatgaaaatttctctcaacaggtcttcccttgctctgcgtcaaactgtggtcatttctaccatcctgaatgcgttgcaagacttctctgtgctgatgatcaaaacaaagcagaagaacttcaagccaagattgctgctagagactgctttgcctgtcctctacacacatgtaaactctgtaacatgagtgaagacaagaatcaatatgcgtgcattttgctgtatgcagacgttgcccaacagcttatcacagaaaatgtttacctagggatattacttctgaactcaactctgacgatgagacattgcaaagagcttgggaaagtctgcttccttacaaccgcattcttatatattgtttcttttcataaacttttgaacagggcccatgagatagacggtcttattcttactccagctagagaccacttagtttttcctgatgtatctggacaaagaagaacacgaagtcacgggctagcacagttcaaagaggatgttctgggtatggagacggatcattgtcatcatgagggtctatttactggtcttggtattactgacccttatgagaaaccaaaaaaagatattagctgcgatgaggtggaacagagggtgatgggtataatcgatgaagtggaatcctcgtttaactttgatgagttcgttaagtctcgtaggccaacccatataaaatcctaccactcaggaaactattttagtaagaacatcacaacaggattggttcggactcatgtcaatgctgctcgagctgccttaaagatgtttgaagaagggcgtgacagagatgcaagagctttatttgacccagatagcctactccaactcatgaagcataagaaaaagcttgaaatttcgccttttctccatggtatgcgctacacatcgtttggtcgtcacttcacaaatccagagaagcttaaagagattgtagagaggctccactggtatgtcgaaaatggcgatacggtagtcgacttttgctgcggctctaatgacttcagttgtttgatgaaagaaaagcttatggaaacggggaaaatatgcttctacaaaaacttagatctcatcccacctaagaacaacttcaattttgagatgagagattggctgagtgtgaaggaagaagagttacccgatggctctcaactgattatgggattgaacccgccttttggttacaaagccagtcttgctaacactttcattaagaaggccctcgagtttaaaccgaagatcttaatcctcatcgtaccaagtgaaacaaaaagggtcgatgcgattgatgattatgagttgatttgggaggacagaaatttacttgctggaatgtcgttctacttgcctgggtcagtagatgtgaatgataaaacgatagagcagtggaacaatataacgccacctctatacctttggagccgaagggatttgagtagaagccacaagaccacagcagttcaacagggtcacataacacagatgcatcacttcacctacaatggcgatagtcaccacacagagatccctcaaggtgatgatgatactgatatggtacaagacatggagatatcccctacctga

SEQ ID NO: 2250 - DNA, 5121 bp, Arabidopsis thaliana
  Clone ID: AT_F17F16.C1.o21.tg
atgaatgttcaggctcacatgtctggtcaacggtctgggcaggttccaaaccaagggacagtgccgcagaataatggaaactctcaaatgcagaatttagttggtagtaatggtgctgctactgctgttactggtgctggtgctgctactggttctggtactggtgtaaggccttcacgtaacatcgttggtgccatggatcatgatattatgaaacttcgacagtacatgcaaactcttgtgtttaacatgttacagcaacggcaaccatctccagctgatgctgcatcaaaggcaaagtatatggatgttgctagacgtttagaagaagggctgtttaagatggctgtcacaaaggaggattacatgaaccggtcaacccttgaatctcgtattacaagcctaataaaaggaagacagataaataactacaatcagcgacatgctaattcttcttcagttggaacgatgatacctactccaggattatcacagactgcgggtaatcctaatttgatggttacatcctctgttgatgctactatagttggcaacaccaacatcacaagcactgctttgaacactggaaaccctctaattgctggtggcatgcatggaggtaatatgtctaatggatatcagcactcgtcgagaaacttttctcttggttctggagggagcatgacatccatgggtgctcaaagaagtacagcccaaatgattcctacacctggcttcgttaacagtgttactaacaacaacagtggtggattttctgctgagcccacaattgttcctcagtctcagcaacaacaacaaaggcaacatactggtggtcaaaacagtcacatgttgtccaaccatatggctgctggcgttagacccgacatgcaatcaaagccgtcgggtgcggccaacagctctgtaaatggtgatgttggagcgaacgaaaaaattgtagactcaggttcatcttacaccaatgcgtccaaaaaattacagcagggtaacttctctcttctttccttctgtccggatgatctcatttcaggtcagcatattgaaagcacgtttcatatttcaggggaaggttatagcacaacaaatcctgaccccttcgatggagctataacatcggctgggacagggacaaaggctcataatatcaatacagcaagtttccagcctgtgtccagagttaactcttctctgtcacatcaacaacaatttcagcaaccgcctaatcgatttcagcaacaaccaaatcagattcaacagcagcagcagcaatttctcaatcagaggaaattgaagcagcagactccgcagcaacatagattaataagcaatgatggcttggggaaaactcaagtggattcagacatggttacgaaggtgaaatgtgaacctggaatggagaacaagagtcaggctccacagtcccaagcatctgaacgattccagctttctcagctccagaatcaatatcagaactctggagaagactgccaagcagacgctcagcttctcccagtcgaaagtcagagtgatatatgtacatcactcccccaaaatagccagcagattcagcaaatgatgcacccgcagaatataggttctgattctagtaacagttttagcaatcttgctgttggagtaaaatcagaatccagtccacagggtcaatggccttccaagtctcaggaaaatactctaatgtctaatgctatttcaagtggaaagcacattcaggaggatttccgtcaaagaattaccggaatggatgaagctcaacctaataatttgactgaagggtctgttattggtcaaaatcatacttctactatatcggaatcccataatctgcaaaattctattggtaccacatgtagatatggaaacgtaagtcacgatcccaagttcaaaaatcaacaaagatggctactgtttctacgtcatgcacggagttgcaaaccgccaggagggagatgccaagatcaaaattgcgtaacagttcagaaactatggagtcacatggacaattgtgctgatcctcagtgtttgtatccccgctgtcgtcacacaaaggcattgattggccactataaaaactgcaaggatcctcggtgccccgtctgtgtgccagtgaagacttatcagcaacaagctaatgttcgtgccctggcccgtttaaaaaacgaaagcagtgctgtgggctcagtgaatagatctgtagtatcaaatgattcactaagcgctaatgctggagcggtttctggtacccctcgttgtgctgatactttagataatttgcaaccttcattaaagcggttgaaggtggagcaatcttttcaaccagtggtccctaagactgaaagttgtaaaagctccattgtttctacaacagaggcagacttatctcaggatgctgaaagaaaggatcataggccattgaagtcagagaccatggaagtgaaagtggaaattcctgataattctgttcaagcaggattcggcatcaaagaaacgaaaagtgaaccttttgaaaatgttcccaagcctaagcctgtcagtgaaccaggtaaacatggtttatctggtgactcgccaaagcaagaaaacatcaaaatgaagaaagagcctggatggccgaagaaagagcctggatgtccaaagaaagaagaactggtggagtctcctgaacttacctcaaaatctagaaaaccaaagataaagggtgtttctttaactgaattgtttactccggaacaagtgagagaacatatccgtggtcttcgtcagtgggttggccagagtaaagccaaagcagaaaagaatcaggcaatggagaattcaatgagtgagaattcctgccagttatgtgcggtggagaagcttacatttgagccaccacctatttattgtactccttgtggtgctcgtatcaaaaggaatgcgatgtactatactgttggaggtggtgaaactcgtcattacttttgtattccctgttataatgaatcccgaggagacactattctcgctgaagggacttccatgccaaaggcaaaactcgagaaaaagaaaaacgatgaagagattgaagaatcgtgggtccaatgtgataaatgtcaggcctggcagcatcaaatatgtgctctatttaatgggcggaggaatgatggggggcaagctgagtatacctgcccatattgctatgtaattgatgtggagcaaaatgagagaaagcctttacttcagagtgctgttcttggagcgaaagatctgccaagaacaattctcagtgaccatatagagcagcggttgtttaaaaggctgaagcaggaaaggactgagagagccagggttcaaggaacaagttatgatgagattccaactgttgaatcccttgtggttagagttgtttcatctgttgacaagaagctagaagttaaatctcgatttcttgaaatttttcgggaggataattttccgacagaatttccatacaagtccaaggtggttctgctgttccagaagatagaaggtgtagaagtatgcttgtttgggatgtatgtccaagaatttggatccgaatgttcaaatcccaatcaacgccgtgtttatctctcgtatttggattctgtgaagtactttagacctgatatcaagtctgctaatggggaggctctgcgcactttcgtttaccacgaaattcttattggttatctggaatactgcaaattgcgtggtttcacgagctgctacatatgggcttgtccaccactgaagggtgaggattatatcctatattgccatccagaaattcagaaaacaccaaagtctgataaactacgggaatggtacttagcaatgttgagaaaagctgcaaaggaaggaattgttgcggaaactacaaatctatatgaccattttttcttgcaaactggtgaatgtagagctaaggttacagcagctagactcccgtacttcgatggtgactactggccaggtgcagcagaggatatcatatcccaaatgagtcaagaagatgatggtagaaagggaaataaaaaaggaatactcaagaaacccattacaaagagggctcttaaagcatctggccagtcggatttctctgggaatgcttccaaagacctgctactaatgcataaacttggtgagaccattcatccaatgaaggaggattttatcatggttcacttgcagcatagttgcacacattgctgtacgctgatggtaactggaaatcgttgggtttgcagccaatgcaaagatttccagttatgtgatggatgttatgaggctgagcagaaacgagaagacagagaaagacatcctgttaatcagaaagataaacataatatttttcctgttgagatcgccgatattcctacggatactaaggacagagatgagatacttgaaagtgaattctttgatacaaggcaagcattcctgagtctatgtcaagggaaccattatcagtatgatacactgaggcgggcaaaacattcttccatgatggtgctttatcatctgcataatcctactgctcctgcctttgtgacaacatgtaacgtatgtcacctcgatattgaaagtggtctaggctggcgctgtgaagtttgcccagactatgatgtgtgcaatgcttgttacaagaaagagggttgtattaatcatcctcataagttaacaactcatccatctctagctgatcaaaacgctcagaataaagaagctaggcaattgcgagtcttgcagctcaggaaaatgctcgatcttctggtgcatgcgtcgcaatgccgttctccagtttgtctatatcccaactgccgcaaagtgaaggggctattccgacatggtctccgctgcaaagtacgtgcttcaggaggttgtgttctatgcaagaaaatgtggtatctgttgcaactccacgctcgggcctgcaaggaatccgagtgtgatgtacctcgatgcggggacctaaaggaacatctgagaaggttacaacagcaatcagattctaggcggagagctgccgtcatggagatgatgagacagagagctgcagaagtcgctggaacctcgggttga

SEQ ID NO: 2251 - DNA, 1794 bp, Arabidopsis thaliana
  Clone ID: AT_F9C16.C1.o25.tg
atgattcaaataatctctatggtcagctcattggatttgaatacgcagccgaagccgcagtcgaagctcatgtcactcattacagaaacaatctccctcttcaactccatgaatttggattcccagccggagccgctaaggaagcttgtatcactcagtattcaaaaagtatctcaccttaattctgtaggttccgattatgagccgaagccggatccagagttcatgtacatgttctatgaaacattcaaccttgagccgatgccaaagcttatatcaaccatcgatcaaatatactccctctttatcttgccagatccagagccaaaaccgaagccggagatggatccagagcaagagtcaaagttcatatcactcctttctcaaatatactcaatctttgcgattaagacaaatgcggagttggagttgcggggtgggccggaggagttgccaaaatttaaatcattcatatcacttaccaaacaactaatgtctctcattagttctctagatttggagacggagccggagccagagtcggagttcatttcagtagtatcatgcattaagcaaataatctcttttgcccactctatatcaaactcggaaccagatttcatatcaagcacaactgaaatgttccgtctcattagctctatagatctggaagaggagccaccgatgaagctagcggcactttttcaacacacgctttctcttctctactcaatggatcgggattcagagctcataatcctcattggtaaaataatatctgtcatcgatcgtacggattcggagccggaggccgaatgggggctggaacagcttatttccttgtcccctcaaactaaagtaaaacttgtacaaggaaaatttcatgtaacggggaaaatcgagcggacgagcaaagaaaagggaagatgtcaacccaaaaacaaacatagactctacctagaaagcggagaagatgcttcccactttctttgcaaagattgcaacggcgaggaccatgtagaatgtgaaaagacaccggttgaggtaaaacaccttcttcatccaaagcattctctccagcttgttttgcagaagtcgtcgataactcaaaccagaaaatgcttttgttgtgatgaagatctcaaattgatattttattattgcacggtttgcgattatgctatgaatatagcttgtgcagagaagccaccagtcttatttatagaccatcccaagtggcatgcagatacacttgctctgtttccaagacaagctttcttaacctgcaatgtatgtgctgtggccgattccagctcccctatctatatgtgtcccccttgtgattttgtggttcatctaaaatgtatcagcttaccacgtgtcataaggatatctcgccatcaacatcgtatctctttcaccacttctttcgacgaaggagattggtcttgtggtgtttgtcggaaaacaatcgacaacgattatgggggttattcttgtatcaaggacggttgttcatatgcagcacattcaagatgtgccacacaaaaaaatgtgtgggatggcatatatcttgagggagtgccagaagagattgaagaagaagaagttgagccgtttgtgacaataagcaaaggagtaatacaccattttagtcatcagaatcatcatttgaggcttgatgagaacgaaggcagagtttacgacgaaaataagatatgtcaagcatgcatcatgcccatctatttcggtaacttcttctcatgtatgcaatgtgattatattctccaatga

SEQ ID NO: 2252 - DNA, 2070 bp, Arabidopsis thaliana
  Clone ID: AT_T7F6.C1.o14.tg
atggatttattagcaagacccaaaacaaaggtcaaaacagtcgcgaatctcaatacttcctcaatctcttcttcttcttcttcactctctctctctctctcgtcaccaccactaacacttccactgattcatcattctccactgagaaacatttctctcgttaattcaacacttcaagtctctcactctccgtttcttcgaacatgttctatatgcttaaataagatgaaagaaggaggaggacatgctcttttcacagcagagtgctcgcattcgtttcattttcactgcattgcttcgaatgtgaaacatggaaaccaagtttgcccggtgtgccgtgcaaaatggaaggaaatcccaatgcagcacccaagttttgatcttccttatctctttgctcggtcttataacaatgatgcagctattagccttgtccaccgcttacctagatctcgtggagttatgaatcaaggacgaggtctggctcctgagccgtctatgtttgatgatgatgaacggttagagcagcaactcgtgttttctgggaagagctatagtgatgctttggagaacaatcatcctgtaagaatgatggacttgaagatatatcctgaggtttccgctgtaccacgagctgactcccgtgagaagtttgatgtattggtgcatcttagagctgctgccatggttactggaaatgctaactctctcaacaatcagatatctaggtatcctcgagctccagttgatcttgtcacggtgcttgacatcagtgggagcatggctggaactaaactggctctactcaaacgagcaatgggttttgtgattcagaaccttggttcaaatgataggctctcggttattgctttctcttctactgctcgtcgtcttttccctttgactaagatgtctgatgctggtaggcagcgagcccttcaagctgtaaactcagtggttgcaaatggcgggaccaatatcgctgaaggtcttaggaaaggtgtcaaggtgatggaagatcgaagagataagaatcccgttgctagcattatccttttgtctgatggacgagacacctataccatgaaccaagctgatccaaactacaagttgttacttccattgtctatgcacggttgtgaaagcaagcggtttcagatcccggttcattcttttggctttggatcagatcatgatgcttcactgatgcattctgtttctgaaacctctggggggactttctctttcattgagagtgaatctgtgatccaagatgctcttgctcagtgcattggtggacttttaagcgttgcagtgcaggagctacggttagaaatcgagggtatgtgctcagatgttcatctcagctcaataaaagccggaagttaccagagccttgttagtggtgatggtaggtctggatgtgttgatattggtgatctttacgctgatgaagagcgggatttcttgatatctgtcaacatccctcctcaaaaagatggaaacgagacaccacttctcaaaatgagatgtgtctacaaagatcttttgacaaaagaaattgtgacgcttcaaagtcatatgctcaagattcaaagaccagaaaccgttggtcaagaagttgttgtttccatcgaagtggacaggcaaagaaacagatttctagctgcggaggcaatggtaaaggcgagagctttagcagaaagagaagatttagccgcaggtgtcactgccatccagaatttcagagtggcgttggcagagacagtctcagcgaaatcgggtgatgggttttgtgtggctttggacagagagctaaaggaaatgcaagaaagaatggcgagtaggcatgtctacgaggtatcgggaagagcttacattctttctggacttagttcacactcatggcaaagagcaacatcaagaggagaatcaggagatggttcaagctttgtccaagcttattaccaaactccatcaatggttgagatgttacacagatctcaggctacatcgcatcatcatagactcatccagcctttgtttgcatctcaaccaaagccaaggtga

SEQ ID NO: 2253 - DNA, 2292 bp, Arabidopsis thaliana
  Clone ID: AT_F4F15.C1.o210.tg
atggcctttcacgtagcttgtccaattacatgccggaaaatttgcttctgcgttttggggttttctcggaatcttcatggtaatgaagtcaaggatgtgtatctcaaagagatccattctcttcaggagttcgtgcgaaacccctgggatgctgaggtttccaaggacggtaccgttcagatccatgtgcctaagcttgctgttttcgatactggtcctcgcattgcggctagaaatgttggtgttgggagtgattcggcgatggaggttgttgctgcatcatcgaatttggtaccagctaaacgcaccttggtgttgcagaagaaggctgtggaagtttatgctgcgaatgattgttctggcgacttagaggtttcagtcaaagacctcaatgaagaagatcatgatcatcacagtgcaagcataacatgtcacatgtgctatttggttgaagttgggaagagtgagagagccaagatgctttcttgcaaatgttgtgggaagaagtatcatagaaactgcgtgaagtcttgggcccaacatagagatctttttaattggagctcttgggcgtgcccatcttgccgaatctgtgagggctgcgggactttaggggatccaaaaaagtttatgttctgcaaaagatgtgatgatgcatatcattgtgattgccaacatcctcggcacaagaatgttagttctggaccctatttgtgtcctaagcacaccaaatgttacagttgtgagtctacagtccctgggaatggccagagcttacggtatttaactttttgccttgtgatacttgaaatttattcatgtggtttttggggcatacttgttgtgatgcttgtggaaggttgtttgttaaggggaattattgtcctgtatgtttacagggactcggaagcaacgccaatggtgtgttgtgacttttgccagcgctgggttcattgccagtgtgatggaattagcgatgagaaatatatgcagtttcaagtggatgggaatcttcaatacaaatgttctacttgtcgtggggaatcctaccaggtcaaggatcttgaagatgctgtacaagaaatttggaagcgaaaagatatggctgataaagatctaattgctagcttgaaagctagtgctcgggttgttgggcaaactggtggtgcccctcttatgaatcagcctggctctgtggaaagaaaagtttctgaaaaggctatggtcaatggtgaagaagagaagccattgagagttctcaggataaaaagtagcaggcctcaagattcagatagtgagaaatttggaaaacacgctacagagctgagcactgtgaaggcgaaaaagttggtgataagtataggtcctcgaaagacaggggttacaaactctacgagctgcgatgtatcaaagactgcctccaaatcaaatggaaagcaagaaaaattgcaagcagaggaaacgttttcccgggaagagcgtcgcagcttgctgggaaagaatagtgacgaaaagagagggtctcgaggtgaagtaactactttaaaggctgagggcggattcatagggagacactcagatggtaaaggagatttaaatagtggctcgcatgattcatcgcagaaagattcaaggcgattgttgaaattgaaaataaaaaaacataatcccgagggccaagaaagtgaagcccctagcattgtatatgaaagaagtaaatctggtaaaggacataggtcaaagaggaaaagagcatcacctccagctgagaagtcagcgttcaatgaagatgaagatgtatcgctgtcacgagaagacagtttgttagacgaaatgcttgacgctagttggattctgaagaagttggggaaagatgcgaaaggaaaaaaagttcaaatacacgaggcctcggatgattcatgggagaaaggagttgtaagtgaagtaggaggagctggaggcacctcgaagttgatggtgacgctagagaatggaaaagtgaagacggtcgagctcgggaagcaaggggttcgatttgttcctcagaaacaaaagagaacgagaacagaggaaaaaaaaatgttgcagctgtttttcacgatagcgttctcggcggcgccgttaacgttgtacataccgccgataagatgtttgacggtgtttgtggagacgatggaggagatgggaatggaaggtagggtttatagctggagactttttcctcgagccagaattgcttggtcaaggcttctcgattgcttcttctcctcttcacgtcctctctcttcttaa

SEQ ID NO: 2254 - DNA, 1785 bp, Arabidopsis thaliana
  Clone ID: AT_F24A6.C1.o70.tg
atggggataaagtacttgcccgtctccgtagcatcaacagctctcagctttgttggacttcaagtctggacagagttgtctctcgatagacttcgagcagatgggctgattgccaagaacatttctttaggagactctgagcatgcgcttgagctgcttctgggctcttatttcactattgcgctgcttacaaattttgtgctcaatgtgtatattcttctggtactttctctcaagactctattttttggagatttatatgatgttgaaaccaaaaagttggtggagcgacttgccaattatatcatatacaagggtacgtttctaccactggtgattcccccaacaatatttcagggtgtactgtggacagtttggttgactgttctatgtactttaaagatgtttcaagctttggctagagaccggcttgaacgattgaatgcatctccttcttctacaccttggacatactttcgtgtgtattcagtgctattcttggtcctctctgttgatatgttctggataaaactttcccttatgacatacaatacaattggttccgctgtgtatctgttgttactttttgagccatgcagtatagcttttgagaccttgcaggcgctgttaattcatgggtttcagctgctagatatgtggattaaccacttagcagttaagaactcagactgccaaagatctaagtttattgattctatgacagcaggtcgtttcttttctggtgttatgctttgtttttctattagagcccgaaaatgcattcttgtggacatttttggctcactgttggaatggaaaggcctcctcaaccgtaaccttggtttcttcctggacatggctactttggtaatggcactaggtcattatttgcacatttggtggctgcatggcattgcctttcatctggtggatgcagttttgtttctcaacatacgtgcattgctaagtgcaattttgaaacgaataaaaggatacattaaactaagaatagctctgggtgctctccatgcagccctccctgatgcaacttctgaagagttaagggcatatgatgatgaatgtgctatatgtcgggaacctatggctaaggctaaaaggcttcactgcaaccaccttttccatcttggatgcctgcgatcctggttggatcaaggtctaaatgaggtttattcttgtcctacatgtcgtaagcctcttttcgttggtagaactgaaaatgaggtgaaccctcgcacagtggaagtctcaagtgatgagcagttagcccgtcagcttgaaagacaaaacaatcctgtacatgcactagccactggattatttcctgctgaggtgccagattctgtcgaaaatgatacttcgaggaatttaggattggatccaagttggctgcagacatggtcaagtcagggttctgatgtcgctggtccttctaccacttccaggacagttggacttgggcgggttcagatgatgatgaggcatcttgcatctgttggcgaaagctatgctcaaactgcacttgacgatgctgcttggagtctatggccgatgaacccttcacaagcatccacttcttctacaactgtacctcctggtaatggtggaaggacaggtggtctgcatctgagaactgtatcaaacacgacaaatgaaagcttaacaaatatactagctatggccgagacagtgagggaagtcatgccacacgtgcccgatgaaattattttccaggtaaattttaagtgcatattggattatctgtaa

SEQ ID NO: 2255 - DNA, 1749 bp, Arabidopsis thaliana
  Clone ID: AT_MFG13.C1.o16.tg
atggggataacatatttgcacatttccgtggcaacaacagctttgagctttgtgggtttacaagtctggacggagttgtctcttgatagacttagagctgatgggataatcaccaagaacatttctttagggaattctgagaatacccttgagcttcttctgagttctcacactacaattgcattgctggcaagttttgttctcaatatctacattcttcttgttctttctctcaagactctgttttttggagatctatatgccattgaaactagaaaactggtggaaaggcttgccaattacatcatttacaagggcacttttctgccattcgtggttccacgaacagtatttcagggggtcctatggacaatctggttgactgttctgtgtactctaaagatgtttcaagctttggctagagatcggcttgatcgattgaatgcatctccttcttcgactccttggacatactttcgtgtgtattcagcactgttcatggttctctctactgatttgtgctggataaagctttcccttatgatatacaatacagttggttcgtctgtctatttactgttactttttgagccatgcggtatagcttttgagaccttgcaggcgttgttgattcacgggtttcaactgcttgatatgtggatcaaccacttagcagtcaagaattcagattgccagagatcaaagttttatgattccatgacagcaggctcgttattggaatggaaaggcctcctcaaccgaaatcttggtttcttcctagacatggctaccttggtaatggccctcggtcattatttgcacatctggtggctccatggaatggccttccatctggtggatgcagttttgtttctcaacatacgtgccttgctaagttcaattttgaaacgaataaaaggatacatcaaactgagagtagctttaggtgctcttcatgcagctcttcttgatgcaacttcagaagagctacgggattatgatgacgaatgtgctatatgtcgggaaccaatggctaaggctaaaagacttcactgcaaccacctttttcatcttggctgcctacgatcatggttggatcaaggtttaaatgaggtttactcttgtcctacttgccgtaagcctctttttgttggtagaactgaaagtgaggcgaatcctagcagaggagaagtctcaagcgatgaacacttagcccgtcaatttgagagacaaaacaattctgtgcatgcactaaccactggaatgtttccaactgagacgccaaatttcaccgaaagtgatccttggaggaattcagaggtggatccaagctggctgcaaacatggtcagatcagggtgttgatgttgtgggttcctctgcaggctccagatccgttgggctggggcaggttcaattgatgatgaggcatcttgcatctgtaggggaaggttctgctcagactacacttgacgatgcttcttggggtctctggccaatgaatccttcgcaagcatcgacttcatctacatatgttcctcctggtgctggaggaagaacaggtggtctgcatctaagaactgtctcccgtgcagcaaataacatggcgagtatactagcaatggccgagacagtaagggaagtcctcccacatgtgcctgatgaaataatttttcaggtaaatattagatgcatttattggtatgtgtctgctttgacaagcaagctacttgctgggttgaattgctag

SEQ ID NO: 2256 - DNA, 1725 bp, Arabidopsis thaliana
  Clone ID: AT_MIF21.C1.o5.tg
atgggaacatcatctggttcgaatcatcctcaccaaatgttaccaccacgtcaacaacaacgaagtggaggaggacttgaaacagctctttcactagtctcttcagatcaagagccgcgtcgcgagtctccagcggagagtgcgagttctcaagaaacatggccactaggagacactgttgctgggaagaagtcaatgagtcaaaagacagagcctgattctatggaacaaactgtgaatgtgatgcaccatgtttcgaatgcggacaaggtatcggtacgggatatcgctagggaaagagttgagttagttgcagagagaatgcatcgattaccggatgagtttcttgacgagttaaagaacggtcttaagtctatccttgaagggaatgtagcgcagagtgttgatgagttcatgttcttgcagaaggttgttcagagtagaactgatttgagctctgtaacacttgttagagctcatcgggtgcagcttgagatacttgtagcgataaataccgggattcaggcgtttttgcatccgaatattagtctgtctcagccgtctcttatcgagatttttgtatacaagagatgtagaaacatagcttgccaaaatcaactacctgctgatgattgctactgtgatatatgtactaataggaaagggttttgtaacctttgtatgtgtacgatctgtaacaagtttgatttttcggttaatacttgccgctggatcggatgtgacttgtgttcccactggactcatacggattgtgctattcgggatggacagatcaccactggatcctctgctaagaataatacttcaggtccaggagagatagtgtttaagtgtcgggcttgtaaccgaacgtctgagctgttgggatgggttaaagatgtgtttcagcactgtgcaccgaactgggatcgagaatctttgatgaaggaacttgattttgttagtaggattttccgcggaagcgaagatcaacgaggtaggaaactgttttggaagtgtgaggagcttattgacaagattaaaggtggtttggctgaagcaactgctgccaaattgatattaatgtttttccaagagatcgaatcagactctgcgaagagctttgaaaatggagaaggtggacgtttgatggcacctcaggatgcatgcaaccgaattgctgaagttgtacaagagactttgaggaaaatggagatagtggctgaggagaagatgagaatgttcaagaaggcacgcatggctcttgagacatgcgatagagagctcgaagacaaagccaaggaagtttcagaactgaaagcagagaggcagaagaagaaacttcagatagatgagctagagagaatcgtgaggctgaagcaagcggaggcagacatgttccagcttaaagcaaatgaagcaaagcgggaggctgataggttgcagaggattgtactagcgaaaatggataagtctgaggaggaatacgcaagtaactatctgaaacagaggctgagtgaggccgaggcagagaagcagtatctgtttgagaagattaagctgcaggaaaactcaagggtggcatcacaaagcagtggtgggggaggagacccgtcacaggtgatgatgtactcaaagatccgcgatctgcttcaaggatacaatctctctcccaaggttgatcctcaattaaacgagcgtaatcctttcagatccaatccctaa

SEQ ID NO: 2257 - DNA, 2115 bp, Arabidopsis thaliana
  Clone ID: AT_mup24.C1.o120.tg
atgggaagcaaatggcgaaaagcaaaggtggctttaggtctcaatttatgtctctacgttcccaaaacgcttgaagattcttctcctccaagaagatccgacgacgccgtttcactttctccggttattgttcaaagaccatcaacgccgactccttcctcctctggtctccgattacctcgttccatgagcaaatcctcatcaaagaaaacttgtgcgatatgtttgacggcgatgaaagctgggcaaggccacgccatcttcacagcggaatgctctcattcgtttcatttccaatgcatcactacgaatgttaaacacgggaaccagatttgtcctgtttgtcgcgcgaaatggaacgagattcctattcagagccctaatgctaagcctaaatctggtgtcaaaccgataggtcgaccaagggatgatgcctggatgtctatacctccaaggaggtcgtcccctattcaatatacttcacggcctgactgtctaagggtctcctcgatctttaacaccgagcctgcggtttttaatgatgatgaggctctggaacatcaagaccgttctgctgaatctggtttggataaacctggtgttactgggacattggaagttaaaacataccctgagatttcggaagtagtgagatcggtttcattcaaggattttgctgtactgatcaatctaaaagctcctacttcttcaaagtcctcttcaaatccatcttcgtcttctcgggctcctgtcgatctagtcacagttcttgatgtgagtggaagcatggctggaacaaaactggcgttgctaaagcgagcaatgggttttgtgattcagaatcttggtccatttgaccgtctctcagttatatccttctcctccacagcacgtcgtaacttccctcttcgtctcatgaccgagactggtaaacaagaggcgcttcaggcggttaattcattggtctcaaacggagggactaacattgcagagggattgaagaagggcgcaagagttttgatcgatcgtagattcaagaacccggtatctagcatcgtactcttatccgatggccaagatacatataccatgactagccccaacggttccagagggacggattacaaagcccttcttcctaaagagatcaacggaaaccggattccagttcacgcatttgggtttggtgcggaccacgatgcttccttaatgcattccattgcagaaaactccggaggtacattttctttcatagagtctgaaacggttatacaagatgcattcgcacagtgcattggaggtcttcttagcgttgtggttcaagagctatgcgttacaattgagtgcatgcatcatctgttgaggattggatccgttaaagctggaagctaccggttcgataatggtccgaattcgagaaccggatctatcgcagttggtgatctctatgcagaggaagagaggaatttcttggtgaatctcgatatccctattgtcgatggagtttcagatgtgatgtcgttacttaaggttcagtgcgtttacaaagaccctgtgacgaaagagacggttaatttgaataattccggcgaagtaaagattctcaggccaatagtgatgacagaaagaagacctgtagtgtcagttgaagttgacagacagaggatcagattacgtgcggcagaagcaatctctgaagctagggttttagccgagcgcggtgatttgactgaagctgtgtcggttctcgagacttgccgtgggttactgaccgagtccgtgtcgggtcgagccggagatcaattgtgtgtcacactgtgtgcagagctgaaggagatgcaagagagaatggcgagccgtcaagtatatgaggcttcgggtagggcttacgtgctcgccggtctgagctcgcactcctggcagcgagcaacggcgagaggcgatatgagtgattcaactacaacttcttaccagacgcaatcaatggtggatatggtgaatctctcacagaccatgactttcggaatgcctatcgctagctctaattcgagtccgtcggggcagaggaaactccggcaagctctcagttttccggcgaagccaaggcctaggtga

SEQ ID NO: 2258 - DNA, 495 bp, Arabidopsis thaliana
  Clone ID: AT_MYC6.C1.o15.tg
atgatggagtctccaccgtcagataatctggattttttttcgacagtattgtttttatttatatatatggtatttccaattgccattacagtaatctttatttataaactttgcatagatcttagtcagcaacctcctacggaaatagctcgtgagacacaccaaaattctcatccaccacctgatcagcttcaacaagacattgagactggacatgtaacgctgcctcagcctcaacaaaacattgcagtcggatatatgacatggatccatgaaacgacaattttagagtttaaagatataaaagaaggatccaataagattttttgtccaatatgtcttgaagagtttgaagatggccatgagataattcgtataaatatgtgtagacatgtttttcatcgtttttgtattgatccttggctcaatcagaatctaacctgcccgaattgtcgatgctcccttactgcaagaaagaggaaagagggtgagtag

SEQ ID NO: 2259 - DNA, 684 bp, Arabidopsis thaliana
  Clone ID: AT_maf19.C1.o100.tg
atggtctacgaaagtgggaacaagcctggaccagaaaatccgacatttagttcagatttaagcctttcagattctcttgtaaaactgaagaagaagccttgtgaagtatgcggaagtgatgccaatgagcttttgatgatgacttgcttcatgtgcagagatactagggagcatacttattgcgcgagggtgatgtttcaacgtgtgcctcgtttgtggatttgtgaagagtgccgtgatttctcatctgtcgccaacaaaactgctaatgctcaatcatcaagaactattcaagtggaacaagttgtggttaaacaagttcgtattgatcaaactgttccatcaccaagaactaatcaagttgtggataaccaccaagatcctcctattgatcaaactgatccatcatcgacaactattcaagttgtggataatgaaaatttgattgaagctgctccatcatcaagaagtaatcaagttgttgataacaaagattggattgaagctgctccatcattaagatctaatcaagttgtgcctgttgctcctcgtattcatgagtttactacagacgaatcatcctctccggtgtctccattgttcaagtccatgtgggaaagatttccagtcaaacgaccatcacattacattgatctgtcctctgattccgaatctgaagagtaa

SEQ ID NO: 2260 - DNA, 1926 bp, Arabidopsis thaliana
  Clone ID: AT_T6D22.C1.o29.tg
atggagaacccgaacaacttgcgagaatcgaaatcgcatctcaacttgaacgagtgtctcactcttcccaaaacgctcgatccttcatctccttctcccagcgatgcctcaagatcatccgttgacccgaaccgtcccgattcttcttcttctcgccctggctctactccttcctcttctggcctccgtttctctaagggcaggtgcgcgatttgcttgtatgagattagaaaggaagacgggaaggctatttttactgcagagtgctctcattccttccattttgactgtattacctccaacgtcaaacacggaaacaggatttgccctttatgcagaactcagtggaaacaagtccctttgtgtgatgttgactctgtccctacctttgtggctcaaaggggttttgaagatgacgagcctttacctcaaggagatacccaaatccacagtgatggtcatcgttcggatcatcaagccctcgagattaaactcttccctgaagtctctgcactggccaaaccggtctctcgtgctgattttgctgttctggttcatcttaaggctgagggtgtgagtgatgatgctaggcgcgctcgagctcctttggatcttattaccgttcttgatgtgagtggtagcatggatggagtcaaaatggagcttatgaaaaatgcaatgagttttgtgattcagaatcttggtgagactgataggctttctgttatctccttctcctccatggctcgcagactattccctcttagactgatgtctgagacagggaagcaagcggcgatgcaggctgttaactccttggttgctgacggcgggacaaacattgcagaggggctcaagattggtgcgagagtgattgagggtagacggtggaagaaccctgtttccgggatgatgctgttgtctgatggacaggacaactttaccttttctcatgctggggtccgtctgagaacagattacgagtctttgcttcccagttcttgccggattccaattcatacctttgggtttggctcagatcacgatgctgagctaatgcacacaatttctgaagtctctagtggcacgttttcgttcatcgaaacagagactgtgattcaggatgcttttgcgcaatgcattggagggcttctcagcgtcgtgattcttgaacaagttgttgaaatcgagtgcattcatgagcagggcctgaaaatatcctctataaaagcaggaagctacagaagccgtatagcacctgatgcaagaaccgccacaatcgatgtgggagacatgtacgctgaagaagaaagggacttcctggtgcttctagaaattccgtgctgcgacaatgggtctggggaatctgaatctttgtctttgctgaaggttagatgcgtctacaaagatcctgttaccaaagagatagtccatgttgaatctggagaactaagcatccaaaggccaatgaagctaacagggaaagaagtggtgtccatagaggttgacaggcaactaaacaggttccttgtttcacaagctatgtcagaggctagggttttagcggatgggggtgacctgagcggggcagttgggattcttagaaaccgtgagagggaattgtcggagacaccgtctgctcaatccagcgacaggctttgtcaatcactgtcgtctgagttgagtgcgttgcaagaaaggatgactagcaggaggatgtaccggacatcagggcgagcttacgccttctcgagcatgagctcgcattcggctcagagagcaactgctcgtggagattcgacccagggttttagcccggtgcaggcgtatcagacgtctccaatggctcgtatggtgactcggtctcagctactggtgctcgaaagccctactaaaccgtcccctggtcgtggagagcaaagctga

SEQ ID NO: 2261 - DNA, 1011 bp, Arabidopsis thaliana
  Clone ID: AT_F13K9.C1.o14.tg
atggctgttaatcaaagttttccaagtccagttcgcagatggcgagcggatctgcggctgtggttcttcgttgctgtttctttggtggttctggctgtgttggccaattcagaaggattcaatctccactgcaacaacctcgataagacagtcctagagcttcctatgtccggaacatttcttgtcgatgaaatcaactaccaaaagcagcagatttctatcagcgaccctgaaaactgtatggttaaaaggcttttaaccttcaatacttcaggatctcctttctcttatggcttcagtttctactacacgttcttgacctgtccgaatgaggtcgtgataccggtttggtctctgatgtccatcccttgcctaagcaattctacctcctccttcttcgccacgtctaatttgactttttcaaaattgttgccgccttcttgtcagattgtgaaaggactatacgttcctgttgatgtgatatataaagatgtgataactgaagaaaaagggttctctacagtgccctggcttggaaacgtcttgttggaatggagctcgccgaattgcagaggttgtgaaaaggagtccttgagatgtggtttcaagaacaaggcctccctcgaagtcaaatacttggctgatccacccggaatcaccgcaacttgtattgctgctatccgcatttacaattccgagaggtttgtcaatcagagaagacaaaatgcagctattacagccagaaacacaacgcaacaaccacgaggggttgtggtcactacaggtcttgaccaatctacaatagaatcatacaagaaagtggagttgggagaaagtagaaggcttccaggtactaatggtatcatctgtcccatttgtttatcagaatatgctagcaaagagactgtacggtgcatgccagaatgtgatcactgtttccacgtccaatgtatcgatgagtggctcaagattcatagttcatgtcctgtttgtcgcaactcacgctcgtaa

SEQ ID NO: 2262 - DNA, 1446 bp, Arabidopsis thaliana
  Clone ID: AT_K1G2.C1.o18.tg
aagcttatcaccaatggagctccagattacacggaagaccgaagttgtcatatatgtggaaaagaaactggaaacttactttatcattgcgatatttgtaagttcaacttggatatggaatgcgcggttgaaaatcccataccagtcgctctttcagatctcaaggtccatgagcatacactcacactcatgccaagattgatatccttcatttgtgatgcttgtgggacgaaaggcgaccgtgctccttacgtatgtgttcaatgtgatttcaggatgttccatcaaaagtgtgctcgtttaccacgtgtcattcatgttaatcaccatgatcaccgtgtttcgtacaagtatcctcttggtcctggagaatggagatgtggagtttgttgggaagagattgattggtcatatggggcttattcatgctctctttgtcctaattatgctattcattcactgtgtgcaacaaggaaagatgtatgggatggaaaagagcttgatggagtacctgaagaagttgaagatattgagccatttaagaggaatgatgacaacacgatcactcatttcgctcatgaacataaccttagcctccacaatgacgatgaagaaagcagcttatgtggagcatgtgttcatcccatcggctcttacacattctacaagtgttcaaaatcatattgcggtttttttctccatgaaaggtgtgctaatcttgctacaaagaaacgacattttcttagcccacagcctctggatcttagcctccaatggataccatacgtcttagggagatgtcgagcttgtcgtcaaatgtttagcgaaggattcatctacaattcatatagggataagtttgacttattgtgcagttcgattaccgtgccttttattcatggaagtcatgatcatcatttactctactacaaactacgatatggtcaagtgaagacttgtcagaactgcggtattgatgaaacagaagtacttggttgtagcaaatgcaattattatttggatttttgttgtgccactctaccaaaaacggtaatgcttcccagatacgatgatcatccactcactctttgttatggtgatgaaaacgcaagcggcaaatattggtgtgatatttgtgaaagggaaacaaatccaaaaacttggttctatacttgtaaagattgcggagtcacgtttcatatattgtgtgtagttggagatatcaggtatgccaaaccaggaggaaagattaacggcgattatgaattgctggctaacaatagctcttcacggccgctttgcagcacgtgtcattgtcgttgcccaggtcccttcattcttaataaggaaagaaacaacatattcttttgttcttattattgtctcgggctcagccgggagcatgcgtactcatcagtggacgtgtgccctccatgggcaatttga

SEQ ID NO: 2263 - DNA, 2079 bp, Arabidopsis thaliana
  Clone ID: AT_F9K21.C1.o110.tg
atgagtttcaagataaaaggacacccgcatcgtgtatccctcgttaagaatcatgatggtttggaatgtgatgcttgcgatcaatcctatggtgatgcctactcatgcggtgaatgcaagtttactgttcataagaaatgtacgtttttgttcgaagtcgtgccagagatattcgaacatccttctcatgttggtcattgtcttaaacttctcacaactggagctccagatcataccgtacccaaatgtcatctttgcggtaaaaacaccaagcgtcttctttatcattgcagagattgtaaactcaatgtggatatcgattgcattattgatcccatgtgtgcccaagccgatctgaatatgccgtggcaccaccaccctctattcatgggtaattttgcgactaatatgacttgcgatgtttgttatgacaaccacgtagatggctatatctgtctttgctgtcggttgttcgttgggtgggtatgcgctgccctagtaattgactcaccagagatcactcatccttgtcacaccaaacaccctctcaagcttctcaccgaaggagcacccacttacactgatccaaaatgtcatctatgcggagaagacactggaaaattcatctatcattgtgatatctgtaagttcaatttggatttggtatgcgcaaaaacaaaaaccccaccagttgctctttcaaatctcaaggtacatgagcatacactcaatcttatgccaagattgatctccttcgtttgtgatgcttgtgggacaaaaggtgatcgggctccttatgtgtgtcatcaatgtgatttcatggttcacaaaaagtgtgctcatttaccacgtgttattaacgtcaatcaccatgaccaccgcgtttcgttcaagtatcctcttggtcttggagaatggcgatgtggagtttgttttgaagagattgattggtcatgtggtgcttattcttgttctctttgtcctcaatatgctattcattcactatgtgcaacaaggaaagacgtatggaatgggaaagagctcgatggagtacctgaagaagttgaagatatcgagccattcaagaggaatgatgacaacacaatcactcatttcgctcatgagcataacctcatgagcctcagcaaagacggagaagaaagtagcttgtgtggagcatgtgttcttcccattggttcttacacattctacaagtgttcaaaatcaaattgcagcttcattctccatgaaaagtgtgctaatatttctaagaagaaacgacattttctgagctcagaacctctcattctttgcttcgaaagcattatcgacgatgactttttatgcagagcttgttatcaaatgttttgtgaaggattcttctactcttctaaaggtgtgaactttgacttaatatgcagttcgattacaatgccttttatccatggaagtcacgatcatcacttactctacgtaaaacaagaagaaggtaacaagaaaacttgccacaactgcgacaacgaacgtgctaaagtcctcctaggttgtatcaaatgcaattactttttggatttccgttgtgctactatgccattaacaataatgcttccaaggtacgatgatcatccactcactctttgctatggtgaagaaaaggcaagcggcaaatattggtgtgatatttgcgaaagagaaacaaatccagagacttggttctacacttgtaacgattgcggtgtcacattgcatacattttgtgtacttggagatatcagaaatgccaaagcaggaggaagtttcagacaccatggtgaacttgaattgctacctaacaatagatctacacgaccactttgcaacagttgtcatagtcgttgcccaggttcattcattatgaagagttatgacggcggggaagtttattgttcttgttattgtgtctcatctcagcttgggtatacatacaagggtgctgatacatgccctccatgggcaatatatgagcttgaattgattgttgttattcacgtcaattatttgtctacctatattctacattatttgacagctataaaatga

SEQ ID NO: 2264 - DNA, 3132 bp, Arabidopsis thaliana
  Clone ID: AT_MRH10.C1.o14.tg
atgtacatttcgtggatgcagcatcgtcattcctcattctcggctaagatttgcaaagtctgtggcgatgaggtcaaagacgatgacaatggtcagacttttgtggcgtgtcacgtgtgcgtttacccggtttgcaaaccttgctatgaatatgagcgtagcaacggtaacaaatgttgccctcaatgcaacactctttacaaacgccacaaaggctctccaaaaatcgccggagatgaagaaaacaatggtcctgatgattcagatgatgagttgaatatcaaatatcgccaggatggttcctccattcaccagaattttgcctatggatcggtactatttgactttgataagcagcaatggcgtccaaatggtcgagccttttcttccaccggaagtgtgttggggaaagactttgaagctgagagagatggctacacagatgcggagtggaaagaacgtgtagataaatggaaagcgaggcaagagaagagaggtttagtgactaaaggagaacaaacaaacgaagacaaagaagatgatgaagaagaatacctagatgctgaagcaagacaacctctctggagaaaagtcccaatctcttcgagcaaaatcagtccttaccgcatcgtgatcgttcttcgccttgtgatcttagttttcttcttccgtttccgtatcttgacaccagccaaagacgcataccctctctggcttatctcagtcatctgcgagatctggttcgctctctcttggatccttgatcagttcccgaaatggtttccgattaaccgagaaacctaccttgaccgtctctctatgagatttgaacgggatggggaaaagaacaagcttgcaccggttgatgtgtttgtcagtacagtggatccgctcaaggaacctcccataatcacagccaacacaattctttcgatcttagccgttgattacccagtgaataaggtgagctgctatgtgtctgatgacggtgcatcaatgctcctgttcgatacattgtccgaaacttccgagtttgcaaggagatgggttccgttttgcaagaagtacaatgttgagccaagagctccagagttttacttctcagagaagattgattacctaaaggataaagtccaaactacattcgtcaaagatcgcagagcaatgaagagagaatatgaagaattcaaagtgaggatcaatgctttagtagctaaagctcaaaagaagcctgaagaaggttgggttatgcaagatggtacaccatggcctgggaataacactcgtgatcatcccgggatgattcaggtgtatctcggcaaagaaggagcattcgacattgatggtaacgaattgccacgtctcgtgtatgtatcaagagagaagcgtcctggttacgcacaccacaagaaagctggagccatgaatgcaatggttcgagtctctgcagtactcactaatgctccattcatgcttaatctcgactgtgaccattacatcaacaacagtaaagccataagagaatcaatgtgctttctaatggatccacagcttggtaaaaagctctgttatgtccaattcccacaaagattcgacggaatcgatcttaacgatcgatacgccaacagaaacatcgtcttcttcgatataaacatgagaggcttagatggaatccaaggaccagtctatgtaggaacaggatgtgtattcaatagaccagcattatacggatacgaacctccggtatcggaaaaacgaaagaaaatgacatgtgattgttggccgtcgtggatctgctgttgttgcggcggaggtaaccgtaatcacaaatcagattcgtcaaagaagaaatcaggaatcaagagcttgttctcgaaactaaagaagaagactaagaagaagagtgatgataaaacgatgagcagctatagtagaaaacgatcatcgacggaggcgatttttgatttggaagatattgaggaagggcttgaaggatatgatgagcttgagaaatcttcgttaatgtcgcagaagaattttgagaagagatttggaatgtctcctgtgtttattgcgtcgacgttgatggagaacggaggattgccggaggcgacgaacacgagctcgttgatcaaagaagctattcatgttattagctgtggttatgaagagaagactgaatggggcaaagagattggatggatttatggatcagtaacagaagatatcctcactggatttagaatgcattgtagaggttggaaatcagtttactgtatgcctaaaagaccagctttcaaaggatcagctccgatcaatttatctgatcggttgcaccaagttcttagatgggctcttggttccgtcgaaatcttctttagtcgtcattgtcctttgtggtatgcttggggaggcaagcttaagattctagaacgtcttgcttacatcaacacaattgtttatcctttcacttctattcctctacttgcctattgtactattccggccgtttgtcttctcaccggcaagttcatcattcctacgatcaacaatttcgcaagcatatggttcttagctctgttcctatcaatcattgcaacggctatcttagaactccggtggagtggtgtaagcatcaatgacctctggcgtaacgagcaattctgggtgattggcggtgtctcagctcatctcttcgctgtctttcaaggtcttcttaaagttctctttggtgttgacactaacttcaccgtcacgtcaaaaggagccagtgacgaagccgatgagtttggagatctttacctctttaaatggacaacccttctcatccctccgacaactctcattattctcaacatggtcggtgttgttgccggagtttctgacgctattaacaatggatatggttcttggggaccgctttttgggaaactgtttttcgcgttttgggtcattgttcatctttatcctttcctcaaaggtttgatgggtagacaaaaccgaacaccgacgattgttgttctttggtctatccttctcgcttcgatcttctctttggtttgggttcggattgatccgttcttgccgaaacagactggtccgttactgaagcaatgtggcgtcgactgttaa

SEQ ID NO: 2265 - DNA, 1743 bp, Arabidopsis thaliana
  Clone ID: AT_MJB20.C1.o16.tg
atggctgctaatgaagaagagccaatatgtcgtttgtctcatccaactcactctcacaccctctcccgtagagccggaagaatccctccatcgggttgcttcgcatgcgacaaagaagaaccctcaccatgttctaccttccattactcctgcaccacttgtgatgtggagttccacgatatttgtcacgtgtatccgaggaagctcacacacccttatcaccttcaacatcctctcaccctcaccactcaaaacactgaaatagagatcatatctaaaaaccccgaatatggttacatattcaaaaattgtaattggtgtggagatgatttgagagatggatctcaattctatcattgttctatttgtaacttttgtttagatctctcttgctcccaaaactttccaactcttacaattacaaatccaaaaagccaccatcattccctctttttatttccttggcccctcttaattccatgtgaagcttgtgagctggttagtttgttggaaccaagttatacttgtttccaatgcaactatttggttcatgagagttgtatcaacttaccgcgtgtcataaaaataacgcgtcacccacatcgtctctctcacactcctttccttccacctacaactccatcttgtcgagtttgctacaagacagtcgacatcaaatatggccagtattcttgcgatcatgaaggttgctcttatgttgcccattccaaatgtgcaacacatatgcacgtttgggacggaagagaactcgaatgggaaccagaagaactcgatgaaactgaagatattgtgccatttaagaaagtgggtgataatatgatcaagtatttttgtcatgaacatcaccttaagcttgagaagtatgatagtgtccgagacgcaaagaaacaatgtcaagcgtgcatccttcgtatcgactcttatgatttctacaactgtgtgcaatgtgacttctttcttcacgaggtatgtgctggtcttcctcgaaaattggctcatgcattgcataagcatcctcttgttctagacccttctcctatactcgattacagttccacaagttgttcaacttgcgcccgtgagtccactggtttcaggtacaaatgttcaaaaactgattgcgatgatgagataacaattcagatagattttcgatgcattttagttcctgattgtttcacccacaaaagtcatgaacatcctttattcatctccacatcatattctagaaaaggaaacatttcttgtgatggttgcaaagatagtgttcgtgatgagtattatctgcaatgtactatttgctcatttgctatgtgttatcgatgtgcgaccattccatatgagttatactacaaatatgatgcacatcttctgtcgctttgctatggagaagatgcagagaaagcatattggtgtgaagtatgcgagaaagaattgaatccaagagaatggttctactcatgcaacaaatgttgtatcactatccaccttgagtgtatattcggatcttccgtttatattaagtcaggttacacattctatttcggctctgcatcgatgaaaattcttgggaacaatagtcatactcgaccgatttgttataagtgtgatcatcgttgcccggattcggtgtactacaagttgtttgagaaggttttttgttcctggctttgtgtttggacatctgacattgaaagttttgacaatgtcgaaaaggaataa

SEQ ID NO: 2266 - DNA, 3267 bp, Arabidopsis thaliana
  Clone ID: AT_F7D8.C1.o9.tg
atgaacactggagggagactcattgctgggtctcacaacaggaatgaattcgttctcattaacgccgacgacactgccagaatacgatcagcagaagaactgagtgggcaaacttgtaaaatctgtagagatgagattgagttaacagataatggtgagccatttatcgcttgcaacgaatgtgctttccctacgtgtagaccgtgctatgagtatgaaagaagagaaggaaaccaagcttgtcctcagtgcggaacccgatacaagcgtattaaaggtagtccaagggtcgaaggggatgaagaagatgatgacattgatgatctggagcatgagttttatggaatggatcctgaacatgttactgaagctgcgctctattatatgcgtcttaacactggtcgtggtactgatgaagtgtcacacttgtattcagcttcaccaggctctgaggttcctcttttgacgtattgtgatgaggattctgatatgtattcggatagacatgctcttatcgtgcccccatctacgggtttggggaacagagtccatcatgtgccatttacagattcttttgcatctatacacacaagacccatggttcctcagaaggatcttacagtttatggatatggaagtgttgcatggaaagaccgtatggaagtatggaagaaacaacaaatagaaaagctacaagtcgttaagaatgaaagagtaaatgatggtgatggcgatggattcattgttgacgagctcgatgatcccgggctaccaatgatggatgaaggaagacaacctctgtcacgaaagctacccattcgttcgagcagaataaacccttataggatgttgattttctgtcggctcgccattcttggcttgttcttccattataggattctccatccggtgaatgatgcattcggcttgtggttaacatcggttatatgcgaaatatggttcgctgtgtcttggattcttgatcagttcccaaaatggtatcccatcgaaagagaaacatatctcgacaggctttctctaaggtatgagaaggaagggaagccatcagagttagcgcctgtcgatgtctttgttagtactgtggatccattgaaagagcctccactgattacagcaaatacggttctgtctattctcgctgttgattatccggttgagaaggttgcatgttatgtatcagatgatggtgctgcaatgcttacatttgaagctctctcttacacagccgagtttgcaagaaaatgggttcctttctgtaagaagttcagcatcgagccacgcgctcctgaatggtatttttcacagaagatggattacttgaagcataaagtcgatcccgcttttgttatggaacgccgtgccatgaagagagactatgaggaattcaaagtaaagataaatgcattggtttctgtatcacagaaagttcctgaagatggttggactatgcaagatggaactccttggcctggaaacaatgtccgggaccatccaggaatgattcaggttttcctgggacacagcggagtttgtgatatggatggaaatgagttacctcgtttggtgtatgtttctcgtgagaagcgaccgggatttgatcaccataagaaggctggagctatgaattccttgatccgggtatctgctgttctctcaaatgctccttaccttcttaatgtggactgtgatcattacatcaacaacagcaaggcaattagagaagctatgtgtttcatgatggacccgcagtccggaaagaaaatatgttatgttcagtttcctcagaggtttgatgggattgatagacacgatcgatactcaaatcgcaatgtggttttcttcgatatcaacatgaaaggtttagatggcatacaaggaccgatatatgtggggaccgggtgtgtcttcagaaggcaagcactttatggatttgatgcaccaaagaagaagcaaccaccaggcagaacctgcaactgttggccaaaatggtgctgtttgtgttgcggtatgagaaagaagaagacaggtaaggtcaaagataatcagagaaagaagcctaaagagacttcaaagcagatacatgcccttgagcacatagaagaaggccttcaagtgacaaatgctgagaataactctgagactgcccaactgaagctggagaagaaatttggtcaatcaccggttttagtagcttctactcttctgctaaatggtggagtgcctagcaatgtgaacccagcgtctttattgagggaatccattcaggttattagctgtggctacgaagagaaaaccgaatggggaaaagagattgggtggatttatggctcggtcactgaggatatcttaacgggtttcaagatgcattgccatggatggagatctgtatattgtatgccaaagcgagcggctttcaaaggttctgctcccattaacttgtcggatcgtcttcatcaagttctacgttgggcacttggctctgtcgagattttcttgagtaggcattgccctatttggtacggttatggtggtggtttaaaatggttggaaagattctcttacattaactctgttgtctatccttggacatcccttcctttgcttgtctactgctcacttcccgccatttgtctactcaccggaaaattcatcgtccctgagataagtaactacgcgggtatactcttcctgctaatgtttatgtccattgcggtaacgggtatactagaaatgcaatggggcaaaataggaatcgatgattggtggagaaacgagcagttttgggtcattggaggagtctcttcgcatctatttgctctgtttcaaggtttactcaaagttcttgcaggagtcagcacgaacttcacagtcacatctaaagcagcagatgatggagaattctcagagctttacattttcaaatggacatctttgttgattcctccgactactctgctgatcattaacatcgttggagtcattgtcggagtttcggatgcgataaataacgggtatgactcttggggaccgctttttgggagattgttctttgcgctttgggtgattgttcatttgtatccgttcctcaaagggttacttgggaaacaagatagagtaccaaccattatattggtttggtcgattcttcttgcttccatcttgactctcttgtgggtcagagtcaatccgtttgtgtccaaagatggaccggtcttggagatctgtggtcttgactgtttaaagtga

SEQ ID NO: 2267 - DNA, 1737 bp, Arabidopsis thaliana
  Clone ID: AT_MDF20.C1.o24.tg
atggattctggtggccataaactccctcttcaacctcttttttcatgtcctagttcacgtatcaattttcataagcgcaatcacattgatggtcatgagactcaagagttttatccattcaattgttcccctcacttccccagcaaaagaaccagtactgatcaagaaggcgaatctttccttgattgggacaacccttatatctgtaagcttcctgtagtccttctcttttggtgcaacactgaacaacctgatccagaagattttcggtgtggtgcatgcgggcgtccaacgctcagtgcaacctattatgcatgccttatatgtgaaaaaatgttccacaaagaatgcgtagagtctccattcgagatcatacatccttcccacccttttcactctcttcgacttaccagttctccacagagtcaaaactgcatttgttgtcaccattatttcaacgacattttttatcactgttctacatgcaagctcattatgcatccgatctgtgcgatgaggtcaataccctttgctgtagaccacccaaaaagccattcccaccctctcaccttttaccctgcacaagcttctttagtttgccatttttgtgcctcgattaagaagtttgatcccacatatatttgtatccaatgtgtcttcgcaatccataaagattgtcggggtttcccgcatgtcatcaggatatctcgccaccaccaccgtatatcttttacctcttctcttctatctggaaccttttcatgcggagtctgcagagaacaagttgacaacaattatggtgcgtatgcttgcaataaatgtgatggttattttgttcattcaaaatgtgcaatagatccaaaggtgtgggatggaaaagaactcgaaggagtaccagaagaaaatgataagatagatgatggtgagccgttcaagaggatagctgatggaataatactccacccttttcatagtcaccatctgcaacttgagatctttagagcttatgacgaaaatacgtattgtcgagggtgtgcgcttccgatctatgaaggtcaattctattcatgcatggaatgcgactttatcctccatgaaagttgtgcaaatgctccatgcatgaagcgacatcccttacatccatatccacttacacttttaaacacggcatctcctggtgaggaaagtgtaagccagtgtactgcatgtaggcgtctggttgttggcttctactattttcattatttagataaacatcacgaacgtatagcactagacttacggtgtgcctcgattatcgaaccatttgaattccacggccacaaacatcccttatacctaccttgggaggactcaaataaagtgacgcactgtcaaatctgcaaagaagattttgatatggatagtttggaagtaaattgcatggagtgcgattatacgatatgtttccattgcgcttccttgccagaaaaagtaaggtataagcatgatagtcattttctcatgatctgtgatggaaaagaggcaagtgataaaccatactggtgtgagatctgtgaaggaaaaatagaagttgtaaaagaaaaagcgaattcgggggacaaaaaaaaaaaaaggttgccaacaaatagagacaaaaaagaaaggaaaatttataaatgcaatgactgctgtaccactcttcatgctgaatgtttacttggccagacatttacttcaaatctgctcaaacaatag

SEQ ID NO: 2268 - DNA, 684 bp, Arabidopsis thaliana
  Clone ID: AT_T30B22.C1.o14.tg
atgggaatcggtgaagaaagcacaaagcctatttgggggagcgtgagccacacgtcttcaggctacgctctcaacggcaaaatcatgctctcctccgtgatcgttctattcgtcgccgttattatgatcctctgcttccacagctacgcccgttggttattccgtcgtcacaaccgtcgcattcgccgccgtattcgttctcacctccgcactctctccgcctcaccccgagaccaagctctcgaccaggctgttctcgacaagattccgatcttcgtttactcctccaagaatccaccaccaccagaagagaaggaggagtgctccgtctgcttgtcggagttcgaggaagaagacgaaggccgtcttcttcctaaatgtggccactcttttcacgtcgactgcatcgatacttggttccgttccagatccacttgcccgctttgcagagctccggttcaacccccgtttcaggtcattgaaaccggttcttcttcttcttcttcgccgttgacatttccgacggagggttgcgagagagaaccgattgacctcgccggtatcattgtggatatttccagagaagttgaatttgaaggctcaaatccgggtctacccatcgaaaacggatcaaagtttccgggtagtcgggttttgtctttaaaaaggctatggagcatctga

SEQ ID NO: 2269 - DNA, 1701 bp, Arabidopsis thaliana
  Clone ID: AT_MLP3.C1.o23.tg
atgggcacatcatctgggtccaatcttcctcaccagatgctacctccacgtcagcaactacaaacatctctttcgcttgtatcttcagatccccacttgtcacggtctaattctggcattgtgcgtgaatcaccagctgaaagtgctagctctcaagaaacttggccaacctcaaaatctattatgggaaggaagacagatagcggaaagacagggcctgactctcatgatcaacatgtgatccgccatgtttccattgctgataaggtatcgctacgggacatagctagagagagacttgacatagtcgctgagagaatgcatcgattaccagaagaatatctcgaggagttaaagaatggtcttaaggctatccttgaaggaaatggtgcgcagcctatagatgagtttatgtttctgcagaagtttgtccagacgagatctgatttaacttcaaagacacttgtcagggctcaccgagtgcagcttgaagttcttgtggttataaacactggtatccaagcattcttgcacccaaacatcaatctctctcagtcatcactcatcgagatctttgtgtacaagagatgcagaaacatagcttgccaaaacgaactcccggctgatggttgtccctgtgagatatgcgctaataggaaaggcttctgcaacctgtgcatgtgtgtgatatgtaacaagtttgactttgcagtcaacacatgccgctggattggctgcgacgtgtgttctcattggactcatacggattgtgctattagggatggggagatttcgatgggagtttctcccaagagcgtatctgggatgggagaaatgctgttcaagtgtcgagcgtgcaaccatacttctgaattgctggggtgggtgaaagatgtgtttcagcactgtgcaccaaactgggatagggaatctttaatgaaggaacttgacttcgttagtaggattttccgtggaagcgaagatacaagaggccggaaactcttctggaagtgtgaggagcttatggagaagattaaaggtggactggctgaagcaacagcggccaagttgatactcatgtttttccaagaaattgaattggactctccaaagagccttgaaagcggagaaggtgggggtacgatagcacctcaagatgcatgcaaccgaattgctgaagttgtaaaggaaacactgaggaaaatggagatagtgggtgaggaaaagacgaggatgtacaagaaagcgcgaatggggcttgaggaatgcgagagagaggtagaagagaaagcaaagcaagtggcggaactgcagatggagaggcagaagaagaaacaacagatagaagaggtggagaggatagtgaggctgaagcaagcagaggcagagatgtttcagttaaaagcaaacgaggcaaaagtggaagcagagagattggaaaggattgtgaaagcgaaaaaggagaaaacagaagaggaatacgcaagtaactatttgaaactgaggctgagcgaggcggaggcagagaaagagtatctgtttgaaaagataaaagagcaggaaagtggtgggaatggtggtgaagcgtcacaagcagtgatgtactcaaagatcagagaaatgctgcatggatacaatgcatcgtcgccaagggtagatccaagatcaaaccagcgaaatcctttcagatccaatccttag

SEQ ID NO: 2270 - DNA, 564 bp, Arabidopsis thaliana
  Clone ID: AT_T6K21.C1.o30.tg
atgacatcgtatgtgcagcatgatggtgatggcgatagtgttaaaaatgcagaagttgcagaggctatactcaatgataacaatgaactgtctcatattgagcgagaaataactgtttgtgatacatgtggtgatcaaggatatgaatatttacttgtgatctgttgcaactgcggagttggtgcagaacatacttattgcatgatggaaaaaatagataaggttcccgatagttggtcttgctatgactgcactaaagaggtagatgaaatgcgagaagaaaaaggaaatgaagaaaccagctctagaaaaaggaaagcagatgctgttactaattttttcgagacagcagaaaaaacatcatctcaaagacaatttgatttgttgaacacagaaagttatcctaaaattagaaattttgatttgaacgtggaccctaacataaaactaggtgaaatctctggtatagatatggacaaagtacatgacatagatctaaatagggatcctaacatagaactaggtgaagtccctggtatagatataaacaaagtcatgacatag

SEQ ID NO: 2271 - DNA, 1971 bp, Arabidopsis thaliana
  Clone ID: AT_T1E22.C1.o90.tg
atgaattcaaattcagtcggtgtatttcgtgagaaggaaatcgatgggaaaccattccacacatacactttatcatctcaaacagacaccacaaccccttcttcttccggtgaaacagccattgatggcgacgaccatctctctcttcaacaacctcttttcctctgtccttctttacgtcttaaagctgacgagataaactattcttatagtgaaattctaccgttcaatatttccccgtacttccccagcataagaggcgctgatcaacaagtccagcatttgcttgattccgacagccaacaagtccatgatttgcttcattccgacaacagccatgatgatgatggtgatgaaatctgtaagctcccagttgtccctatctattggtgtaacagtaaagaaattgagttcgatcaattcaattgcggtgcatgtgaacgatcaaagattggcacagactattatatctgtctcacgtgtgatctaatgttccacaaagaatgcgtggagtctccccttgagatcaaacacccttcctatccctttctttcactcaaactttacactcgtcacgagcagctcatgagttgcatgtgctgtaaacacccttccaatcttattttttattattgtcccacctacaaattgagtttgcatcccgattgtgcgatgaagccaatatccatttttatagaccacccaaaaaggcatccccaccttctcaccttttttcccaaacaagcttccttactttgcgatgtttgtagcctcattaaagaagctttccccacctatgtgtgtcttcgatgtatctttgtagcccatcgagattgtatctatttcccgtatgtcattaaaatatgtcgtcaccaacaccgtatctcttttacctcttctcttccatctggaaaatggtcttgtggagtatgtcgtaaaaaggttgacaacaattgtggtgcatacacttgcaacaagtgtagccactattttgttcatacaagatgtgcgttacgggaagacttgtgggatggaaaggatctcgagggagtacctgaagaacctgaaataattctcgagccatttgagacgatagctgatggaataatactccatttttctcatggccatcatctgaaactcaagaccagtggagtttacaacgaaaacattatttgtcaagcgtgcatccttccaatctatgagggtaattattactcgtgtatggatcaatgcaacttcatcctccacgaagcatgtgcaaatgcttctcgcaagaaagatcatgccttacacagtcacccacttacgctaaaagttgtctctgatatacagaatgaatactttaaaggttacttcaggtgttccgcttgtgatcgtgaaagttgtggcttcatctatgaggaggatcaatacagcatagacatacggtgtgcctctgtttctgaaccatttgattatcaaggccatgagcatcccttattccaagctttagaccgaaaagaagaaagggaggcaatttgtcaaatttgccgaaaaaagtatggtcgaaaactaaattgcatcgaatgcaattatattatatgtttcagttgtgctactttaccatacaaggcaaagtataagcttgacaaacatttcctcacatttcgggaaggggaagagggaagtgatcagttagactggtgtgaggtatgcgaaaagaaattagaatactcaagagaaggtgggttctatgcgtgtgatgactgctgcaccactctccatgttgattgtttgcttggaaaagagatgtatatgttgaatcctggtcatactgtaatggcttataggtcaaacatttatattcttcccaacaataccatgactcgaccattctgccaacttcataaagaagatcgttgtccacacaaagtaattttcaattggcatgacatgacattttgctcttacagttgttcgatggattag

SEQ ID NO: 2272 - DNA, 948 bp, Arabidopsis thaliana
  Clone ID: AT_F6F3.C1.o4.tg
atggtgagtgatctcccgcttgatgaagatgatatcgctctcctcaagagtccttattgtgatgatggtggtgatgaggacgtcaactctgctccaaacattttcacttatgataatgtgcctcttaagaagcgccactaccttgggacaagtgacactttcagaagctttgagccgttgaacgaacacgcatgtattgtatgcgatattgcagacgatggtgtagtaccttgttctgggaatgaatgccctctcgctgttcacaggaagtgtgttgagcttgattgtgaagatcctgcaaccttttactgtccctattgttggtttaaggagcaagctactagatccacggctttgagaacaaggggtgttgcagctgcgaagacccttgttcaatatggatgtagtgagctgaggagtggagatatagtcatgacgagagaaaacagtcaactagagaatggttctgataattcactaccaatgcaactacatgagaaccttcatcaattacaagaactggtcaagcaccttaaggctcgaaattcccagttagacgagtcaacagatcaattcattgatatggagaaatcttgcggagaagcttatgctgttgttaatgatcagccaaaaagggtactatggacagtcaacgaagagaagatgttgaggggagtggagaaattttctgatacaatcaacaaaaacatgccttggaagaagattttggagatgggaaaaggtatattccacacaactcgtaattcctccgatcttaaggacaaatggagaaatatggtcgagattgacatcatcatcgtcgtcgcagagatcggagatcaaaatggagagggaaagaaacgcaggagtgatgaagaagatgagtccaacaggaaccatccaaagattagaatttgtgggatggtatttgtaaagccaataacttag

SEQ ID NO: 2273 - DNA, 2061 bp, Arabidopsis thaliana
  Clone ID: AT_T6H20.C1.o160.tg
atggaaaaagtggtgctacgggttcatgaccatcctttgttaccctttgaacgcttttattttggccgttgttccgggtgctcacgtgaaggctacttttatggaggctaccgttgcaatgagttggcgtgttttgcggtgttccataaggagtgcgctgagtccaaacccgagatcagccaccatgcccatcccaagcatctgcttaagcttggcaatagacgtcaacgttgtcatttgtgtgaacggccggtgggaattggttatttttgttcgatatgtgactttggtatgcatttggtttgtgcgaagtccccaccactctcacttcagccacaactctctagtattgagaattacaaggtgcatgaacatcctcttaaacctttcaaaacagcatggcttgcagaaactggcaattgcaaagggtgtaactacattatcggcaatggagatagcgctcctttttatgaatgtcgtcggtgtaaactttacattcatgtgacttgccttgagctctttttcaccacagatgcacgccacaactctcatctcaaacaccctctcaaatatctcaaaaatggacccccgagctacgccgaccataaatgccttctttgcggaagagagtttgaagatcaacaaggccaaaaatatgagctttatcactgtgatgtttgtaacttcagcatatgcatttcttgtcagggaaacccaccaccactagttgttgttactccgaagacccacgagcatcaacttcacctcattccaagacttcttgattttacttgcaatgcttgtgggacacaaggtgaccgaagcccttatttttgtcttcaatgcaatttcatgattcatcgaggttgtatcgacttaccccgcatcataaacatcaaccgccatgatcatcgcatctcttacatttgtcatctcggacaagggaatttgaaatgcggagtttgccgcaaaacagtggatgggttctacggggcttattcctgctcgaaatgttctagttacgttgttcattcattatgtgcaactagaaaagatgtatgggacatggtagaactagaaggaacaccggaagaagaagaaattgcgccattcgaggtggttgatgagaacacaataaagcacatgagtcatgatcatgatttaatattcaacaatgatggtataaatctccatgaaagcaagctttgtgaagcatgcgtctcccagatcaatactgatccgttctatagttgtgagctatgcggttttattttacatcaaacatgtgctaatatgcctaggaagaaaaggcatgttttgtgcaacatacccttctctctacaaacagacgatagcaaggattcttcacgcctaagaagaaaatgtagtctttgtctccaacatttcactggatttgcgtataatctgcatattgcgtataactcgcgtaccgaagttatggatatacgatgtggttcgatatttgaaccatttgttcatgaaaggcatccacatcctttatactacaagttcttcaccttttcggcggttgcgaagtgcgacatctgtcacataacaagaaggcatttgttatgttgtgaagagtgtgactttaggttggatttcaggtgcgcaactttaccaaaaaaagtaatgaagcaaaggtacgatgaccatccacttttcttgtcttatggtgaaaataatgtggatggtgaatactggtgtgacgtatgtgaaaaaagggtagatgcaaagacatggttctatacatgtgatgcttgtggggtcactttacatgtttcttgcgttgtgggtgacttctcctatcatatgccaggaccattatcaaccgtagttagcgaatacaaaatggtaccgcccgcggtagtaagcttatacaaagtggtgccaaacacttcgatttgtagaccactttgctccaggtgtcacactagatgcaaactcccttgcattcttgaaacctccgaggatggtgttaatgtttacttttgttctaatgattgtcataaaaatccttgggagtcgtcgtattattag

SEQ ID NO: 2274 - DNA, 1362 bp, Arabidopsis thaliana
  Clone ID: AT_F5A8.C1.o9.tg
atggaaaatgtggttgcaactgtgagtggttatcatggatccgataggtttaagctcatcaagcttatttctcattctggagcaagttatgttggggcaatgtcaagatctattacacatttggtgtgttggaaatttgagggcaaaaagtacgatcttgcaaagaagtttggtacagtagtagtgaatcatcgatgggtggaagaatgtgtaaaggaagggagaagagtttccgagacgccttatatgtttgatagtggagaagaggttggacctttgatgattgaactacctgcagtttctgaggaagctaaagtcactaagaaagtgaataaggcttctgaaacttttgataaatactttagtaatggtggagaaaaccggagtggctccacttctgagcttgccacttggatggagaaaaatgtagaagcaaacagacactcagtgcgattaagaacaaagaggccgagtagtattcttgaaaacaaggaaaacagtggtgtggcagaatcttcacggaaaggaaaaaagcgggtagtaaagcaacgctcttacagaaaccttatcgaccttgaatctgatgaggaatctgataataaccatcatgacaactctgatgagaaccaaaatgagactcaggatcatagagagcctgctgatgaaaatgtgaggggttttgttttcgaacaaggagaaacatcagctcttcgacatcctggagacttggcaacaccaaactgggatgtagatgaaatagaggagtctgagaattggagtcattcagctgtttttaaacgccctagatcatttagtccagagataaaaccacaagatgatgatgagtcaacaagagaagagacagaagcaactgagaaggctcctgcacaagtttcttgtatcatatgctggaccgagttcagttccagtagaggcattctcccttgcggccacaggttttgttattcatgcatccaaaaatgggcagaccgtttggtttcagaaagaaagaaaacaacatgtccactgtgcaagtccaatttcatcacaatcacaaagatagaagacgctgattcttccgatcaaaagatatactcacaaacagtccctgacttatcttcaacaaataacattcttgtagtactccctgaagaagaagaacaaagacaaactctcaatccactgactcgagcttcaggttgcagcagatgctacttgactgagccagaggagcttctgataagatgtcacctctgcaatttccggcgaatccactcctattgtttagacccttatctgcttccttggacctgtaaccattgcaatgatcttcagatgatgtaccaccgtcgcaactactaa

SEQ ID NO: 2275 - DNA, 2388 bp, Arabidopsis thaliana
  Clone ID: AT_T1E22.C1.o70.tg
atgatgtcatttttcctgcagaaatctaaactattgagttttgtggatagaggccctccatcttgggatcaatgtccacaatccgaaaagaagatatctgtggatggagctcctgatcttttgagaatgaatgcttcttcagatagtttaagaataagttctcctctcatgctgcaattgtcagatgatactatctctgagtctgctaatatgattgaatctataaaagcccggcttatagggaatggtcagacagagaagaggtctagcgatgggaggggaaaagatgaatctaacatggaatcattggagatagccatgtatcaaactgttcgcaacaaaattgaaaacatgataaatcaaagccttacacgtgtagatcatcaaccccatgaagctgaaaattgttcggagaaaaattctgttggtggtccatctactttgcaaggtagatttcctgatattcgatcaagacaaacttccaggcgtcctgatgctggttcagatgggtttcaccctatcgactgtgatggggtttatctttcatcatgtggacatgctgtacatcaaagctgccttgaacgatatttaaaatccttaaaggaaaggtctggcagaagaactgtctttgaaggtgcacatattgtggatctaaaaaagaaagaattcctgtgtcctgtatgccgccgactagccaattctgtattgcctgaatgtcctggagatttatgttctgtctcaaagctacaagatagtccacgtactaagttacgtagaaaagatgcactgcagccttctctttggctctctgaagcgttgtgtctactacgatctgctgctgaagtgatcgaagatggtgatagaggtaaaacagttactccacagggagatggaccaagaaggaaagatcttaaatctgtctctaaaatgctctgggatttctattttcccaagccagaggataaaactctaaaacgtctgtggctaccaccacaatcaatcgtcatgtgggacacccttaagtactctctcatttcaatggaaattggtactcgttttgccaagaattcaatgctgcctgtctattgtattgactccttgtatgaagagttgaaaacctctaaggggactattttgtcagttttattacgagtggtacagagctccagaacaaagaatactattcatgttcgtcagagatttgtgggtatgaagcatcttgcagagtctatatgctatggagtttcaagtagttcttcgagcagcatatttggaagtgaaggcacaacaggttcattgaagaatatagacctgctctggaatcgagcatccgatccagttcttgcccatgacccattttcatcactgatgtgggctctcttttgtcttccttttccttttctcacgtgcgaggaatctctattgtcacttgtgcatattttccacagtgtctcgcttgttcagactgtaattgcttattgtgcatgtcgcccaagtgaattgagtgaattaaattttggggaaaacctgcttaatgacatctccaacgctttgagagaatcaggtggttgggagtatttcaggtcgaacaatatggatttgtcatgtgatataaaagacacaatccgtaaatatagtcttcctttcttgaggagatgtgcgttgttgtggaagctactgaaatctactcctaggaagcttcatgaagagtcagatatgtttgatttgccatctgaccccaccaccgacaatatggatttcatatacagtccccagtctgagctgaatcatgtgcaagaattggagaaaatgtttaacattccacctatagatatcattcttaatgatgaacttctccgttcttcaacccaaatatggctccagcattttcagcgggaatatagagtcaacagagttaaaaggtccctttgcatcacccctgtagttcctttccagctaatgaaattacccaatctataccaggacctactacaaaggtgtataaaaaaacgttgcgtcaactgcaccaaagttatcgaagaacctgtattatgtcttctgtgtggaagtttgtgttctcccatatggagcccttgttgcagagaaagtggttgtcctaatcatgcaattacctgtggtgctggtactggtgtatttcttctgatacggcggaccacaattttgctacaaaggtttgcaagacaatcaccttggccatctccttacctggatacgtttggagaagaggatatcgatatgatcagaggaaaacgactatacctgaatgaagaacgttatgctgctttaacttacttggttggttctcatggacttgatcgcagttcaaaagttctcggccaaaccacaattggagccgtcttacattaa

SEQ ID NO: 2276 - DNA, 1896 bp, Arabidopsis thaliana
  Clone ID: AT_T1E22.C1.o100.tg
atgaacccagtcggtgaatttcgtgaggaagaaattgatggaaaaacgtttttcttatacaattcttcaacctcctccggtgaagacatccctctccaacctcttttcctttgtcctctcttacgtgtcaaaactcacagccaaaaagatccggaggctaattatgatgaccaaggctttgtcctgttcgatatttcccctcacttcccaagcgctgatccacaagtccactatatgcttgattctcacaaccgcggtcttatctgtaagctccctgttctccctctcttttggtgcaacaataaagaacctaatggtgccgacttctgttgtagtgcatgcaaaatcacaaatcttggcacagcctactatttttgtaccacatgtcgtaaaaagttccacaaagaatgtgtggagtctccacttgaaatcaaacatccttcctatccttttcaatctctccaactttatagttctccctttgcccttgtgaattgcatttgttgtgatataagtttccaagacatgatttatcattcttctacttacaaactgagtatgcatcctgtttgtgcgatgaaaccagtaccctcttttatagaccacacaaaaagacatccccaccctctcactttttcccctagcaaagctttcttaccttgcaatgtttgcggcctgattaaagaatctattctcacctatgtttgtgttccatgtgactttgtagtccatcaagattgtatctatttcccgcatatcataaaaatttctcgtcaccaccaccgtatcatttttacctcttctcttccatctgcaaaatggtcttgcggagtctgtcgtggagaggttgacaatcattatggtgcctactcttgcaacaagtgtggtgattattttgttcatacaagatgtgcattgagaaaagacgtgtggaatggagaagatctcgagggaataccggaagagcctgagatggatgttgagccatacgagacgataaccgatgcaattatactccatttttctcatgaccatcatctaaaactcgagatcaatagagtttacgatgaaaacaagttttgtcaagcgtgcatccttccaatctatgagggtacttactattcatgtatggatacatgtgacttcattctacacgaagcatgcgctaatgcccctcgaaagaaacaccatccgttgcatcctcacccgcttacgcttaaggtcgtcagtattggatacgatcattacagaagaagagggaattacttcgaatgtcgtgcttgtaggcgtcaaagttgtggttttgtttatgatagtctgggtttctcacttgatttgcgctgtgcctcggttttcgaaccatttgaatatcaaggccacgagaatcccttattcctagccttagagccagatgaagaaaaagcggtgatatgtcaaatctgccaagaagatggtgatggaaataactatattagaaaactaaattgcatggaatgcaagtacattatatgtttcaggtgtgctaccttgccatacaaggcaaagtacaagcatgacaaacatttcctcacatttcgggaagggaaagagggaagtgatcaattagactggtgtgaggtatgcgaaaagaagttagtatactcaagaaaaggtgggttctatgcgtgtgatgactgctgcgccactctccatgttaatcgtttgcttgggagagatgagtatatgctgaaacctggtcatactgtaatgaattataggtcaaacattcatattcttcccaacaataccatgactcgaccattctgccatggtcataaagaagatcgttgtccacacaaagtagttttcaaatggcatgacatgacattttgctcttacagttgttcgatgcattag

SEQ ID NO: 2277 - DNA, 741 bp, Arabidopsis thaliana
  Clone ID: AT_F9F8.C1.o2.tg
atggccgccgcagccgtttcctctaaccctcgcaccgttgaagagatcttcaaagattattccgctcgtcgtgccgctcttcttcgtgctctcactaaagatgttgatgatttttactctcaatgcgatccggaaaaggagaatttgtgtttgtacggacaccctaatgagtcatgggaagtgaatctaccagcagaggaagtgcctccggagctacctgagcctgctcttggtatcaatttcgctagagatggtatgcagaggaaagattggctttctcttgttgctgttcacagtgattgttggttgctctctgtttctttctactttggagcccgtcttaatcgcaatgagaggaagcggttattcagtctgatcaacgatctcccaactctcttcgatgtagtgactggtaggaaagccatgaaagacaacaagccaagctcggactcaggaagcaaatccagaaatggcactaagagatcaatagacgggcagacaaagagctcaacaccgaaactaatggaagagagctatgaggaggaggaagaagaagacgagcatggagacactctctgtggaagctgtggaggtcattacacaaatgaggagttctggatttgctgtgatgtttgtgaacgttggtaccatggaaaatgcgtcaagataactccggctaaagcagagagcatcaagcagtataaatgcccgccttgctgtgcaaagaaaggaagacagtga

SEQ ID NO: 2278 - DNA, 1890 bp, Arabidopsis thaliana
  Clone ID: AT_F17J6.C1.o14.tg
atggatgtggccattagtgatgatgtaccggtgaatctcgaatcggttgaagaaaagagagatgaagaaactgtggaagaatcgccggtgaagaagaagaagccacgttttgatgaggaagtgaatagagtggcggagattgtattggtgttatcggcattgcggaagattcgaggtgggaaacccccgacggaattggagattgatctaatggtggaagctaaatcgaaattggttgacatgtgtcaagagtttactcccaaggatattattggtgttgatgctattggagctgtcattgaagatctcggtttcaatggtaagcttaaggatcagagattagggtttcgagctcctaaattaaccatctctgagaagctatctcttggcaagagaaagatggaggaattgaaaaagaatccagtagtatcaactacatctacatctccagcagtaaataatgtttctatggcgcatcagtggcctaatagcgagatgaaggcatccgctagttctgttaatgcatctggaagccattacgttagggaagcgtcaggaataacacaagctagaatggagagaccacagtttaagtcagatttgcataccggtacttctcagggaccagcagttcctgccggaaattattttgggaatactacaacttggtctgcccaacctcattccagtacctccaccatatcatttggtactgcatcagatagcaaggttcctgttccgagttcttccagaatctcagatccgagctttagaccatttatgtctcaaactccaccaggtgcattcccaggcatgaaaggagcaacttatggtcaaacttcttcaccttttggaaacaacaaccatgctgaaattgctaagttaatccacaaagttctgcaaccgcgggctaaacaaaatctcttgtggaacccaccttcaagagaatacatgagtaaagcaatgacatgccaaatatgtcaaggaactatcaatgaaatagaaacggtgctaatctgtgatgcttgtgaaaagggatatcacttgaaatgtctacatgctcacaatataaaaggtgttccgaaatctgaatggcattgctcaagatgtgtgcaattatacaatggcaagtcttttcctcctaaatacggccgtgtcatgagaagcgccactacagcaaaaatgtcttctagtacagccgaagttcaattacccgcagagaagggggttggtaaaatggatcaaaaggttagtcaagagggaatgccacatctcgagacagcaaaaccaactaaggattcagctatggaacaaacagttgaagctgaagatgtagctatgaatccaatagttgaaaaagctatgagtgaaatggtggaagctgaaggtgcagctattaatccaatagttgaagctgaagatggagctatgaatccaatagttgaaaaagcaatgagtcaaatagttgaagctgaagatgcagctattaatcaagcagttgatgctaactttcaaacacaagctcccacaggaaacgatgatgctgagagtgatgatccttcggaaccagtatctcactcagagactcttaatcctccagaactagagaaaaaagaagttatgaggaaagatgctactgagagatctgtttccgcagattgtcaagataaaaactcaaagatcatagcggaatcctcattacaagaggagatttcagcttctcagacagagaactcaccaacccagcctccttcgcaatctgacacagatcattcccaacagcagaagacgacaccaaatgtcgaagaggagaaatcagcttctcaggcagagaactcaccaacccagcctccttcgcaatccaacacagatcatttcccaacagcataa

SEQ ID NO: 2279 - DNA, 3843 bp, Arabidopsis thaliana
  Clone ID: AT_F5E19.C1.o20.tg
atgggtcagagaggtttttcaaaagtggagtctggaacttgtaatgtttgttctgctccttgttcatcatgcatgcaccgtaatgttggtttcacaggatcaaagttggacgagtcatcagatgaaaactgtcatggagtagtgggcagccagtgttctgtaaacgaggatgatcttttgccttcttctatggttaatgctcacaagagtttaaataacactgctagtgaagcaagcaatcttgtcaattccagtcatgatgctctctctgagaatgctgagagtaaggaaactataagatgttctgggatatcagatgattccggagctgctgcaatgacttctaagccatctctttctgggagcaggatgaaacataaagtttctgcatcagctaatatgttagatcagagctctaactgtatagaagaccaggaagatgggatcttgtctgctgatcgagccaaacagttgaagtcaggttgttctaataacgagattggcaataaggatttagctgatggttcagctctcaattctgatccaattccgggtggatctaggaaagatgaagtgaaattagaatctttgcagaatccatcatccaaccatgatgacagagtcagttctgagaagggaaatttcaaggaaaaatcaagacccgggggtaacaaagagagacaggaaccttcagttgaaggatctacgcgttcaggagagaacaggaaggatggtaagtcaagtaagagctcttcgtccaactcatcagctgtgtctgagagcgagagtgatgattctgaaatggtcgaacatgatgtaaaggtttgtgatatctgtggagatgctggtcgtgaagatttactcgctatctgtagcggatgcagtgatggggcagaacacacctattgcatgcgggaaatgctggatgaagttcctgagggtgattggctatgtgaagaatgtgctgaggaagctgaaaagcagaagcaagaagctaagagaaaaagagaaactgaggtaaccttcaatacttatagctctggcaaaaggcacgcagataaaattgaggccgctccagatgctaaaagacaggtggttgaggcttcaactggctcacccaagaaatccattctccccagagtaggtgcgttatctcgggaaacatcattcaagggcttagacaggttaaggggaaagctaaatcatcaaacatcattcagtgatgacacagaaagtgcacgatctgctggttcacagctccaacctccaaaaggtgcatttttgaaatccagttcctttaattgttcgagctcgaaaccgaaagtgcaacttatggatgatgctattcacccaagacagaagactggcaaagaagatactgcacttgatttaaaagtggggggttttagaaatgtaggcaagtcaatgccaagtagaactacagatgcagggaattctggtggaagcgactcacaagcaaaaatgcttggatcaaaagtttatcattcacaagaaggcaaaagcttaaagcaagtgaaagatcgtaatagagaagctaatgcatcagcatcctccattgatcagaagttaaagtcacgcggcaattcgtctgtttcacatgcaaacaataatcgtgatttaaagggtttgcagtctgatggtaaacgaggaggagatatttccacaaatgaaaagtgcagtgccagcgagcaaagttcaagtcaagctgactgtaaggatgaactgccatccacttcttgtacgggtgaaggcatgccaaaccacggtactgtagctttacaggatggattgccgcggtccagggtacctagagaggtagggaagaaaagcaaagaagccttcagtaaacgccaaaggtctagcctgttggctggtgcaaaaggcttaccatcatctcaaaagggaggtcagactgcagaatccagcgacacctcaggcgtgtctgatagtgatctctctaccacgaaaaacgttaaggaggatttaaataagggtaataggttacgagcagcagtagatgctgctctgcgtaaaaagcccagctttggcaagaacagagtattggagcaatctgatgcgtcattggtagctaatgtggattctagttctgaaaagactctacgaaatcaattgccttcaaagatgcataagaatcatgtgtcacacgaaggattgcaaggagggcatccgattttatggcctacttctgatccgtacaagcagacaattgtaacaaatgagaagcagcttatattccctggtgctgatactataccttcacgattggtggaacctgaagtcagttttcccgccgtaaagcctgtcatgagagatttgcctttagttccctcacctgttatgttgagaagctcagccattccggaccatgagtttatatggcagggggacttagaggtgcggaaaatcataaaccagtcagctatgcatagcggaattcaagcacatttatcaaccttagcatcacccagggttgctgaagtggtgaataaatttccagaaactttcagtttgaatgaagtacctcggaagagtacatggcctacacaatttgaaaaattaggtactaaggaagcccatatagctctattcttctttgcaaaggacactgagagttatgagagaaattataagcctctggtagataacatgatcaagaacgatttagccctgaaaggaaatctcgataacgttgaccttttgatttttgcatccaaccagcttccttcgaattgccagcgctggaacatgttatatttcctttggggtgtcttccaaggaagaaaagagactaacccacaaaagaacacatctttgcctacttcaaatgttttgccgcgtgacagagaccccaaggagctgtgtcaaacgagttctccttccaagcatttggagaaagggtcttctctacgtgagagctccagcaacggaattgaaacacggaatgggacagatgcacgtagtcatgagaatccaaataacagggaatcctctattgagcgatcaccgagcaaaaaggaggatattgctcttaaagtggaagaagcaggtgtgaatcacatcccccctcaagttactggatcaaattctggagatagtctagtgaggaaggttcagaaagtcgaggaacaagaattaggtggtaggaaggatctgccattgacggtcatgggctcagggatccagtcccatgggcaagataatcctctagagaaagatctcaacagtagtcaggctagtcacaggaagcgtccactttgggaactgagtaaccccgctaacgagaattcatctgccataaaccagaaagtggagctcaataatgacggtttatgcgaaggatctccgaataagaagctgaagacagaaaacggaagcagcagcctctgccgggatacatctggtcacgattccgggataatgaaaaagagtccaaaagtcgtgttcccattggacttgaatgacgacagtgaaatggtggataatctcagcccactaggcaatgacgagaataacaacaatagacgtttaataagcggtacagtcccgaatctggagctggcattaggagctgaggaaacaacagaagcaacaatgggactattacctttcttaagcagaagtagcaactctggtgaacaaagtaataatagtatgaataaagaaaaacagaaagcagatgaagaagaagaagatgacgccgaagtggcagcttctctgtcgttatcactctcatttccgggaactgaggagaggaagaatgtgaatactccgttgttcctgttcagagaccttcccagataa

SEQ ID NO: 2280 - DNA, 1140 bp, Arabidopsis thaliana
  Clone ID: AT_F17I14.C1.o20.tg
atggccacatggaacgcatcctcccctgcggcgtctccttgctcatcgaggcgacgaacgaaagctccagcgagacgcccttcctccgaatctccaccaccgaggaagatgaaatcaatggctgagataatggcgaaatctgtccctgtggttgaacaagaagaagaagaagacgaagacagctacagtaacgtcacctgcgagaaatgtggttctggagaaggagacgatgagcttcttctctgtgacaaatgcgatagaggctttcacatgaaatgccttagacccattgttgttcgtgtccccattggaacttggctttgtgtcgattgttccgaccaacgacctgtaagaaggttatctcagaagaagattttacatttctttcggattgagaagcatactcatcaaacagacaaattggaattgagtcaagaagaaactagaaagcggagacgatcttgctctttgacagtgaagaaaagaaggagaaaactcttacctttggttccatcagaagatcctgatcagaggcttgcacaaatgggaacacttgcttctgcattaacggcattgggtatcaaatacagcgatggtttaaattatgttcccggaatggctcctcggtctgcaaatcaatccaagttagagaaaggtgggatgcaggtgctatgcaaagaagatttagagacattggaacaatgtcaatctatgtatagacgaggagaatgccctcctctcgttgtggtatttgatccgcttgaaggttacacagttgaagcagatggtcctattaaggacttaacattcatagctgaatatacaggggatgttgattacttgaaaaaccgagaaaaagacgattgtgacagcatcatgactctccttttatcagaagatccttcaaagactcttgttatctgtccagacaagtttggaaacatatctcgcttcattaatggcattaacaatcacaatccggttgctaagaagaagcagaactgcaaatgcgtgaggtatagcataaacggcgaatgtcgagttcttctagtggctacacgcgatatatcgaaaggggaaaggctctattatgactacaatggttatgaacatgagtatcctactcatcacttcctctga

SEQ ID NO: 2281 - DNA, 4521 bp, Arabidopsis thaliana
  Clone ID: AT_T32E8.C1.o13.tg
atgaacgttgaccaatgccagtggcggaagaagatgatgggtaggggagtggacggaggttgtggtgctgaagagaagccttatcgaccatttcgtagggttgcgttagataaggagaatgggtatgaggatatgggttcgttggaaatcgatttcttagctcaagctagcaaaaatctatctgagaggtctccttttgatgttcctgaagatggttctacttctgtgttaagtgtgcctactctacctattgctttagctaatttgctgaagaaccattcggataataagaaacggcataagaagtctcattctggtgcggataagaagaagaagaagtcttctaggcaaggggataagttgagaagtgggagtatctggcttgaacatgaggactactttaggcgcttagattttcctgatttagaaactttgtctgatttagcatctctacgatctttatcttctagaaattgcttttccattccatcggtggaatacgattctattgatattcaacagagggaaactgatgcgagtgcaaagaatgaggatgttgtttgtggagatggcgttgttctggaacaaattaagaaccttctcactaaagatatatctgaaggcacagtaagaaaagaagaggatgttgttaagccaatgggtgttgacaatgtagggaatggaatctcctctgggtcagactattctggtagtttagaatgggttttaggtaatagaaataggattttgttgacatcagaaaggccctccaaaaagcggaagcttcttggtagtgatgcaggtttggggaaattaatggttgcggctccttgtgaagggaatgcgttgttatgtgatttttgctgcactggtcatcatcagttgattgtttgcacttcctgcaaagctacagttcacaaaaaatgctatggcctgcttgaagattcaggtaaaccttggttgtgctcttggtgtgagctggagaatggtcgtgctgattctgaaagaccatgcttgctttgtccaaaaaagggtggcatccttaaacctgttctctcaaaaactgagaatggtgggccggcggagtttgctcatctgttttgttctctgtggatgcctgaggtgtatatagaagacttgaaaaaaatggagcccatcttgaattttcctgggataaaagaaactcggaggaagttattgtgtaacttgtgcaaggtgaaatctggtgcttgcattcgctgttgtaatggaacatgccgaacatctttccatcctatatgtgcaagggaggcagggaataggctagaggtctggggaaaacatgggtgtgatactgttgaactgcgagctttctgctcgaagcattcagatattcaagaaagtggaaagtcagtagagggaggagaaagtaatgcagctgaaagtcgttctcctatatgtcatcttccatcagaatctgttggagaaggtcacctaagtaatgatgagatgggagttgatgtaggaacaccgggtacaggttctgatatttcgagaaacagtgacttacaagagctagaatcaccacattcaaaatttaacttgtctgcaacagacaatgtagaatcagggatgactgggagaagcaacgaagatgaaagaactctgtccaagtctcttagttttggattgattctgaaaaagttgatcgacctgggtaaagtggatgtgaaggatgtggctgcagagattgggattaatcctgatgctttgagggctaaacttacggtaacgcataaaacttctcatctacctgcttcaaacctctatgctctcattgacggagacttgttacctgatttactaggcaaagtagttaaatggcttagccagcatgcacacatgggttcttcggataaaggcaaaaatttaaaacgtaagaccactactaaatctgagcgtcgggcagctatctgtactgaaggcatagtgatgctagattctgacatcttagatcctgctgtagcaaaggcattttctatagagcgaacacatgaaatcaacatttgtaataatacgacgaataatacaagatgtacgttaactgaaaattgtactggtaatggtattgtggttgtggaagctaaagctaatggatcagttttgaagaaagaaggaagtgttagtttggcacctgatcattctccagaagaaaagaattcaatagtgcttgatcagaaagttcatcatgggaaaagttcagttattccttctgatgatcatggagaacaatcaaactccagttcttctggagtcatgatggagaatgccttttccttgaggccaaatagttctcagaatcgtggaaatttgaactgtccaaaccccattatcttggatctcttcaatcaggaagcatatcctggtttcaatcctcatcgttatatccacaaagaattgtcagaacttggcaaggaacaaaccctgaaaagcagcacggattctgatgtggctaggatgacaaccaattttgatggacatttggtaacattaactcatttggcaggctctgaagaaggaaacaaacatctgcagggtgcagagacatttcttcagttatctaaagctaggaaattgggcatactggatctgtctcctgaagatgaattggaaggagaacttctatattatcagcttcagttacttggcactgcagtttcaagaaagcaactatctgacaatttagtctatgaagttgctaaaaagctgcctctggaaattgatgaacaacatggacgaagatgggatgatgttctggtcaacaaatatttccatgatgtcagggaagcaagaaagcaaggtaggaaagagcaaagaaacaaacaagcccaggctgttctagctgctgctactgctgcagcggcgacatcttctaggaatacatcgcttaggaaagatatgtcagaagaacctgcacaacaagagatgagcacttctagacgtaaagttgttggcagctctcacctagttccacagacaaaggaatcacttttaaagatggctgtttctgggccaccatccgagaagcggtctgatcatcacacaccagactttttagtagaaaatccacgaacttgtgacatctgcaggcgctccgaaactatatggaacctgattgtagtgtgctctagttgcaaggttgctgttcacattgattgctacaaatgtgctaaagaatctactggtccctggtactgtgagctatgtgcggagtcatcttcagaaccttctttcaattttggggaaaaaccgaattcttctacagaatgtactctgtgtggtggcacaactggggcttttaggaaaaccacaaatgggcaatgggtacatgcgttttgtgctgaggtgaagtttcctttacggcagcagttattagcaggatctggagtactatattcagtattgaacattgcaaataacttggtgtataatttctggcagtggtccttggagtcaacgttcagaaggggacaaataaatcctgtgcagggaatgtgcagttatggtaactgccagacgacattccacccctcctgtgccagaagcgcgggttttcatatgactggtggtggtaaacatccgcataaggcgtactgtgagaagcacagcatggagcagaaggcaaaggccgaatctcagaaacatggtgcagaggagctgaaaagtctcaaacattatagggttgaacttgagaggttacgccttctgtgcgagcggatagtcaagagggagaaattaaagcgagagttggctatttcctcacatgaaatacttgctgccaaaagggatcatgctgcacggccattacatgtccgtaatccattttctcctccagaagtttcgtcggactcagctacaacatcaataaaaggccatcctgatagtaatatatctggcagtgaagcaatacagaggtcagatgatatcactattgacagcacagtcactgataagcgcagaggcaaaggtcccttattaatggacacggatcagaaaactgatgacagtgctacttccaagagtcggttttcccgtaaactaacagaaagacagatcttatctgggaaaactgttccccgcaaacattgtatagtgtcacctagtgtttcagaggatggagataacgggtcaaagcccaagaagcagcatgtagaaacatttgcaaaagagctggtgatgacatcagatgaagcttctttcaagaaccggcggctcccaaagggatacttctatgttcctgttgattgtcttcaggaagacaaaccgggaaaccagaagctggcttcatctgacaagccagcgaaccagaagacatcttcaggtgatcagtcaggattcaccaactggcttaaagcaaaagaacagatggtattgcgctacaaaagagctgtggctgcaactgagaatcagctaaaaaaagctattgtgaagcttttgggtactcgatacaaactgtgcctattggtaatgtttgagatttga

SEQ ID NO: 2282 - DNA, 1674 bp, Arabidopsis thaliana
  Clone ID: AT_MGI19.C1.o10.tg
atgaattcgtgtgatattgttccgatggaagcagagctaagtccaggagccatcgaagagtggctttcgacggtaaagcatggaaagatgacggagaacggaaaacgacgatcggatttgtccatcaaggtgaagagacatctctcggctcttggttgggtaatctcttactataacaaaaggaacaagaaagagcagcgttataagtctcccaagggaaagtggttctactctttagctaaggcttgtatgagttgtgtcgaccaagactctcaacagcaactacaaattgttcccaaatatgacttgtcttgccttccaagcaatattgcctcagagtctagttctgatgtttcgaatcaaaaacagaagaaaagtaagaaaaggggtagggtcgaggatttggatgtcaaaagcacagctccggaaaaagataatcatccgtctgctgatttgatcaaaatcgttccaaattttgatgtagcaaaacaacaacaacagaagaagataataatgaatagagagggttctgatacggctgtgtttaatggggaccaagagaagatcagaatcggtctcaatgttgatgtaatacatgagcaacagaagaagagaaggaagatggcgagtgaagagataaggaggccgaagatggtgaaatctctgaagaaggtattacaagtgatggaaaagaagcagcagaagaacaagcatgaaaaagagtctctaagattctgtagaaaagattgtagtccggacatgaactgtgatgtgtgttgtgtttgtcactggggtggagatttgcttctttgtgatggttgtccttcagcgtttcaccatgcttgcctcggtttgtctagtcttcccgaggaagacctctggttctgtccttgttgctgctgcgatatctgtggatcaatggaatcacccgcgaacagcaagttgatggcttgtgagcagtgccagagaaggttccatctcacgtgtttgaaagaagactcttgcattgtttcgagtagaggctggttctgtagtagtcaatgcaacagagtcttttccgcgcttgagaatctcctaggaagtaaaattgcagtaggcaacgacggtgatttggtctggacattgatgagagctccgaacgaaggtgaacactatgatgatgaacaaatctccaagctagaatctgctgtcgagatacttcaccaagggtttgagcctaccaatgatgttttctctgggagagaccttgttgaggaactgatatacaggaaagacagaactggagtgggccgcgggttttacacagtcttgatcgagagaaagaacgagcctatcacggtggcagcagtgagagttgacaaagatgtagtcgagatccctttggtggcgacattgtctagttacagaagaagtgggatgtgcagagtgctgatggatgagttggagaagcaaatgtctcagatgggagtttgtagactggtcttaccggctgcaaaagaggttgtgaccacttggactgagcggtttgggttctctgtaatgaacagttcggagcggctggagcttgtgaaacatggaatgcttgattttgttggtaccatcatgtgccataagtttcttcagaaggaaagagcagaaaatgattctgcagaagagtcaagtctcacagaataa

SEQ ID NO: 2283 - DNA, 726 bp, Arabidopsis thaliana
  Clone ID: AT_MOP10.C1.o15.tg
atggccgctgagtcttctaaccctcgcaccgtcgaagagatcttcaaggattttagcggtcgtcgctccggttttcttcgagctctctccgtagatgttgacaagttctactctttatgcgatccggaaatggagaatctgtgtttgtacggacacccgaatgggacatgggaagtgaatcttccagctgaggaagtgcctccggagctacctgagccagctcttggaatcaatttcgctagagatggtatgcagcgtaaagattggctctctttagttgctgtccacagtgattgttggttactctctgtttcttcttacttcggcgctcgtcttaatcgcaatgagaggaaacgtctatttagtctgatcaacgatctcccaactctctttgaagtagtgacgggtaggaaacccatcaaagacggtaaaccaagcatggatctcggaagcaaatccagaaacggcgtaaagagatcaattgaagggcagacaaagagcacgccgaaactaatggaagagagctatgaagatgaagacgatgagcatggagacacactctgtggaagttgtggaggaaactacacaaacgacgagttctggatatgttgtgatgtgtgtgaacgttggtaccatgggaagtgtgtgaagataacaccagccaaagcagagagcatcaagcaatacaaatgcccttcttgctgcactaagaaaggaagacagtga

SEQ ID NO: 2284 - DNA, 2709 bp, Arabidopsis thaliana
  Clone ID: AT_F15G16.C1.o130.tg
atgattttgaaacggaccttgacgacattcgagaatcagaatctgaagcggtgcaaaattgattcagaaattgagtatgggaggaaaaagggtgagattatagtgtataagaagagacaaagagcaaccgtggatcaaccatgtagcaaagaaccagaacttcttactagtagctcaagctccttgacaagcaaagaagaatctcaacaagtttgctctgaccagtccaagtcttcgcgtggcagagttcgagcggttccttctaggttcaaggactccattgttggtacatggaaatctagccgtcgcaagggagagtcgacggagtctagtcatgatgacgacgacgtatctctggggaagaaggtcaaaggtttcagtggaagctcgaaattgcatcgcagcaaagactcgaaggtgtttccacgtaaggataacggagacagcagtgaagtagattgcgattactgggatgttcaaatttcctacgacgatgctaactttggtatgccgaaaaagtccgacgcctcgcgtaagggcgtgtacaaaccagaggaatttacggttggcgatcttgtgtgggccaagtgtgggaaaagattcccagcatggccggctgtggtgatcgatccgatatcacaagcgcctgatggggtcttgaaacattgcgtccctggcgcaatttgtgtcatgttttttgggtactccaaggatggaactcagagggactatgcatgggtaagacaagggatggtgtatccatttacggaatttatggacaaatttcaggatcagacaaacttgttcaattacaaggcaagtgaatttaacaaggcactagaggaagcagttttagcagaaaatggtaattttggagatgctgaaatcatctccccagattcctctgcgacggaatccgaccaggactatggacctgcttctagatttcaggcactaatgccattaaaatctctaaaaaggactaaagactcacaaccggaagagcttttatgcaaacactgctcaaagttgcggaaatccaatcagtattgtggcatctgcaagagaatatggcacccttcagatgatggagattgggtttgttgtgatgggtgtgacgtatgggtacatgctgaatgcgacaacattacgaatgaacgctttaaggaactggagcacaacaattactattgccctgattgtaaagtccaacacgagcttacgccaacaatattagaagaacagaactcagtgtttaagaagcagtcaccaagtgaatgggaacggcatacaggctgcagagccaaaaagtggaagtatagtgtaagagtgaaagacacaatgctacctctagaaaaatggattgcagaattcagtacctatactctagaaacccagatgttggataagcaaaagatgctctctttgctagaagaaaagtatgagccagtcagggctaagtggacgactgaaaggtgtgctgtatgcagatgggtagaagactgggaagaaaataaaatgatcatctgtaacaggtgtcaagtggctgtgcaccaagaatgttatggggtaagcaaatctcaggacctcacttcctgggtatgcagagcatgtgaaacaccagacattgagagagattgttgtctttgtcctgtaaaaggtggtgctttaaaaccaagcgacgttgagggtttgtgggttcatgtaacatgtgcttggttccgaccggaagttgggtttttgaatcatgaaaatatggagcctgctgttggacttttcaaaattccagcaaattcatttcttaagacacatggttcctgcgttcattgctgcaagtgtgcaactcacttccacgcaatgtgtgcatcacgggcaggttacaacatggaggaagtcagtttactgttcatttcacagccagatccagatagtgttgtagttgtgcacacaccctcaggagtatttggctctagaaatttgcttcagaatcaatatgggcgcgccaaaggttcaagactcgttttgaccaagaagatgaagcttccaggtttccaaacccaaacccaagctgaacagagtcgtgtatttgattctctttctgcagcaagatgccgtatctatagtagatcaaacacaaagaagattgatctggaggctatatcccacaggcttaagggaccaagccatcattctttgagtgcaatcgagaatctaaactcttttaaggcaagtttctcattccgagctccattcatgtcagtgttttgctttcttggggcaacgttttctgaatatcttaggaagatcttaatttccatttaccttgttacacaccaggaagcagattttacatcattcagagaacggctaaaacatttgcagaaaattttcgagtctgctttggtaaatctggcatacatggatgggatcatcgagtatcgtggggtgaaagttaggagaagtgttgcagatctgagagaggcaaactatcgttcgcagggcaaagattgttactgtatgcccaattgctatgctcgtatagtgagtatgggtgatggagaagacaacagaatcgtcctcattgcaaaaaccaatgtcgcagctggggaagagcttacgtatgattatctctttgaggttgatgaatctgaagagatcaaagtgccctgcctttgtaaagctccaaactgccgcaaattcatgaactag

SEQ ID NO: 2285 - DNA, 4821 bp, Arabidopsis thaliana
  Clone ID: AT_T25C13.C1.o90.tg
atggaagcgaaggttcctagacctaggggaagaccgaggaaacgtcagagattagaggatgataatcgaaaattgaacaatcgagggaaaaagcaagttctggaggttgagcctgcagtgccgatatctttacttggttgttatatgctgaaagattttgatgacaatgaagtttttctagggaagatagtgtcttatgatactgggttatatagagtgatatatgaggatggtgattgtgaggaattggagagtggtgatcttcgtcgtttaattatttcggatagttacttagacgatgagttacgtgttagaaggaagaaattagataaacttatactgaagaaggaggagaaaaagaaacgaaattcgccggagaacaaagcagttgagttgccaaatcaagtaaatggagtgcaggcacgagcagttacgaactccgaagatggtgattcatatagtgactcagagtcgtctgagagtggagataagagaggttcagatcttgaaattgaggctcctcttgttccaccagtggatttacctccttcatcagggacaattggtatcccagaggaggctgtggcacatctcttatctgtatatgggttcttaaggtcatttagttttcagctttatatctgcccatttgaactcaatgattttgtgggagcgttgtatttctcgggaccaaattctttgttggatgctgttcatgtggccttgttgcgggcattgaagggtcatctagagagactttcctcctccaagtctgtcctagcctcaaaatgcttgaggtgcattgattggagcttgctcgatgtgctaacttggcctgtttatttggttcagtactttactgcgatggggcatgctagtgggcctcagtggaacatttttaacaaatttgttgtggaaatagaatactactcgttacccattgggatgaaattgaagattctacaaattctctgtgatgacatctttgatgtagctgatctaagagatgaaatagatgctcgcgaagaatctgaaattggatttgatcctgatagagttgccacaggtcttcttgaaaatgtacctagacgggtccaccccagattcgctaaaacctcagcttacaaggaaaaagaggttactgatagctcaacaaacgagtctaaagatttggactcaagatgtactaatggcggttcaaatgaagttagctcagatctagatggaaacagtgatgaatgtaggatttgtggaatggatggaaccttgctttgttgtgatggatgtcctttagcataccactcaagatgcattggtgtggtcaaaatgtatataccagatgggccatggttttgtccagagtgcactattaacaaaaaggggccgaagattgctcatggaacctcacttagaggagctgtacagtttggaatggatccacatgggcgactcttcttgggttttagccagcattactctggaacatttgaatttgcttgttgtgacactgatgagcattctccttcttttctcttaaatcacaggcttaacatatctgtcaatggagatgcagttgtcaagtactacaatgttaatgacatatcaaaagttgtactagtgcttatatctgcatcaagccatacactagaatatgtagagatttgcaaagcgatcacccaatactgggatcttcctgaaggtatctccttgagggaaggggagattggtttaactcaagcaaaggatagagaggatggcaaggtttcagagatcactaagtcagatagtgcaaatatttccaatagaagtcatacccagactgtgtttgacctccctacatctactttgggtaataccaacagtgctgttacaggaggttcatgtggaatacaggggaaaaaattggctgctcgtgttacctacctgggtttatcgtttaaacccaacacatacaataatcattacacaaatggagaattggctgtatctgctgctgccagtttggctgtcctatcgtcagaggaaacccatgaacctgaccttcgcaagtataatagtgccaagaaagctgcatcaagtaacatcttagagcagatgaaagctttttcattagtagccccccgtttcttctggccaagtcctgataagaaggagattaccagagaaagatgtggttggtgtcattcttgccgactcacatctgcaagcaggagaggatgcatgttaaatgcagctgtagcgggtgccactaagggtgcaatgaagatcttcagtggtctttttcctctaaagaatggggagggagtcctttcgagtattgcagcatatattctatatctagaggaaagcttgcgtggtctgatagctgggccatttctcagtgaaagtccaagaaaacagtggcgtaagcagcttgaggaaaatatctgcagtattgctctgtcatgcgattggtttaaacagatggatgattggttgatagaacattctattttccaaagtgctccagttacacttggggttccacagagacgtggacctggtaggacgaagcaaaatacccaggctgaagttacagctgaaggttccgacgctgatagctttacatggtggcgaggagggaagttatcaaaagttattttgttgaaagcagttttgtcacaaccggcaacaaagaaagcagcttggcaagggggttctaaaaagattcctggattaaattatggtgatgcttcttacatccctaggagaagcagacggtctttttggaaagctgctgttgaaagtagcaagaatatatctcagcttgctcttcaggcctaccaaaatctccagaatgtcaaaggcccagagacagatgttgccatttttagaaacgctcggatatgtgacaaaaagcttagtgataacaagcctcaaggagggacaagatggagaaatgttcttgtgcatcatgtgatcatgatgttctattacggtaatcctttggtttctttatcttttgaggattttgtcacaaggattgcacttcgatgtctcaacacacaaatggaaatgttgaagttctggtcacctgcaaacgtcattccagtcatcaaggttaagcctcctagtcaacaattatcatcccagaagccacgggagaacacttcgggagttaaacaagtcactcctgattctagtgtatctaagagtaaacagaagacactgtcctgtggagtcatatggaggaaaaagaacgtagaggacacaggtgttgatttccggaatcaaaacattctcttggccggtagatcagataaaccgagcctggaaccggtttgtgggatctgcctactgccgtataatcctgggttaacgtatattcactgtacaaaatgcgaaaagtggttccacactgaagctgttaagctcaaagattcacaaattcctgaagttgttgggttcaaatgttgcaaatgtcgacgtatacgatcccctgattgcccttacatggatcccaaactcaaggaacagaagcagatcaaaagaatagtcttcacgaaccagaaacagaggcaaggaaattctgggttggattctgattctgaaagaatgtctgaacaaaaagactcgaaaccttctactccgttacctgccactcctttatatcctcctgacgatgtatttattccagaagatgatcctctcctggtatcagtttccaaagtcaaacaaatcacacccagtagtttcgatcttgaatggagcaccactgcttttgcgcctggaccccaaaagctaccagttagaaggcaagtgaaacgagaagattctgatgcagcctatcctgaactgcatcctattgtgaaacccgaggcagaggagcaagctttacctgttctaacagaatgggatttgtctggtgagctacttttcgactacgaggacatggaatttgaaccgcaaacttatttctcgttgaccgagctactgacagccgatgatagtggtggtggtcagtaccaggaaaatggtgatatggttgtttcaggaaaccctcagttcgaaccaacagaaaaagaagagtgtgaagatgatatgggtccatgtcagagatgtttgcaaatggatccagcgcctgatcttttgtgcacggtttgtggattgcttatacattctcactgttctccatggtcagccttacccggaagtagctggagctgtggtcaatgccgaattagggcactaggaagcattacactaggaagctttggtgcaatcacacagttcaagtcgattcttcctgaccggagtacaaaagttgacatttcgctagctggtccatttgctggagctgcactctcagtttccatgtttgctgttggtctgttcctatctacagaaccagatgcagctaacgacctggtccaggttcccagcatgttatttcaaggttcattacttcttggactcatcagcagagcaactctgggatatgcagctttgcatgctgcgacagtttcaatccacccgcttgtaattgccggatggtgtggtttaacaacaacagcatttaatatgcttccagtgggatgtttggatggaggaagagctgtacagggcgcatttgggaaaaatgcactggttacatttggtttgtcaacctatgtaatgcttggactcagagtgctcggtggccctttggcacttccttggggactctacgtactaatctgccgggcccttgtagggattgcactaatcctagtggttttgacactcctgcctgtatgggacgaactcgcagaagtaggcatagggcttgtaaccacattttga

SEQ ID NO: 2286 - DNA, 2520 bp, Arabidopsis thaliana
  Clone ID: AT_F4P12.C1.o380.tg
atgggagaagcaacagtttgtttcgcgaaagagaattcagaaacgaagaaggatttgaagagagaccgtctttgttttgaacaagataatctagacgaagaagagctttattcctccaacaagagacaaaccaaggaaccttcaaatgatgacatgaagtcggagatatcaaacccagtcccgtctccggtggtggataacgcctctagttttcgcgatatcactagtaatccggctaaatcgagttctggtgaccgtgtcgggtcttgttctggttcctatgagactataactgatgagaaacacagtgaatactgttcatcgctagctaatagtgatgctgtaccgtcaagtttcgaaagggagattccaaagcatcttagcacaactgggataacgaaaatcacatttaagctcagtaaacgaaatgaggatttctgtgatttgcccatgattcaagagcatacttgggagggttatccttccaatgtagcttcttcaactttaggtgtgaaaatgttgaagaagattgactctaccaacttcctatctaatgtgaagaagctattggggacggggattctcgatggtgctcgggtgaagtacctttcaacctcagctgctagagagcttcaagggataatccactcgggtgggtatttgtgtggctgtactgcgtgcgatttctcgaaagttctaggtgcatatgagttcgagcggcatgctggtggaaaaacaaaacaccctaataatcacatatatctggagaatggacggccggtttataacgtaattcaagagctgaggattgctccccctgacgttttggaggaggtgataaggaaagtggctggttctgctctgagcgaggagggttttcaggcttggaaaggaagtttccagcaagataagaatatgactgaagatgatagcaaccatatcatggatcattcgtttcaatcacttgttagttatcctggttctggttggtctcttgatgagagtcaaagctctactccatgttttccagaggacaattattttagagagaaaatctgtacaaaggacactcgacacgcacataagccaaaagctaagaagcttacctctcatatgtttggtatgggttgccataagaaagtttctggaggcggtaaatggaagagggacaatgatttacatcggttgctgtttttgccaaatgggctaccggatgggactgaattggcttactatgtgaaatcacagaaactactgcagggttacaagcaaggaagtggtatagtatgtagctgctgcgacacaaagattagtccttcacaattcgaagcacatgctggaatggctggtagacgacaaccttatcgtcgaatccacatatcttccggattgtcattgcatgatatagctgtgtcattggcggatgggggccatgtcattacaactggtgacagtgatgacatgtgttctatttgtggcaatggtggagatttgctactttgtgctggatgtcctcaagcatttcatacagcatgcttgaaatttcaatcaatgcctgaaggtacttggtactgttcaagctgcaatgatggacctacctcttgtaaaatagccactgctagttggttgtatacctattttaatttgaatgcgaatatacttgtactccactctgcttattcattatcccccatttctgataggtcgcatgattttagcattgggaaatttgatgataggacagttattctctgtgaccagtgcgagaaagagtaccacgtcggttgtctcagggaaaatgagctttgtgatttgaaaggaatcccccaagataaatggttctgctgtagtgactgcagcaggattcacagggttcttcaaagctctgcttcatgtgggccacaaactattcccacgcttttgttagacacgataagcagaaagtacagagaaaaaggaatatatattgacaatggaaatactgtggagtggaggatgcttagtggaaaaagtcgatacccagagcatctacccttactttcacgagcagctactattttcagggagtgttttgatcccattgtggcaaagtctggtcgtgatctcattcctgtcatggtctatgggagaaacatatctggccaggagtttggaggaatgtactgcttggtcctgatggtgaattccctagttgtttctgccgcgctgcttaggatatttggtcagaaagttgcagaacttcctattgtagctacaagccgagagtatcagggaaggggctactttcaagggctgtttgcttgcgttgagaatcttctttcctctctgaatgttgagaacttgcttctcccagcagctgaagaagctgagtctatctggacaaataaatttggattcacaaagatgactgaacatcgattacagaggtaccagagagaagtgcaactaacaatcttcaagggaacatcgatgctcgagaagaaagtaccgagtttttcagaatcaacttcaatcatctga

SEQ ID NO: 2287 - DNA, 2019 bp, Arabidopsis thaliana
  Clone ID: AT_MWD9.C1.o4.tg
atggcgaatctgattcgaacagaccatcagcaacatattccaaagaagaggaagagaggggaaagtagagtttttaggctgaagacgttcggagagtctggacatccagctgagatgaacgagttgtcttttcgagataacctcgctaaactacttgagtttggtcactttgagagctccggtctaatgggaagttggtcttttcagctcgagattcaacgaaatccaaatcctctctatgttcttctctttgtcgtagaagagcccatcgaagcctctctcaatctccgttgcaaccattgccaatatgttggttggggaaatcaaatgatatgcaacaagaagtaccatttcgtgatcccctcaaaggaaacaatggcggcttttttaaaactggaaggtggaggctacgcttttcccgaaaaggaaagtttctcccatcttgtggagcttcaaggccatgtccttcacggcttctttcactccaacggatttggtcacttgctctctctcaacggcattgaaaccggctccgacttaaccggtcatcaggtcatggatttgtgggaccggctctgcaccggtttaaaggccaggaaaatagggttgaatgacgcgtcgcacaaaaaaggaatggagttgaggctgctgcatggggtagcaaaaggagagccatggttcggtcgttggggctaccggttcgggtcagggacatacggagtgactcaaaagatttacgagaaggcacttgagtcggtccgtaacatacccttgtgcttgcttaaccatcacctaaccagccttaaccgagaaactccaatcctcttgtcaaagtaccaaagtttatccaccgagccattgatcactctcagtgacctcttcaggttcatgcttcatctccattcacgtcttccaagagataactacatgagtaactcccgaaaccaaatcatctccattgatagtaccaactgcagatggtctcaaaaacggatccaaatggctatcaaagtggtcatagagtcactgaaaagagtcgaataccgatggatatcgagacaagaagtgagggatgcagctagaaattacattggggacactggtttgcttgattttgtgttgaagtcgcttgggaaccaggtggttggaaactatttggtccgacgtagtctaaatccggtgaagaaagtgctagagtattccttggaggatatatcaaatttgttaccaagtagtaacaatgaactcataacccttcaaaaccaaaactcaatggggaagatggcgacaaacggtcacaataagatcacaagaggtcaagttatgaaagacatgttttatttttacaaacacattctcatggactacaagggagtgttaggccccataggaggtatattgaaccaaatcggaatggcttcaagagcaatcctcgacgctaagtacttcatcaaagagtatcactacattagagatacatcggcgaaaacgttacacttagatcgaggggaagaattaggaatattctgcacgatcgcgtggaaatgtcatcatcataacaacgagataaaagttcctccacaagaatgcattgtagtgaagaaagatgcaacattgagtgaagtgtacggagaggcagaaagagtgtttagagatatctattgggaactaagagacgtcgtggtggagtcagtggtgggtggtcaaatagagatcacaagggtcgatgaaatggccttgaatgggaataagggattggtgttagaagggaacgtaggaatgatgatgaacattgaagtgacgaaatgttatgaagatgatgataaaaagaaggataagagaatagagtgtgagtgtggagcaacggaagaagatggagagagaatggtgtgttgtgatatttgtgaagtatggcaacacacaaggtgtgttggtgttcaacacaatgaggaagtgcctcgcatttttctttgtcaaagttgtgatcaacatcttattcctctctcttttttaccctaa

SEQ ID NO: 2288 - DNA, 2094 bp, Arabidopsis thaliana
  Clone ID: AT_F10C21.C1.o9.tg
atggcggtgatgaacggtggtcgtgcgacgaagcgagcgaggcgtagcaacagaatctcagctgatctttacgatttctctactttcccgacggcggagatcaacggcgagtcgacgactttgccgccgttccgagacggtgtgagaaccttcctcgcgacccacgcgcgtgtcactttccctccttcgacgctcttctcgagtttgatgacgtggcagatcatgcttagacctggagattcgacggacggttcagatctctcttctaaactcgtctctctcgacgttgtggaggaggatgtgacgagatcctctagatctgtttactgtgaacactgctgtgtcgttggttggagtagtcatccagtgtgtagaaagaggtaccgcttcatcataaggtcaggaggagacactaaggcttgcacgaggtgtggtaatactcagaatttgtctgaaggtagcaattgcaaatggtgcagcatggctttagacattgaaaactgggtttactctcagctagaggataacactcacctccttcacggcgttatccactctaatggctacgctcatctactgtgtcttaatggaagagaaggtggctctggttttttgactggtcgtgccattatggacttctgggataggctttgttcctcccttgctgttcgaaaagctagtgtgatggatgtgtcaaggaagtatgggatggactaccggttgcttcatgggattactagagggtgttcgtggtacagtgagtggggttatgaattcaaatcggggagctatgcactcaccaaagaagcttaccagagtgcagtggatactttatctgcgattcctctctctgagtttttgttccaggggaggaaaccaagaactcagctccactccattattagcttctaccaatcactctcgtgttcagagcttgtgactgtcaaagacctcttctcctttctcctacagatgattcgtgagaacagttccaaacctgcatctaagtcgtctgtactgtgtgcttggtctaaaagtgatgtggaacgtgtacagcaaaccatggttaagatactgaaagcttcaggacgcccacaagccaactgggttacaaggtgggctctcaagaggtctatttgcaaatcagcctctccacaactgattgattactgtctcaagcattttggaggggttttggtggatgatggatctcgagtagtcagctcacgttgcaatcctggttcaaacgactttgagtacaggcttgaatctgtcaacaatgtgcaccgcttatctaatcaagatgtaaataatgcatcagtggagcatgtcaaacaggatttaagatatttgtatgaaactttattgcacccacaaaccatggccgagtttaggtctcgagctacaagagaaaaaatgattgacgcagccacaaaaatactggactgtaagcatttcataaaagattacctgtctagcacagtgaaccccgttgcaatcaacctctggtgctgtgttgagctttcggatgaactcaaagaatccccagcccctccacctgaacggttggttttgccattgaacgctactgtttccgaccttaaaatcgaagctgctaaggcttttcaggaagtgtatgcaatgttcaagaggtttgaagttgaggagctcctaggttacggttctatagatgactctattaccctgaaatttctagttggcacaaacggggtcatacggattaaagggagatgctcaaaacacgggctccttagataccgcatggagagaggggtggataattggaaagttgattgcaagtgtggcacaaaggatgatgatggcgagaggatgttggcctgtgatggatgtggtgtgtggcaccacactagatgtattgggatcaataacgctgatgccctaccttccaagttcctttgtttcagatgcattgagttgtacagcaagaaaccaaagcaatctaaaaaagagcgtggatctagtcaagtgcccaaagctggctttgtttgtagaggtgagtcagctgctatgggcagtggatctaatttatccgtaacacttagagtaggctga

SEQ ID NO: 2289 - DNA, 2478 bp, Arabidopsis thaliana
  Clone ID: AT_F13M22.C1.o2.tg
atgccaaaggaagagaatggtcaattgaaaagagataggcttgatgatgatactgatgaaggtaataaaggagatcactttcccagtaagaaacaagctaaagaagcttctaatgatgacattacatcggagatttcaaatccagtcgcttctccggttgaaagcacgtctctttttcgtgatgtctctagccagccggttaaatccggtttagttgagtgctccgggagtgattttgggtccgaagagactgtaagtgacgatgcatccgttgtaggtagctcacaaacagagcagtcgagtgatgttttaccatctcgttttgtgttggagattcctaagcatcttagctcgactgggatcacgaagatcacgtttaagttgagtaaaccaaagaaggaatttgatgatttgcctttgataaaggatcatacttgggacgctggtgttgtgaagatgccgaagaaaaagattgtttctttgagctacccatctaatgtcaagaagctattggaaacgggtatacttgaaggagctcgagtgaagtatatttcaaccccacctgtgagacagcttctggggataatccattcgggtggctatttgtgtggctgtacaacttgcaatttctcgaaagttctaagtgcgtatgagtttgagcagcatgctggtgcaaaaactagacatcctaataatcacatatttttggagaatagaagggcggtttataacatagttcaagaactgaagactgctcctcgtgttgttctcgaggaagtgataaggaatgtagctggttctgctctgaatgaggagggcttacgagcttggaaaggtgatggccagcaagtttccaacagagtaatagcatgtctgaccggaattatattacggatcattccactgtcagttaatgcactattaagttaccattttgtgttactatctgaaactgattcctgtgaaagctgcagttatcttggtcctggtcttgatgagagtcagagccttactccatgctctgtggagaaccattatttttcagagaaaacatatgcaaaggacacattagatgagccgaagcggatagcaaagaagcttacttctcatgtatctggtacgggttgccataagaaagtttctgaaggaagcaatagaaaaagggataatgatttacatcggttgctgtttatgcctaatggacttccagacgggactgaattggcttactatgtgaaaacgcagattagtccttcgcaatttgaagcgcatgctggaatggcggctagacgacaaccttatcgacatatcttcatctcttctggattgtcattgcatgatatagccatgtcactggccaatggacatgtcattacaactggtgatagtgatgacatgtgttctatttgtggggatggtggagatttgttactttgtgctggatgtcctcaagcatttcatacagcttgtttgaaatttcagtctatgcctgaaggtacttggtactgttcgagctgcaatgatggacctatctctagtaaaaaggctactactactgatccttctggcaacgctaggcctatagttataagactctcaagagtcgtgaaagcgccagaaagcgatattggtggctgtgtgttctgcaggtcccatgattttagcattggaaaatttgatgataggactgttattctctgtgaccagtgtgagaaagagtaccatgttggttgcctgagagagaacgggttctgtgatttgaaagaaatcccgcaggagaaatggttctgctgtagcaattgcagcaggattcacacggcagttcagaattctgtttcttgtgggccacaaactcttcctacacctttgttagacatgatatgcagaaaagacagagaaaaaggaatatttaccgatattggggatacagtcgaatggagaatacttagtggaaaaagtcgatacccagagcatctgcctttgctttcacgagcggctgttatcttcagggagtgttttgatcccattgttgcaaagtctggccgtgatctgattcctgtcatggtgtatgggagaaatatatctggccaggagtttggaggaatgtactgtttggtcctgatagtaaattctcttgttgtttctgctgcgctgctgaggatatttggtcaggaagttgctgaacttcctatagtggccacaagccgagagtaccaaggaaggggatacttccaagggctgtatgcctgtgtagagaatcttctttcttctttaaatgttgagaacctggttcttccggcagctgaagaagcagagtctatatggacaaagaagtttggctttacaaagatgtctgaccagcaattgcaggagtaccaaaaggaagtgcagcttacaatattcaaaggaacctcaatgctggagaagaaagtacctaaggcgacaacgggtttatcagaatctacaactctcatctga

SEQ ID NO: 2290 - DNA, 1032 bp, Arabidopsis thaliana
  Clone ID: AT_MIE1.C1.o24.tg
atggatgctcaatatcaagatctacctcctctcaaaagattaagactgttgcagagagatctcgaagctgctcaacagcaccagctaccgaaccaaccggagatgaagtcgttgcagttgccggcaaagaagaggaagcagactcgtgttgattatgacgatgacgacgcagagaactccaatcccacctatcattgtcttccggcgaagaaaaggatctgggcgattgatcccgatcttctctccggtggtggtaaccccttttcgccttttgatctaaatgtagagtataagccttatgttgaagagaaatcaattgagaaaaagtcaactctaaatgttgaatctagtctagaggtagaagaagatgatgataaagagaatatagatcctctagggaaaggaaaagctttagatctctctgatagagaagtagaagatgaagatgggattatgtgtgctgtatgtcaaagtacagatggtgatccattgaatccaattgtgttctgtgatggttgtgatttgatggttcatgcttcttgctatgggaatcctcttgttaaggctattccagaaggtgattggttttgtagacagtgtttatcgtcgaagaaccgagaaaagatcttctcttgctgcttgtgtacaactaaaggcggggcgatgaaacctacgaatgatggtagatgggctcatattacttgtgcgttgtttgttccggaagtttactttgaggatcctgaaggaagagaagggatttgttgtagtgaggtattgagtaagagatggaaagataggtgttatttgtgtaaggttagacgcggttgtgttattgagtgttcggagatgagatgtaagttggcttttcatgttacttgtgggttaaaggaagatctttgtattgagtatcgtgaagggaagaagagtggtggtattgttgttggtttctgtaatgagcataccaaactttgggaaaggcaacaggaaagtggaaagtacaagattgttgccagagaagaagataaaaagtag

SEQ ID NO: 2291 - DNA, 1197 bp, Arabidopsis thaliana
  Clone ID: AT_F9L11.C1.o24.tg
atgaaaggaagatcgtatcggttttcaagtacggatcctcatgaggattgggttgatggactttggactgtggattgtgtttgtggtgtgaatgacgatgatggaacagagatggttaaatgtgatgattgtggtgtttgggttcatactcgttgttctcgttttgttgaaggacaagagctttttacttgtcataagtgtaagagcaagaacaatgttaatgatagtgaagagactgaggttgctcagttgttggttgaattgcctactaagactttgggaatggagaattcgtgtactcggagtgtacctttcaagcgtccttttaggttatggactgagatcccagctgaagaaaaggttcatgtgcaaggaatcccgggtggggatccgtctctttttgatggattgtcgtcggttttctcccgggagctgtggaagtgtagtggttatgtgcctaagaagtttaaccttaagtatagagagtttccttgctgggatgagcaagagaaggatgaagacggtgcaggggttttgttttcgatgtcgaaggagaatgtgattgctgctcctgttagtactttggttggaatgaggaggagtcttgatggtaaaggaggaaccaatgacgtgaagcttggttgtgactctggtgaaacggatagaaaacattctcagggtgctattaagaaggataagaggttgcttcgtcctatgatgacgaataaacgaagaaaagaattgttcggtgcttcaaaagagcggatgaagaagaaggttgaagttgtagacaaagaagaagatgataagaaaggttttgtcggtaaaacaggaaatcgacctgccagtgatgctaaaccatcagaatctcgtaaggacatagaagcagaaggttttactagcgacgttgggatcacgaagagtgtaaaggccaagaaagctgctctggaaactggcggtgatgaatctggtaatacagaaattggtgttgaatgctccagagaacagaatctttctgacgttcatgctaatggtactggaaaacaggaagagaaagctggtcatcatttccgaattgtgcttaaaagctctgcaactactgatccttctgtcctcggaggaagagatgttccacacaatgaggctaataaggaggaggaggtacgtcttagattggctaaaactataccaatatga

SEQ ID NO: 2292 - DNA, 1716 bp, Arabidopsis thaliana
  Clone ID: AT_MBK5.C1.o18.tg
atggcgagagatatgaatgtagtggagattttggatgatgaggaggaggatgagaaggagtgtgaggattggtgctttatctgtaaagatggtggaaacctaatgctctgtgacttcaaagactgtccaaaagtttatcatgaaagttgcgttgaaaaggatagctcagcaagcaagaatggagactcgtatatctgtatgtggcacagttgctacttgtgtaagaaaacaccaaagctatgctgcctttgttgctcacatgctgtatgtgaaggctgtgtcactcatgctgagtttattcaacttaaaggggataaagggttatgcaatcaatgccaggagtatgtctttgctttagaagaaattcaagaatatgatgctgctggggataagcttgacttgacagatcggaatacatttgagtgtctgtttcttgagtattgggaaattgcgaaaaaacaagaaggtctaacttttgacgatgtccgcaaggtctgcgcttcaaagccacaaaagaaaggtgtcaagtcaaagtacaaagatgatcccaaattttcgcttggtgatgtccacacttcaaagtcacaaaagaaaggcgacaagctgaagaacaaagatgatcccaaatttgcgcttggtgatgcccacacttcaaagtcaggaaagaaaggcgtcaagctgaagaacaaagatgatcccaaatttttagtatctgaccatgcggttgaagatgcagttgattataaaaaggttggcaaaaacaagagaatggagtttatcagatggggttcaaagcctctcattgatttcctaacgtccataggggaagacaccagagaggcaatgtcacaacatagtgttgagtcagttatccgcaggtacattcgtgagaaaaacctgcttgaccgtgaaaagaagaagaaagttcattgtgatgagaagctgtactctatcttcaggaaaaagtctataaatcagaaaaggatttatacacttttgaatactcacctgaaagaaaaccttgatcaggtggagtatttcacacctttggaacttggcttcattgaaaaaaatgaaaagcgattcagtgaaaagaatgataaggttatgatgccgtgcaagaagcaaaaaacagaaagttcagatgacgaaatttgtgagaaggaagtgcaacctgaaatgcgagcaactggtttcgccacgatcaatgcagataatctaaagcttgtttatctacgtaagagcttagtcttagagttgttgaagcagaatgatagctttgtggacaaagtggtgggaagctttgtgaaagtgaagaatggccctagggactttatggcgtaccagatcttgcaggttacaggcattaaaaatgctgatgatcagagtgagggcgtgcttcttcatgtttctggtatggcaagtggtgttagcatttccaagctggatgattctgacataagagaggaagagattaaagatttgaagcaaaaagtgatgaatggtcttctgagacagacaactgttgtggagatggagcagaaggctaaggctctccattatgatataacaaaacatagagaacttctggagaaaccttcagagcaggagaggttactaaaagaaattccaaggatcattgaagacttcatcgagattaaacaagaaccatgtgtcggcggtttgtcacatgaggcggttataaatatcgattaa

SEQ ID NO: 2293 - DNA, 2295 bp, Arabidopsis thaliana
  Clone ID: AT_F17A17.C1.o36.tg
atggcctttcacgtagcttgtccaattacatgtcgtcggatttgccattgctccttagggttttctcgggatctccgtggagccaatgcgaaacataagtttttgaaagaggttattcgagtggaggagtttctcaaggatcctgctgtttcttctaatgtttttattggaggtaccgttcaagttagggttcctaaggttgttcctgctcctcagacggtttcgattttgggggttggagatggtgctattggttctggtgttgatgaattggcggaggaagcttctgctcagaagaaacgtgttgctcttcagagacaagctgctgttactgtcgaagctgctgaggattatgctcggaggtttgaatctggtgtcaatgaccttacctcaaacgatcatgctggtgaagaattaggccactccggcatgaatataatgtgcagaatgtgcttcctaggagaaggtgaaggaagtgatagagcaaggaggatgctttcttgtaaagactgtggaaagaagtaccacaagaattgtttaaagtcttgggctcaacatagagatttatttcattggagttcatggagttgtccctcttgccgggtttgtgaggtctgccgtagaacaggagatcctaacaagttcatgttctgcaaaaggtgtgatgctgcttaccattgttattgccaacatcctccacacaagaatgttagttctgggccatatctctgcccaaagcatacaagatgccacagctgtgattctactgtccctggaaatggcctgagtgtcaggtggtttttatcatatacttgctgtgatgcttgtggcagattgtttgttaagggaaattattgccctgtatgcttgaaggtgtatagggattcggaatcaaccccaatggtatgctgcgatatttgtcaacgctgggtgcattgccattgtgatggaataagtgatgacaaatatatgcagtttcaagttgatggaaagctacaatataaatgtgccacatgccgtggggagtgttatcaggtgaaggatcttcaggatgcagttcaagaactttggaagaaaaaagatgtggtggacaaagagttgattgctagtttaagggctgctgctgatgatgaagaaaatggacccgtatctgggcgctcactgaagttttcgattaaaggtttggtggaaaaatccccaaagaaaagcaaggagtatgggaaacactcttcaagtaaaaagcatgctagtaaaaaaggtagtcacactaagttggagcctgaagttcatcaggagattggatctgagagacgccgactaggtggtgttagaattgataatgtgggttttcagataaacgaacaatcggacgttaattcttctgtagctggaatttgctcaacacatgaacctaagattgtaaaacacaagagggttgatgatgttatggtgactgatgaagaaaagccgtcaaggatagtgagaataaagtgtagcaagcctcatgattctgatagcgaggataccctaaggaatgcaggggaggaaaaatctgtaaaggcaaagaagttggttattaatctgggtgctaggaaaataaatgtcagtggttcttcgaagtccaatgttgtttctcatttatcgagagacaaagatcagtccactttgggtggggataaagttgatcagactggggaagtaagaaccctgaagatctctggaaggtttgggaaaactcaatctgaaggaagtaaagctacatttgggtcagtcactcagttccctgctgcatcaacaagtgaaggaaatcatgtggatgacaaaacatccatctcaccagcattacagaaagaagcaagacctctgctgaaatttaaactcaggaaacctaattcaggagatcagacatcttcggttacaacgcagtctgaagatgaaaaattgagttctgcaaagggccaaagatcaaagagaaagagaccttcaagcttagtggacatggcttcattgaaagaagacggtgaagctacaacacattctcatcaggataattcaaggaacgacgagatgatggatgctaactggattttgaaaaagttgggtaaagattcaataggaaagagagtcgaagtccatggatctcaaaactcatggcgtaagggaacagtgacagacgtttctggagacacatccacattgtcggtttctctagatgatggaagcatcaagacatttgaacttgggaagcacagtgtccgcttcataccgcaaaagcaaaagaggtcaaggagctga

SEQ ID NO: 2294 - DNA, 945 bp, Arabidopsis thaliana
  Clone ID: AT_T23K23.C1.o12.tg
atggagcctccgaattcaaacagtgtctgtgatcgctttgtgactgggaatttagaccttgataactggatttggattattgagtactttgccaaattcaaaactgagctttggatgttaaatgatgtctttgaattggctcctaagcttccagattatttgggtgaatatacaaatgagatggtagctttcagatgcctagcttctttgtttgattctcatgttgtttctgttactactactactactactacctcaatgatcgagtttgattcctctgagagctgtgaatatgtactccaatgtatcttagatgagataccgttatcggaactgaaaccgggtgcaccgggtttaacgaagtggaatcttcaaccttttatcaaacacaagcttctttctctaccaaaatgtgctttggaactgatgattgaaccatcatcatgtgagaatgatactcaagtgtctccttgtagtgaggaagagactctgagaagtgatggcaaagagaatgaccgagttactcctccaatggatgagccagatcttacgggaagaacagaagagggagagtcattttctcgtggggctgatgagttgctcgatagaagaaatgccggatttcgatatgaaagcgaaaatgatggtagtcatttgtcaagtcctgtagagaaaatatacagatgtgttaactgcaaagaaagtgggaagctgttgttttgctctagtgatggctgtgaagtcatggttcatcagaagtgtttggattcaccaccttcttaccatgatgctggagacttttactgctctctctgcgctttaacctgtccttcagctgaatatgttcaatttcaagatgaagtggctaaagcaaagaggaaattagtttcgtttcttagactaatgtcagaggttaacaagaagaaatctattgaaggaacctga

SEQ ID NO: 2295 - DNA, 4551 bp, Arabidopsis thaliana
  Clone ID: AT_MDJ22.C1.o18.tg
atggaaggaaaggtggctaaacctagaggtagaccaaggaaacgccccagaccagaggatcttaatggggtatctaatcgagggaagaggccggttttcgaggtgaaagtggctgtacctagatctcttcttggtcgttatgtgttgaaagatgttgatgacagtggagtttttcttgggaagatagtttcttacaatactgggttgtacagagttgaatatgaggatggtgattttgaggatttggaaacttgttatcttcgccagttaattattggggatagttactttgatgatgaattacgtgctagaaggagtaaattagacgactttattctgaagaaggacgaaaagaagaaaacagattgcctgaagaacaaaggagttgaggtgcccacatgtaatagcccaagttctgtggcagaagttgaaagtggttattcatcttgtggtttgcctgagtgtgaagatgacatagatccagatttcgaaagtatgtctcctcttgttccaccagtggagttgccttcttcatcaggaacaattggtatccctgaggaggctgtggtgtatctattatctgtatatgggttcttaagatcattcagtgttcagttatatatctgcccatttggattggatgattttgtgggagctttaaattttttaggacctaattctttgttggatgccgttcatgttgccttgatgcgggcactgaaaggtcatcttgagagactctcctcagaagggtctgaagtggcttcaaaatgcttgaggtgcattgattggagcttgctcgatgcgctaacttggcctgtttatttggttcagtactttgctgccatgggacatgcaagtgggcctctctggagattttttaatgaatttgttgtggagaaagaatattgctcgtcacctgtagtaatgaagttgaagatcctgcaaattctgtgtgatgacgtctttgatgtagcagatttaagagctgaaattgataacagagaagaatctgaagttggatttgatactgatggagtaactgctgaacttcctgaaaatggacctagaagggtccaccccagatttgctaaaacctcagcttccaaggagaaagagcttagtgaatttgttgcagtgaaccatgggataagttcattgagcgactcaaaaaattggagttcaagatacactgatggtggtcctaatggagatagcccagatctggatgcaaacagtgatgaatgtaggctctgtggcatggatggaacgttgctgtgttgtgatggatgccctttagcatatcattcaagatgcattggtgtggtcaaaatgtatataccagatgggccgtggtattgtccagaatgcactataaaaaaaatggggccaactgttgtttataaaacgtcactcaggggagcagtgtattttggagtggatccacatgggcgactctttttgggtacatgcaatctcttactggtgcttaaaattaatgtccatgcggatgcagatatcaaatattacaatgtcaccgacattccaaaagttgtcctggtacttttgtctgcaacgaaccatagactggaatatctgtatatatgcaaagcgatctcacaatactgggatctgcctggaggtgtgatctcttatctgagaacagtggagactgatttatctcacatgcaaaaagaagggggcgacgaggtgtctgacataggtgagccagatagtgcaaatagttccagtggaaatcttattcaaaatgcggttaggctccacccatctgcctcaggctatactggtggtcctgttttagcaagatcaagtggagcgcaagagaagaatttggttgcagtcagtacacagaagggtttatcatttaaacctcattcttacattaatcattacacaaatggagaattggctgcatcagctgctgctactttggctatcctaatgtcagaggaaacccatgaacctgatctacacaaatttagtaatgccaagaaagctgcatcaagtaacatcttgctacagatgaaagcattttcgatagtagcctcgagtttcttctggccaagtcctgataagaaggaaattaccagagaaaggtgtggatggtgtcattcttgcaaactcacatcagcaagtaggagaggatgcatgttaaatgcagctgtaacaggggccaccaagagtgctatgaaaatctacagtggcctttttcctctaaagaacggggagggggtactttctaggatcgcagcatatgccctatatctcgaggaaagcttacgtggtctcattgcggggccatttcttagtgagagtcttaggtaccagtggcgtaagaagttagaggaagcttcaacatgcaaagcgatgaaagccctcctgcttgaacttgaggaaaatatttgcagtattgctctgtcaagcgactggcttaaactaatggacgattggttgatagaactttctatctttcaaagcgctccagttactgttggggccacacagaaacgtagacctggtaggaggaagcagaggaaccaggctgaaaatacggcccaaggttctgatgatgatagctttacttggtggcgaggggggaagttatcaaaaattatactcctcaaggcagtcttgtcgaagcctaagataaagaaagcagcttggcaaggtggtacgaaaaagtttcctgaatttaattatggtgatggttcttacattcctaaaagaagcaggcggtctatttggaaagccgcagttgaaagtagcaaaaacatttctcagcttgctcttcaggttagatacctggatatgaatataagatggagtgaacttgtacgcccagagcaaaacgtgcaagatgttaaaggtccagagacagaggccactattttcaggaacgctagtatttgtgtcaagaagattatagataacaaggttagatacggagttgtctttgggaatcaaaagcatcttccatcccgtgtcatgaagaatgtcattgaagtcgagaaatctgaagatagaaacgaaaagtattggtttcatgaagcacgcgttcccttatatttgatcaaagaatatgaagaaagtttgcatagggtggtacacataccttttatcaagaagccatcaagaaaaatatcaaagctccagaaaaggcaactaaaagcttctcgagcaaacatattttcttatctagcctctcggagggacaacacggagaagtgttcttgtgcatcatgccatctcgatgtttttttgagacaaccaacaacacccagtgtcctgatcaacggtcaacttcaaaatgcagccacttcaaacacgaagacacagattaagcgtcttaatcaacagttaccatcttccaaaacaggcgacaatgcttcaggagttaaacaaatcactccggatttcaatttggcaccgaaaagtaaacacaagacattgtcttggggagtcatatggaggaaaaagaacttggcagacacaggtgttagtttcagacatgaaaatgttatgttggctggacgatctgatcagccgaatctgcaaccagtttgctggatctgcaaattgccgtataatcctggcctaacatatattcactgtacaagttgtgacatgtggtaccacatcgaagcggtcaagctcgaggagtcaaaaattcctgaagtggttgggttcaagtgttgcagatgtcgtcgtatacgatcaccagattgcccttacatggatcccaaactcaaggaacagaagcagatgaaacaagtattcttcaggaggcagaagcatgggcaaggaaataccggaattgattcggattccgaaagaatgtctgaaccgaaagactcgttgccctctactccctcatttctctctgaagatacgtttgttccagaggatgatcctctcttggtgtcagtttcaaaagtcgaacaaattacaccaaatagtttggatgtggaatggaacgaggatggttgtgtgccaggaccacagaagctacaagtgaggagaccagtaaaacgtgaagacacggacgggaataataatctttcttataccgagtttacaatgcatcccgaatcaatgcctgttgtgaaaccagaaatggagccaacatttcctgtcatggaatgggatgcatctggcaatagcaacaacatgaatgaaggcgagcttatgtttgactacgaagacatggaattcgaacctcaaacatatttctcgctgaccgagttgctcacaacagatgatagtggccagtgcgatggatatggagatgacaaggatgcttcaggaatcacggataacccaaaccctcaggttgaggcaatggaacagtgcacgtcatttctctatgaaaatacaattccatgtcagatatgcaagcatgtggagccaggacctgacctcacatgtcagacttgtaatatgacaatacattctcactgttctccatgggaggaggaatctacgtgcataggaggtagctggagatgtggtcgttgccgtgagtggctgtag

SEQ ID NO: 2296 - DNA, 3093 bp, Arabidopsis thaliana
  Clone ID: AT_F24C7.C1.o4.tg
atgagcagtcaatctgatgataatgggttaatctcaaattgtaaacttcggacatctttaggtaagaagaaagaactggtaggcgatgataatgttgagaaacttgttggtggaagctgctttaacaaggagaaagcagaagtaaaacttgagcatggggaatatgctgaagataaagagattcttggacttgattttaggagtcaggttaaggttgaaatcaaggatgatgaatgtgggattgttgagctacatgatgaagagttgcaagttaaacgtaaacggggaaggcctagaaaggtgcagatcagcagtcaatctgatgagagtcgccctaacacaaactgtaaacttgcgagaactccagaactaagtagccagtcgagtgttgacagaattagtttgagtcgtctgcgtggtagacccccaaagaccaaggagacctcggttagcctttacattgaaaaaggacctgagtctaatggaaggaggatggtacgtaagcgtggaagacctccaacaccacagaaaaagaggaaatcggggatgacagatgaatcagattggaaagcaaagaagagactgaaactttgtgagagtccgttagagtcacggcacaacaatcctttaattgatgacgaaaggatgattggcgaacaacggagtaagcaaactgaagctggaggacattcgagatcaaagtctaagaaaatgctgagtgacagaatactgcagttacttctaactgctggttggactgttgaatataggcctcgaaatgggagagcttatcaagatgctgtgtatcttaatccagagggaaagactcactggtcagtgactaaggcttatcaagtttataaaaaacaattggaaagcaacccgaatgatcaaaagaactctaccactggttctggttttggcttgctaccagaagaagaccttcatctattagagagaacaattcagaaaaaaaggagcgatacaggtaagcaaaggtcaaaattgaaggacagagatactaatgacatcttggtttcaacaaagggaacaggaaaaataaagagggaagaaaaacatagtagaaagcgttgtactccgtcagctcgtagttctttgaaagatgtggattccaaggaggatgggtacatattatttgaagggaaacgcaccatgctgggttggatgattgattcaaccattgtgccacttaacggaaaagttcagtgcatggactgcaagaagacagacatacttctagaaggaattatcacaaaagagggtattcgatgcaactgctgtgatgaagtgttctctgttctcgatttcgaggttcatgctggcgggaatcgcaaccagccattcaaaagtctgtatttagagggtgggaattctctcttgcagtgcctccatgagtctatgaataaacaaagtgaatcacaacttaaagggtaccattttgtggactttggttcgggggatccaaatgatgacacatgtggtatttgtggggatgggggagatcttatctgctgtgatgggtgcccatcaacattccatcagagctgcttggacataaaaaaattcccttctggtgcctggtattgttacaactgctcatgcaaattttgcgagaaagatgaggctgctaaacatgagacttcaactctaccctccttatcgagttgccgcctatgtgaagagaaatatcaccaagcatgcatcaaccaagatggcacggtgcctggtgaaaggagtactgattcattttgtggaaagtattgtcaagagttattcgaggaacttcagttattcattggagtaaaacacccactgcctgagggattttcatggtcattccttcgccgctttgagctccctagtgaggttgccgattgtgacatatctgagaagattgcatataatgccaaaatggctgttgcattttctgttatggatgagtgcttttcacctttggttgatcacaggagtggagtcaacctgcttcaaaacattgtttataattttgggtcgaacttccatcggctagatttcagcagttttctcactgctgttttggagaggggtgatgaaatcattgctgtggcgtctattaggatacacggcaatcaactggcagaaatgccgtttatcggaacccgctatatgtacaggcgtcaagggatgtgtcgtcgactaatggatggcattgaatctttcgtcgcttatttctctcaaatgtttcttgctatatctgaagttttattagatgtctggcaattctgctgctatcctgcttgttttggcgacgggccattctgctttttctcaggctttggcttcgcacctgtcaatgattctgagaaaaaaacaattaagaatctgaacttgttggtgttccctggcgtagacatgttggggaaatcattggtgaaggagaagatcactgactcagttgtttcatctcccaatggtttagtgctgttggcacctgagatgactttgcctgtagatgtcgaggaaaataaacctgaggagtctaaagacagtgcacacgagcgaaattgtgcaactgctggtgttgaatccccttctaacccagttgatagctgcttgaagttaacttatgtagaagagggggataatgacagagaatccaatctcaagttacttgacgggtccgtggaagagaaagaagacactaagaaattgacagatatagacatcaattctcttcctgatgaagttgatgattcccatgcggatcaaagtgatacaaaagagcaggaaattgatgataaagaagataagacaccgttatctgatgatggctgtgaaggtaaagctgagggtaccaaggagtcaaatcaacaaccggatagtaacaaagtagataactctcagccacttggtaatggtggtacaggggaagagcttggcaacagaaccttagcgctaaagagagaagtgactcccacattgcgagcatcgccccgactgattcaaagatcgtggagaacatcacgggtgaaccagaagttcacaggtactactaacgccgtactgcttgactctccacaccggtgtgtctga

SEQ ID NO: 2297 - DNA, 2883 bp, Arabidopsis thaliana
  Clone ID: AT_mpk17.C1.o10.tg
atgttagaaactaacgagcaaaagggttttgatttaaacgtgtgtgcttcaattgaagatttcagtgagtctgacattaaggctgagggtgaaactgatagtttggttgatggtaatgtggagaatgtgattgagattaaggataagaaaaaagtgattgagcgtgagattctcattacgcgtagggttcttcgctcaggctctgtggcaagggatttagtaaacagtgataaacattgtaaggctgtgaaaaggaaaggaaatgttgttagtggtggaagttctgttgatgaggtgaaagaagaagtgaaacaggagtgtgttaagtctttggtacctgaggagattcgtggagatgattttcgaagtgaagtgaaagtggaatctaaggatgatagatcagatgatggaaaagaagagaaagttcaacgtaaaagaggaaggcctcgaaagtttgggatgagcagtcaatctgatgataatgggttaatctcaaattgtaaacttcggacatctttaggtaagaagaaagaactggtaggcgatgataatgttgagaaacttgttggtggaagctgctttaacaaggagaaagcagaagtaaaacttgagcatggggaatatgctgaagataaagagattcttggacttgattttaggagtcaggttaaggttgaaatcaaggatgatgaatgtgggattgttgagctacatgatgaagagttgcaagttaaacgtaaacggggaaggcctagaaaggtgcagatcagcagtcaatctgatgagagtcgccctaacacaaactgtaaacttgcgagaactccagaactaagtagccagtcgagtgttgacagaattagtttgagtcgtctgcgtggtagacccccaaagaccaaggagacctcggttagcctttacattgaaaaaggacctgagtctaatggaaggaggatggtacgtaagcgtggaagacctccaacaccacagaaaaagaggaaatcggggatgacagatgaatcagattggaaagcaaagaagagactgaaactttgtgagagtccgttagagtcacggcacaacaatcctttaattgatgacgaaaggatgattggcgaacaacggagtaagcaaactgaagctggaggacattcgagatcaaagtctaagaaaatgctgagtgacagaatactgcagttacttctaactgctggttggactgttgaatataggcctcgaaatgggagagcttatcaagatgctgtgtatcttaatccagagggaaagactcactggtcagtgactaaggcttatcaagtttataaaaaacaattggaaagcaacccgaatgatcaaaagaactctaccactggttctggttttggcttgctaccagaagaagaccttcatctattagagagaacaattcagaaaaaaaggagcgatacaggtaagcaaaggtcaaaattgaaggacagagatactaatgacatcttggtttcaacaaagggaacaggaaaaataaagagggaagaaaaacatagtagaaagcgttgtactccgtcagctcgtagttctttgaaagatgtggattccaaggaggatgggtacatattatttgaagggaaacgcaccatgctgggttggatgattgattcaaccattgtgccacttaacggaaaagttcagtgcatggactgcaagaagacagacatacttctagaaggaattatcacaaaagagggtattcgatgcaactgctgtgatgaagtgttctctgttctcgatttcgaggttcatgctggcgggaatcgcaaccagccattcaaaagtctgtatttagagggtgggaattctctcttgcagtgcctccatgagtctatgaataaacaaagtgaatcacaacttaaagggtaccattttgtggactttggttcgggggatccaaatgatgacacatgtggtatttgtggggatgggggagatcttatctgctgtgatgggtgcccatcaacattccatcagagctgcttggacataaaaaaattcccttctggtgcctggtattgttacaactgctcatgcaaattttgcgagaaagatgaggctgctaaacatgagacttcaactctaccctccttatcgagttgccgcctatgtgaagagaaatgctctaagcattaccctcacactcttgcagatcaccaagcatgcatcaaccaagatggcacggtgcctggtgaaaggagtactgattcattttgtggaaagtattgtcaagagttattcgaggaacttcagttattcattggagtaaaacacccactgcctgagggattttcatggtcattccttcgccgctttgagctccctagtgaggttgccgattgtgacatatctgagaagattgcatataatgccaaaatggctgttgcattttctgttatggatgagtgcttttcacctttggttgatcacaggagtggagtcaacctgcttcaaaacattgtttataattttgggtcgaacttccatcggctagatttcagcagttttctcactgctgttttggagaggggtgatgaaatcattgctgtggcgtctattagtttatgtcgtactaagataaagaaattccctaagtatatgcctctacatggtctcaggatacacggcaatcaactggcagaaatgccgtttatcggaacccgctatatgtacaggcgtcaagggatgtgtcgtcgactaatggatggcattgaatctgtaggccctcctccacttcttatgtctggcaattctgctgctatcctgcttgttttggcgacgggccattctgctttttctcaggttctttcaggcattaagaaagaaatatggaaatag

SEQ ID NO: 2298 - DNA, 2409 bp, Arabidopsis thaliana
  Clone ID: AT_T27K22.C1.o4.tg
atgccggaaatcgatcttatgagagtcgatcattgtgtttccgatgttaaattagatgattcttcttcttctcctccgggattcttcgatggtggtggtgttccgttagattcggatgtgaagttagacgaagaagattccgattctttgaagaagagaggtagacgtggtcgtccgccgagaattttagctaaagcttcttcgcctccgatttcgaggaagagaagagaagatgaagatgtttgctttgtttgcttcgatggtggtagtcttgttctctgcgatcgtaggggatgtccaaaggcttatcacccagcttgtgttaagcgtactgaagcattcttcagatcgagatctaaatggaattgtgtttgtaagaggtgtgttagaagctcagagtatgtagttgtaagggagaacaaaggattctgtggaatttgtatgaagactataatgcttattgagaatgcagctgaagctaacaaagaaaaggttcaggttgattttgatgatcaaggcagctgggagtatctttttaagatttactgggtttctcttaaagaaaagctaggtttatcgttagatgatcttaccaaagcaaaaaatccatggaaatcttcttcttctactgccgctaagcgaagaactactagtcgggttcatgaaaaggatgatggaaattctcctggggttatgaaaatacgtcgtgctaaagtaaggaaaatggatgctgtttctgtgagtaatttgggtccttctttggattcaaactgttctttgggtgacagacttccacaattgactagtgctgctacttgggcaaccaatgagcttttggactttgtggggtatatgaaaaacggtgatatttctgtcttatcaaagtatgatgtccaaactctcgtgctagagtatgtgagacggaataatctacaaaactctcctcagaattctgaaataatgtgtgactccaagcttatgagattgtttggaaaggagcgagtggacaacttggaaatgttaaagcttcttgattctcacttcatcgatcaagttaggtctccagtcacagataattcagccggaggagtcactgaaactatgtcttaccaggttaatgcgggcagaagctgtgataggttaaatacatctgaacagcatcaagaaggggaatcacagcaattgaacgggcacagtattcaagttagaccttccagttctgatagcagaaaccatgcagttgtaaaacctgacacaagtgccactctgtccaataagccaattgatggtttggatacaaatatggtatggttatatggagatccagatgggaagattcatggaccattttcgttatataacctgcgacaatggaattcaagcgggcatttcccaccagagctgagaatatggaggttgggtgaacagcaacacagctccatacttttgactgacgcattaaatgggcagttccataaaacagggttattacagaatcattctatccccaagcaggaagtgacagctactatagctaacgatcaaaacaggtctgtggctgttcctaaaatagagagtagaatacttgacttcagccccaactcagtgtgcactgaccagagtgttatttctagcagtaacagtgtcatcacaaggagctcggatgtgagtaacaaaagcggaaacaattgtagccacgccgtgccattggatttttctctttctaatgaaagggatactgtgggttttatctctctctgggacaaaagaaaagttgaaagttctttgcttgtacaaagcccaataagctgttcactctcgctggctacattacctagaaactcaaactgctctctgccaccacatgaaagatggagtgctggtcagacagatggaaacagtgcagcaacgactgcttgcaatcaaaacggtagtcttagcggctcagctgagaaacaagtcacggctacagtccagtcatgtggacagaactggaatgctgcaactccaagcagtgcttcaaatgtgtgggattcgaactcgggtttgacgtctttcccagacaatcaagaaatagactttttagatctctttagtccaactttcaaattcaactttgcatctactaccactgattggcaacccattgtggctggacctgacgaatgcgacgaatcagtctcagatcttttggcagaagtggaagccatggagtcccaaaaacgtcttccttctccaacttcgacattccgtggtcctgaagaattattaatccggcactcaataaacgatagcttcagtcccgcagaaggacatagcccagcactagatgtaagcaaaggtgactccatgagctccacaaacgatcttcaaatgcattcacgatctaacagcaccgtgcatttttag

SEQ ID NO: 2299 - DNA, 3744 bp, Arabidopsis thaliana
  Clone ID: AT_F24M12.C1.o160.tg
atggagaatcaacagaagcaactccagcaaggcgtgccggagttggcttctttggctggtcgcgaagagagttccgtcagaggaatcgatcttatgagagttgatcaatgtgaagagatcggtgttaaccaagctaatacgccgttgcatattcgtccacccccaccgccgccgaagaaggaagacaaggaagaagatgtttgctttatttgcttcgacggtggagaccttgttctctgtgatcgccggaattgccccaaggcataccatccagcttgtattaagagagatgaggcattctttcgaacaacggccaaatggaattgtgggtggcacatatgtggtacatgccaaaaagcttccagttacatgtgttatacatgcactttttctgtttgtaagcggtgcattaaagatgctgactatgtgattgtgagaggtaacatgggtctttgtggcacatgtattaagcctataatgctgattgagaatattgctcaaggagataatgaagcggttaaggtggatttcgatgacaagcttagttgggagtatctattcaaggtatattggctttgcctgaaggaagagctgtctctaactgttgatgagcttactagagcaaataatccttggaaggaggttcctaacactgctcccaaagtggagtcacaaaatgatcataccaataacagagctttagatgtagcagtaaatggaacaaaaagaagaaggaccagtgattcccctaccttacccaacaagttggatggcaaaaatccaagtaatatcctaaagaaggctcctggagatacgagctgggcaacaaaagaactcctcgagtttgtgtcgttcatgaaaaatggcgatacatctgttctatctcagtttgacgtgcagggtcttctgcttgactatatcaagaaaaaaaatcttagggatcctcttcagaagtctcaagttctttgtgaccagatgcttgtgaagttgtttggaaaacagcgagtgggtcactttgaaatgcttaagcttctagagtctcatgtccttattcaagagaaaccgaaaggcgctaagaccacgaatggtgaaactactcatgctgtacctagccaaatagaggaggatagtgttcatgatccaatggtcagggatagaagacggaagatgcgtaggaaaactgatggcagagtacaaaatgaaaatctggatgcatacgcagccattgatgttcacaatatcaacctgatttatttgagacgtaaatttttggagtctcttcttgatgatatcaacaaagttgacgaaaaggtggtaggcacaattttgagaatcaaggtatctggcagcgaccagaagctggatattcacaggcttgttcaagttgtaggtacaagcaaggcaatagcatcctaccaacttggcgcaaagactacagatgttatgcttgaaatactgaatttagacaagagagaagtcatctcgattgatcaattatcagaccagaatatcacagaggatgagtgcaaacggctgcgccagagcataaaatgtggcctcaataaacgtttgactgtggttgacatcttgaagacggcagcaacactgcaagccatgagaatcaatgaggctctggaagctgagatattaaagctcaaccatctccgtgatcgggcaaaaaagctggagcttctaaaatcacctgaggaacgtcagcggcttctgcaggaagtcccagaagttcatacagatccaagcatggatccaagtcatgcattatcagaagatgcagggttgggtacaaggaaacaagataatcacgtaaaggcacaaagtaaaggtccacagaataaaggggttaacttgaacaacgtgggaaataatgtgcagaaaaaatatgatgcaccaattttgcgaagcagaaataacgtacatgctgataaagatgattgttctaaggtccacaataactcatcaaatatccaggaaactggtaaagatgacgaggagagtgaaatatggcattatcgagatccaacaggaaagacccagggaccgttttctatggtgcagctccgtagatggaaatttagtggccattttcccccttatcttaggatatggagagcgcatgagaaccaagacgagtctgtgcttctgactgatgctcttgctggacggtttgataaagcaactactttgccgagttcttcttcgcttccccaagaactaaaaccgtctccacacgattctggccgcactggcgcggatgtgaactgtcttcagaagaaccagatgccagttaacaccagtgcaacctcctcttcctcctctactgtcactgcccattctaacgatcctaaagagaaacaagttgtggctcttgtagcttgctctggaaaagttgaggatggtaattctgttcgtccccagcctcaagttagttgtccggcgtcgatctctgtggttcctggacacgttgttactcctgatgtaagagaaactccaggaactgatcaatacaatactgtgcgggcagatggtaaccataacacaactaagactctggaggatgaaacaaatggtggttctgtttccataaacggttctgttcatgcaccaaacctgaatcaagaaagtcatttccttgatttccctagtcctacacctaagtcgagccctgaagacttggaagctcaagcggcggagactatccagtctctgtcttcatgtgttctggtcaaagggccatctggtgtcacttggagcaccacaaccacaagtacaaccgatgctgctactaccacttcaagtgttgtggttactggaggacagcttcctcaagtaattcagcagaatactgttgttttagctgcaccgtctgtaaagccaattgagttggcagctgatcacgccacagctactcagacttcagacaacacccaagtggctcaagcatctgggtggccggccattgtggctgaccccgacgagtgtgatgaatcagtttcagatctattagctgaagttgaagcaatggagcagaacggtttaccctcttcacccacctcgacatttcactgtgatgatgacgatgatttgaaagggcccgaaaaagatttctttaaccctgtggcacgcatgtctctcacacctgaaacatgtagattggatgtctctcagacgagtatcctcgacaatgtctctgccgggaaaagctcaatgcttacagaagcaaaagacaatactcccttcagccactgcggaactgctggtccagagctcctgctttttgcaccgccaccgccaccgccaactgcaataagtcacgacctgactctaacgacaacggctctcagactaggatcagaaaccacagttgaagctggaacggtcgagaggcttcctaaatctgttttgggagtaagttcggaaccaagccctagatcattatcatctcatgactcaagctcagcccgtggaagcaccgagcgaagtccacgagtgagccagccaaagagatccagcgggcacagcagagaccggcagtggttgaacaacggtcacaacagtagcttcaacaacagtcataataaccggcaatggccatacagcaatagccatgggtatgaccatggatcaggttcgtatgcagcccatccgcccaaagggctgaaaatatgtaaattctatgagagtggatactgcaaaagaggtgcatcttgtagtttttggcacccctga

SEQ ID NO: 2300 - DNA, 2652 bp, Arabidopsis thaliana
  Clone ID: AT_F18C1.C1.o6.tg
atgggaaagagaaacacgtcttgggctagaaattctaatagaaaggttagatctaaggataagggttcagatgagtcagatgaggattatgtgatttccgacgaggatgaagaagagtctgaggctgatctcaaggaggagtatgcctcatctgttgacggtgagccatcctttgatggttttaatgggtctgatgcggtggaggatgaggaattagatgaagtggaagaggaagatgtgatgctgaggaatgttgaatggccaaaagtgaagactggtcctcgtggtaatcgaaaaatcacgggatgtaagtcaagaaagacgaaccaggtggttgtgtctgacaacgaggatgtggatctcgatgatgcggatgatgaagatgatgagataaggaattcaaggaatgctgttgggaaaagtgggtctttggatggagagaaacaccaaaggataggtttaggaaagcgaaggagagttttctatgagatagaggatgaagatggagactatccagaggaggatggtgatgaagaggaagagagggatgtggaaaatgtggattcaaattctttgcatgatggtgaagacgggaagatggcattggaagagcaggacaatgtgtcacacgagacagaaaaggaagatgatggagattatgaggatgaggatgaggatgatgatggcgatgaagattttaccgcagatgaagatgtctcattagatgaggaagaggaggaagaaatcattgcatgtaacaaaaatgcactgaaggtttgtaagggaaacaagcgaaagcgaagatctggagaagggcgtaaaagaaggaagaaatgctctgttgcaaaaacccgtttaacaaggggaagaaagagacgtgtgagaaacacaaagaaaggagttgatgaagatgatgatgattttgtagatgactgcttacctgcaagaaagaaggcgaagacaaagtcatcaaggccaaggccaaggcgtcggtgtaccgttccatcagattcagacgttgcatcgtctggagaatccgactatgagtatacaatctcggaggaggaaagagagcagataagagaagccggtagtttgttgaaaagtagtgtgaaccatgcatcatctataagacaaaccacggtcaataaggatttgccacagcttcgtaagtctcctgtgaagaaaggtgaaaagaaggtagagctagtgaaaagagatgtgataaaaaacgtttgtgggatttgtctgtctgaggaagacatgcggagattgaagggaacattggactgctgtagccattacttttgtttcacttgcataatggagtggtcgaaagtagaatctcgctgcccactctgcaagcagcggttcagaacaatcagtaagcctgcaagatctacacctggagtagatttgagagaagttgtgatacctgtacctgaacgtgatcaggtctatcaacctactgaagaagagttgaggagttatctcgatccctatgaaaatataatatgcacggaatgtcaccaaggtgatgatgatgggcttatgttgctttgtgatctttgtgattcatctgcccatacgtactgtgttggtcttgggagggaagtacctgaaggaaactggtactgtgaaggttgtagacccgttgcacttggatcagctagttcccaaacgcatattatatccgagcaacaaaggggtagtggcttttacagtagaccgtcacctcttgtagtttcagggcaatatcaagatgtgtctttaatagtctccccacgtacaccatttttcaatggagagaacctattttctccaaggattcctaatggtgatgctcaaggttcttctccatccggcttaggggcaaccacattatccagaagaaggacgcttcacagacacatacaaaatattatcaacggtgatagacttattaatatgggtgctagaactggtggaacatcgagtgatggtttcgtgactacacaaataggtcatggcagaacaatcgacccatctcagcctgtagcgagccaagaaacagggatatcgttgtatgcaatctctgaggaaagactacccaacaacaattcattgatttctgcccatgaccctgagcttttgtctccaaagttagatgaatttggaagtgaagaagcattcagacgtttgtctaataatacatttcttggtgagcgacctatcgatttaggattccatcatggactggctcagggtgatcccttggttagtaatcaacaacgtctacacagccacatgccaaacacaatgtcttccatggcaggagaacgactgcaagaaagagttaaagcccatctcaaaaacttgtccagtcaaaacgacttaggtcaaaccactttcgacgagatttccacgtgctcaatacacacgatactggcagcttgtgggcttgaacacgagagcagtgaagtccatcttgttccgccaccagtgacgtgtactcaccatcatatgacacctggcagcagcagcagtagcagtagtggtagtagcctgatgaaagggtgttgctattcttgttttgattcatttgtagaagatgtagttaagatgattctagacacaagacaaccccattggttgagtctagggctccactaa

SEQ ID NO: 2301 - DNA, 753 bp, Arabidopsis thaliana
  Clone ID: AT_T21C14.C1.o10.tg
atggaaggtggagctgctctctacaatcctcgaactgtcgaagaagttttcaaggatttcaaaggtcgtcgtactgccattgtcaaagctctcaccaccgatgttcaagagttttaccaacaatgtgaccctgagaaggagaatctttgcttgtatgggttaccgaatgaagaatgggaagtgaatttaccagctgaagaagtgcctcctgagttaccagagccagctcttggtattaactttgctagggatgggctctctgaaaaggaatggctttcgcttgttgctattcacagtgacgcttggttactgtctgtctcgttttactttggctcaaggttttctttccacaaggaagagaggaagcgtttgttcaacatgatcaatgatgttcctactatatttgaagtagtgactggaatggctaaagcaaaggacaagtcatctgctgcaaatcaaaacggaaacaaatccaagtctaactctaaagttagaacttcagagggaaaaagctcaaagaccaagcagccaaaagaggaggacgaagaaatagatgaagatgatgaggatgaccacggggaaaccctttgtggagcctgtggagacagtgatggtgctgatgaattctggatctgctgtgacctttgtgagaagtggttccatggcaagtgtgtgaagatcactccagctagagctgagcatatcaaacaatacaagtgcccttcatgcagcaacaaaagagctcgagcttaa

SEQ ID NO: 2302 - DNA, 3198 bp, Arabidopsis thaliana
  Clone ID: AT_mzn1.C1.o60.tg
atgggtctttttgattgtagggtttatagggtttttcattttctcaaccttttgagcaatttcggatttttttcaaggagtcttgaagaggggtctctgggttcttggtatttaggaactgtaacttcagctaaaaagcgacgtcggcgttgtatcagatatgacaacattctctctgatgatggttctggtaatcttgtggaaactgttgatgtttctgatatagtagaagggttggatgattgcactgatgtttctgatactttccgtggacgtttaagacctgtgccgccaaagctggatgttgctaaactgaaccttgcgtatgggctctgcgtcgatgtgtttttcagtgatgcttggtgggaaggtgtgctctttgaccacgagaatggttctgagaaaaggagggtgtttttccctgatttgggtgatgaattggatgctgatcttcaatctttacgtattactcaggattggaatgaggctacagagacgtgggagtgtcgtggcagttggttgtttcttgatttgattgagatatataaggaatataactatctcccggtttcggtaaagcaactttggtatgacatacgagacaggattggttttgtaagaattcaagaatggacttgctctactaagcatttatggcaagatttgatgctgggggtgattgaagataatcttaaaatcaccattgaccagtttcttcatgattttgacgctgaaagataccctcaattgaagctcttaaatgaagcttctcaggcggtttatgagaccaatgcttgtcttagcggtatgctaacgattgctccacaagaacaccaattttcctgcattgacaaagatttcaaaccggcaagccagagatgccagtccttgtctgtcttgacttctgtttctggcataaggtcagaggcgagtgacatcaataaggcaacagaaatttccagcaagaaatctactgccgctcataaaaaggatatactacacaagaaacctggaatctggcatcctttcgactgtcttgctaaatcaggcccacaagctgtgtcgagctttatcaggtcaccgttactgcccatggccatgcatgtcaggatgcatcttaagtatatgggatggaccatagaacatatggtagacgaagctggaaggcaaaggtttcgctacctctcaccaaatggaagactaaaagagcattctcttcgtcaagtatgtttcagactgaaacaacctgataaatccctgactactccggggatggctaaccctccttctctgtctagtgaaaaccagacgtatagcacccaggaaatgaggtctattgttttggcattgcctgcctttaatagaagtgtcgctcttggtgaaggattgaagctgtctactgataccttgcttgagtatgaaacgcaaggaaacgaggaggtctttacgagagaaagccgcaatttttgtcccaaaaaagcctttccgggtcagaaagagacactccgtgtcaggatcgagccaaaaacaaaagctcaaggcatcatcctaaggttaaaaagtaagcgtaaacagacacctaagaaggacgaagtgattgtaggtttacagaatgtcaatcggagcatgagaagggggcacacttcaaaaaagttaatggatatcaagaatcgagtaactagtcgtggtaaaacccgtgtgttacgatcaagaaaaagagcgcaacgagtaataactcccatctcaagaaagcacagtccacgaaatattctttcctggctcatggacaacaatgtggttctaccaagggaaaatatacgatgctgtaaccaaaaggatacaactgtgagaaaagaggggaaactaacccgtgagggaataaaatgcagttgttgccgtagagttttcaccataaatggctttgaagttcatgctaatggtgcatcctgcagcggagcagccaatattttcctggatgatggaagatctcttttggaatgccaagtagaagcctataaaaaaagaaagaaagcacaaccacctgatatgttgaagatgaaattgcgtcaaggggagaacgatgtattttgctccgtttgtcactatggtggcaaactgattctctgtgatggatgtccatccgccttccatgcaaattgtcttgggctggaggatgttccagatggtgattggttctgccagtcatgttgttgtggtgcatgtggacaattctttctaaagactactagcacaaatgccaaggaggaaaagtttatcagttgcaagcaatgcgaacttaagtatcaccctagttgcttgcgttatgatggtgcctgtgattcattggataaaatcttgggagaaaagtggttttgcagcaaggactgtgaagagtccttggaaccaaatatgtatggagatgacgcttctaaaattgaggctgcggcagaaaatcactgcatactcagtgttgcccttgatgtgatgcatgaacttttcgagcctgtaaaaagacctcatggtggaagagatcttgctgaagatgttatttttagcagatggtcaaaattcaaacgtttgaacttcagtggattttacacggtacttctagaaaggaacaacgaactggtttctgtggctactgttagaattttggggaaaaaggttgcagaaatgccctttattggtactagattccagcatcgccagcgtgggatgtgccgggttttgattaatgaactcgaaaaggtgctcattgacttgggagtagagaggttggtcctgcctgcagttccatgcgtgctgaacacatggatcaactcatttggatttacaaagatgacaatctccgaaagaaaaaactttctgaaatttaccttgttggagttcggacgaacaatattgtgcgagaagatcttgatcaagagcggcgtagcagatccaattccaagtatagcatctctaggtgaacaacagtgtgacatcctcaggattgaagacaattctgcttctgatgatggatcagaagtacatcaggcagaacagcacctcgaggagtctaggtccactaaaaatccaccagagtatgttgttcaaactctcactcctctccatcataatccaaaaacaccaacaacgagaaaaaaaaaacatgatacaaatgccttgcatgggtcctgggagagaaccaatacttaa

SEQ ID NO: 2303 - DNA, 3957 bp, Arabidopsis thaliana
  Clone ID: AT_YUP8H12R.C1.o24.tg
atgacgcagtcgcctgttcaaccgcctccgccgctcccagctcagccgcattccgccgccggaggtgtaataagaggcgatgtacaggttaggtgcgcaggctgtcgcgtgattctgagggtgaaaaccggcgttgtggagttctcgtgtccgacttgtcaacttccccaaatgttgccgccggagcttctttctagggcacggccgcagtttccgcagtctccacaacaaccaccacagccaattcagacgcttccgccaccgattcaacagcagcttaagcctcttaatctacctaggcctccggttccggcacatggaatcgatccgacgaagatgcaattgccttgcgctaactgtcaggctatcctcaatgtgcctcatggactcactcggttctcgtgtcctcagtgccatgtcgagctcgctgttgatgtctccaagcttaatcggtctttaactgcttctcaatctcattctaatcctcctactcctgctgctcccacagtcccgcctccgcctcctcccgaagaagtcaatgaggaagctattgaagtggagagagaagaagatgaaggtggaacggctggagaaacgtttatggattatcgtcccccaaaactttcgatcggacctcctcatcctgatccaattgtggaaacatcatctctatctgcagtgcaacccccagagcctacttatgatctcaaaatcaaggaagagcttgaaaggtcaaaggctttatcgtgtttgcagattgagacattagtttacgcttgccagaggcatctccagcaccttgctgatggtaccagagcaggcttttttgttggagatggtgctggtgtgggcaaagggcgaacaattgccgggtggatttctattggctcagacttgaaatatgatgcaagaagggacttggatgatgtgggtgctacatgcgttggagtgaatcctttgaacaagctaccctattctaagcttgactcgaaaaatgttggtattaaagaaggagtggtattcttgacatacaatagcctcattgcttcctctgagaagggccgttctcgtttacagcagcttgttcaatggtgtggaccagaatttgatggtctcttgatctttgatgagtgccataaagcgaaaaatttggtacctgaagctgggagtcagccgacacgcatcggacaggcagttgttgacattcaggataagatcccccaagcacgtgttatttattgctcggctactggggcatcagaaccacgaaacatgggttatatggtcaggcttggtctttggggagctggaacaagttttagtgattttaacaaattcctaggtgcccttgataaaggtgggacaggagcgttggaattggttgccatggatatgaaagcgagggggatgtatgtatgccgaaccctgagttacaaaggggctgagtttgagattgttgaagctcgtttagaagcaggaatggaggcaatgtacaataagtctgcagaattttgggcagagctacggatagagttgttgtcagcaagtgcttttctccctaacgagaaaccaaattctagtcagttgtggagattatactggtcaagccaccagcgtttctttagacacctgtgtatgtcagctaaagtccctgtaactgtgaggttagctaagaaagccttgtcaacaaacaagtgtgtagttattggccttcagagtactggagaggctcgaaccgaagaggctggtcttgagcttgatgattttgtctcgggacctcgagagctcttgttgaaatttgtggaagagaattatcccttacccgagcagcctgaacctctgtcagaggatgatagtgttaaagaacttcagaggaagaggcattcagcttcacctggtgtttcaattagagggagagtaagaaagatggcaaagtggaaaccagatagtgataatgaaagtgatttggagtctgaaggtgggtttcctagtgaaaacatgtattctgctgactctgctgacgattctaatgattctgatgatgagttccagatatgtcagatatgcagtggggaagatgaaaggaagaagttgctccattgttctgaatgtgacaagctttttcatccggactgtgtggttcctccagttatagacttaccatctgaagcgtggatttgcttttcttgtaaggaaaagacagaggagtacattcaagcaagacgtctttacattgccgaattgcagaaaaggtatgaagcagcgcttgaacgaaaatcaaagatcatagagatcatccgttctctgaatcttccaaacaatcctttggatgacatcgtcgatcagcttggaggccctgaaaaagttgcagaaatgacgggcaggcgaggtatgcttgtaagagcatcgaatgggaaaggtgttacatatcaagcaagaaacacaaaggatattaccatggaaatggtcaacatgcacgagaagcaactatttatggatggtaaaaagttggttgccattatttctgaagctgggtcagctggtgtttcgttgcaagcagatagaagggcagtaaatcagaaaagaagggttcacttgactttagagcttccctggagtgctgatcgtgcaattcagcaatttggaagaactcaccggtcaaatcagacatctgcacctgaatatagactactcttcactaatctcggtggggaacgccgctttgcctctattgttgcaaagagactagaaacacttggtgctttaacacagggagaccgcaggaaagtccctttcttaactatttcttataactttggtaaaaaatccttgatggtgatgtatcgaggcataatggagcaggagaaactacctgttcttcctcctggatgctcgattgatgaacccgaaacagttaaagagtttttgaccaaggcaagggctgctcttgttgcggttggaattgttagggacagtgttctggccaatgggaaagatgttggaaggttttcaggacgtattattgattctgacatgcatgatgttggacgatttttgaatcgcctcttaggattgccacctgatatccagaataggctgtttgaattgtttactagtatattagacgttcttgtacataatgctcggatagaaggaagttttgactcaggaattgtggatatgaaagctaatagtgttgagctactgagcactccaaagaccgtccatgttgatcaaatgtctggtgcctcaactatgctctttacttttactctagatcgtggtgtaacatgggagtctgcgagttcaatgctagagggaaagagaagggacgggcttggttcagctaatgatggcttttttgaatctaaaagggaatggttaggaagacggcacttcatattagcatttgagagtgccgcttctgggttgtttaagattgtacgtcctgctgtaggagagtcgatcagggagatgtctctttcagagttgaaaactaaataccgaaaactatcttctctggagaaggctcgtactggttgggaggacgagtacgaagtttcatcaaaacagtgtatgcatggacccaagtgtaagcttggggagtattgcacggttggacgtaggatacaggaagtaaacgttgtgggtggccttattcttcccatctggggaaccatcgagaaagctctctccaaacaagcccgtcacagccacaagagaattcgagttatacgcatagagactacgacggataatcagcggatagtgggcctctccatcccaaatgcagctgtagaaactgttttacaaggtattgcgagcttatctcatgatcttgagacatcatatgataaatccgacaaggaaacagaatggttatctcgacagtcgttgatttgtgtctgtctttttgtttctgcagatttagcatgggttcaagagattgatgattaa

SEQ ID NO: 2304 - DNA, 1296 bp, Arabidopsis thaliana
  Clone ID: AT_F28H19.C1.o2.tg
atgtctttacatgtcaagggacctgtttgtcaaacttgtggcgacataggttttgaagaagcacttgtcttttgtgactcttgtatgtttgagtctattcaccgctattgcttagggataacaccgattccttttacggaatacataacttggatttgtgaggattgtgataacagtgagagtgattctgattgcaatgaagttgatcagactgttaagaagaagaagaagagtagaaatcaaccccttgtggttttagctgaggacaatgtgctccaggaacctttggaggggtctaagagagaagaaagctcatgtagcagaaaacctcatgaattgacttgtttagatggaaatggagaatctgttttggaggctgcagattcatctagtgtgccagatcatagttcttgtactagcaaaaggaaagaagttgatcagactgctaatcttggacatatcttggagaggagtgagaaaaagaagaagaagaagaagaagaaaaagagcatcaatcattcgccaccggttttagctgttgaggaccatgagcttcagggtactaccaatgttgttgaacctgtggaggtgtcttcttcttcaccaactaaagaaacgatggagtctaagagacaagaaagctcagatagtagaaaacctcatgaattgacttgtttagttggagattcggagaccgctaattcatctagtgtgccagagcataattcttgtgctgtcaaaaagagaaaattaagttctggaaacaaacagattcagttagctgatgggagtagttcttgcagagtggctgaatcaaatatgcctctaacgttgacatctaggaactatagagcacaacctatcaaaataccgatatggaggggattgatgtctgttaaaggaggaaacagctgtaccatggatgggattgttgctcatgtatcaagcttagcctgccctaaagtccatgaaacggctagttcattaaagggtcggctctctgctgaaatacttcctaggttggaagtatggccaaagacctttttgaagaatggaggacctaaggatgaaagcgttgccctttttttcttcccttccagtgaaagtaatgatgaaaaggtttttgattcccttgttgataaaatgaagaagaatgattctgcgatgagatgtgtgcttaatgatgcagaacttctactcttcacatcttatatgttaccaaaggattcttggacttttaactcaaagtactacctgtggggcgtcttcaagcctagacagacttctcgatattag

SEQ ID NO: 2305 - DNA, 1050 bp, Arabidopsis thaliana
  Clone ID: AT_MOP9.C1.o18.tg
atggtggctgtgaggcgaaggagaacacaagcgtcaaaccctagatccgaaccaccgcaacacatgtcggatcatgattccgattccgattgggatacagtctgcgaagaatgcagttccggtaaacaaccagcaaagctgcttctttgcgacaaatgcgataaagggtttcatcttttctgtctcagaccgatcctcgtttcagttcccaaaggctcttggttctgcccttcttgttccaaacatcagatccctaaatctttccctcttattcagactaaaattatagatttcttccggattaagcggtctccagattcatctcaaatctcaagttcttcagatagtattgggaagaaacggaaaaagactagcttggtgatgtcaaagaagaagagaaggcttcttccatacaatcctagcaatgatcctcaaaggaggctagagcaaatggcgtctctggccactgcgttgagagcttccaacaccaagttcagcaatgagcttacttatgtatctggaaaggctccaagatctgcaaaccaagctgcttttgagaaaggaggcatgcaggttctatctaaagaaggcgtagagaccttagccttgtgcaagaaaatgatggacctcggtgaatgcccgccacttatggtcgtcttcgatccttatgaagggttcacagtagaggcggacaggtttataaaagactggacaattatcacagagtatgttggagatgttgattatctgagcaatagagaagatgactatgatggagacagtatgatgactctacttcatgcctctgatccttcgcaatgtctcgtaatttgccctgacagacgcagtaacatcgcccggttcatcagtggcatcaacaatcactcaccagaagggaggaagaagcagaacctgaagtgtgtgaggttcaacatcaacggagaagctagggttcttctcgtagctaatagagacatatcgaaaggggaaagattgtattatgattacaacggatatgaacatgagtatccaactgaacattttgtataa

SEQ ID NO: 2306 - DNA, 1479 bp, Arabidopsis thaliana
  Clone ID: AT_T14N5.C1.o23.tg
atggaggaggcgacaagtaatggtaaaggtacagagcataatcagccaaatggtttggtggaaagtgaagcattgaataattggagtgcaggatgtggtgctatggctaattctgcaaatgctagttccagagatagtaagaagatacaaacatataagcggagaaaacttgggagatcttattctgctaataaatgttcggaaaatgatagattttccatggaaggtgttagtcactcagaaagccgggagtctgtctcttatgaaaggtttagcataagaacccatcttactggtgaactcccgaagcctcccagtccaaataaaccatcaagtgaatccaccaatcatgagacggtgacagccggttgccagcatgttctgtcccatgttttagcttcaaaggagtttgcatccctaaataggttactttccgaaaatcttcaaggggtcaagattgatgattttacgagcagaactctgatagacaccaggatgaaagagggtgtttatgaaggttcacctctgctcttttcaacggatctccaagaggatgttggtaatgatatggctgttcttgctaatagtctcttagagctttcaagaacctcctataaggaacagttgaagcagttctacactggggaatcgaagccttgtcctaatgcagagaacatcagaaatgacagtgtttctgacatttgcaagctatgtggagagaaggcagaggcaagagactgtttagcatgtgatcattgtgaagatatgtaccatgtctcgtgtgcacaacctggtgggaaagggatgccaacacacagttggtattgtctagactgtacatctaagggaatcggatcacctcatgagaattgtgtagtgtgtgaaaaaatgaaaacccaagggatgatgaagacagataacagatctgttgatacgagtacagaatgcaaagaggattcgaacgaatctgaagagaattcaagctgtaacatgaatcatgaggtgcaccacgtagagatgagtagagattctgaactctgtaggacctgtggaacaaaggtggatagtggcggaaagcaaataaaactacacggtgtccgttggtattgctcgtcatgcttatgcagaaattgcctaactgacaaggatgatgataaaatcgtcttgtgtgatgggtgtgatgatgcatatcacatctattgcatgcgacctccatgtgaatcggttccaaatggagaatggttttgcacagcatgtaaagctgcaattcttaaagtccaaaaagcacgaaaggcttttgagaagaagatggagacggtgcagaaacagaaaggaataaaacccaagaatctccaaggcaaaccgcaaagtaaagacaatggagaattggatcaaagcgtaggaggaatggacatgcttctaaacgcagctgacacactgaaagatgaagaacagatgacattccaatccatcaaatga

SEQ ID NO: 2307 - DNA, 2232 bp, Arabidopsis thaliana
  Clone ID: AT_MQC12.C1.o3.tg
atggatatagcgaccagtaatgctccaatgaatcttgaatccgtcgcaatggttgatggcaacggagcagaaccggtgtctccgcctgcgaaaaagccacgttttgacgaggagatgaatagagtggcggagattgttctggttctatcggcgttagggaggatgcgtggtggggaaactccgacggcgttggaactcgagctgatgtttgaagctaggtccaaattagctgggatgtgtctggaatttgaccctaaggatattattcgtaaggatgatgttaaatctgtgattgaggatttgggtttcaatggtaagcttaaagaccagagattaggttttcgagctcctacggtgactatctctgagaagctttctcttggtaaacgaaagatggaagaagcagaaaagtatcctaccacttcgacagtatccactggatatacattgtcacagccaaacggtagtcttgcatctcctggtggtcttgcgaataaagcttctgtggctcatcagtggcctagtagtgaagttgctactgctaacactagtggaagccatttcaaattggacagacctcagatggtacttaacggtgcttctcaagggactccagtttcttccgcgaattattatgctgaaccctggtctgcccaacttccatccaccatatctttcagtactgcaccagataagaaggttccaattcaaagttctgtcaggacagcagatccaagctttaggccattcaggcacggtacattcactggcacaaatcagccaatgcattacagtcaaacttcttcgttcggaggcaaccatactgaaattgctaagataatccataaatttctgcaaccacgggttaaacaatatcctttgtggaatccaccttcaagagagtatatgagcagggcaatggcatgccagatatgtgaagttaccatcaatgaaatggacactctactgatttgtgatgcctgtgaaaaagcataccacttgaaatgtctgcaaggaaacaatatgaaaggggttccaaaatctgaatggcattgctcaagatgtgtgcaagcattcaatgggaagccatttcctcctacatatgggcgtgcgactcgtgccgtagcgacgactacagcaaaaatgccttttagggcagccggagttctatcatcctcagcaaagaagattggaccgatggatataaaggctaatcaacaaaaaccaattgtatctacgttttcaagattgcaaaatactggcttggtttctggagcagcaactacatctcagtttgagtctgctagtgtaaatgcaaagacaactgcaagcgcagcaaagactactaacattggatcacagggctctaaggaaaatgttgcctgtggtgctaattctccagcaccggtatcgcttaccgagactccaaatcgtacaggaatcgcaagtacaatttctgtgataaacaatggcctcatttcaaaacctttaacaccagttggtactatgagcagcacttctccattgcctgttgttaaccaacttcccgtgaatgcaacctcaaacgcaagtccgagtacaccaataactgctagccttgtagcacaagccccgacagttacccaaaatggagatggcagctcaacggcctctgggactgctgaccattctatattgaatgctgacattaccactcaagttcatacattgactgttacttccagtagtaattctcaacaggcagtgtcacattctgaggttgcaaaagcaactgaagatgcagctcctttggaaaatgtttccgagtgtgagaaaccatcagaatctacatctcacccagactctctgaatgataaaacaatatcagagaacgttcaagaatcaagtaaggatgctaaagttgattctgaagcttgccagaaccacccaacagcatccccagccactgttgtaccagatcaagactcgacgatcactgctgcaccatccgtgacacaagaggattcagctttcaatacagagaaaacaccacctcagccactttcggtgtcatctaactatgattcacaaaccgagaaggaaacaccaaatgtccaagattctgtacataatgttccgggagattcagagaagggtaaagggttaaatggtttagatgatagacatcaggaacagccttctgagccggagttctataagtcagattcggtaaaggaagaaaatgctgcctaa

SEQ ID NO: 2308 - DNA, 1962 bp, Arabidopsis thaliana
  Clone ID: AT_F15E12.C1.o11.tg
atgggtttccgatacaacggaacggagcttttcgcgatcaaattaggccatgagacgaagagttctctgattccgttgtacattgttgaagaaaatgtgaaacattcatcggaaccctattgcgatcactgtcgttgcacaggttggagtaaccattttgtgtcgaagagaaaatatcacttcattattccgattgatactgagtggagtttgccattagaagatgatgcttttgattctcaatcccatgttttacatggtttgattcattgcaatggttttggtcatttggtatgtgtcaatggtatggaaagtggttctaagtacttatgcggaagagagattgtggacttttgggatcggctttgtaatagtctcggagcaaggatgattactgttgaagatttggctaagaagaggtctgtggaactgaggttgttgtatggtgttgcttatggtcactcttggtttggaagatggggatataagttctgttgtgggagttttggtgtgaccaagaatgagtatgagaatgccattgaggctcttggttcacttgagattgatcaaatcgagtttgatttcggtgagcttcgacaatctaaggagatcaatcaggtttttcgatattacagagaaatgagtgaaggacacttgaagactttcagagatcttttgcgttttatgctcattataaagtctcatgcttctcctcaaaagcttcttcctgtgactcctcctctcttgacagattctcctcatcagaagagatcaagccgattgcttttgaagaaaagtgatgttgcggataatgacaagtctccgaaatataggaactatagtactgtggctgcaaatttgggtagtagatggcctgtgaggagactaatatttgcagctgaagtgatagtagagtcactgaaagagatgaaagcgttgaagcagaacggtatgactcgacaagatgttagggattcagctagattgcatattggagataccggtctgcttgattacgtgctgaagtcaatgaacaatgtggttgttggggatgttttggttcgacgttatgttgatcccattacacggatcctgcactatacaatacaggatcttgatgatgcggtgaaagccaaagaaccgaagaaaaaagaagctgttgtgctagaggagattactccgttgaggattcttactccattgaaacctggagctgacgtttatggagatctgttgttactatacacaaatgtgctgttgaactatccagaatctgagctagtgagatctgcaactcaagcaatcttagactctaaacacttcatcaaagagtggcctatatgggacaacaatgacacagtcttgcaatttctttgccgtatcaatccaagtttggttgatgtgagatccgaacagaccacagagctgcctccaggcgaattagtcacagtgccattacaagctacagtctatgatctaaagcaagccattgaagagaccttcagagatacttactgcatcttgtcaaattttgtagtgactgagattgatgaggttgaagaagatatgagtttgatcggttcttgttctgctttaacagtgagaggtcatgggatagatttggaatcaaaactcaagtgtcaaggtggatgtgatacatggatggtgaaatgtatttgcagagctagagatgatgatggcgagaggatgatatcttgtgatgtttgtgaggtatggcaacatacacgatgttgtgggattgatgattcagatactttgcctccactttttgtttgttcgaattgctgtgaagaatttgcagagcaacagaggaaagtgctgcagccaaagtatgagtttccaagttcagagaatgtgtttttgcttgaatctgcagatgatttctttggagatcagagatgtcttggtatgatttttcctgaagaaaactatcttttgtaa

SEQ ID NO: 2309 - DNA, 1962 bp, Arabidopsis thaliana
  Clone ID: AT_F27F23.C1.o6.tg
atgttggtggaaagttcgttcagctcttctgttgaaactagtctactgaacgtatccgagtatcaagacccatttgctgcatatgattggacgtctcttgctgaatcttatcagatgatccacaaagttcccgaacagtctcaagtaagctttcttaaaaatgttccagtcactgatactatgaatcttgatgaatcaaaacatccaaaacatcaagaaagttgttcagagaaatctgttatgcataaggtatcgggaaaggctctgacttctcttgtgtatcgtcgaaggaagaggaccttaatacctgggggaactgaggaacataacctaggaaaaatcaggaaacaggatgattctcttgatgactctattgtctctttatataaccctgaagaaagcacaaaaaggaaaaatcgcttcaacaactgtcttgtctatagccggaaaaaaaggagaggggaatccagttgtacttttactggagaaactacgataaggggtgatgggcttgatgatgcttttgtttctgagcatgactgtggagaaaccaggagaagaggcaatcgatcagatgattgccttgtgtatagcaggaagaaaggtagagtgaaatttaatagttgtagttttagcaaacatgtcactggacgaaccaagataagctatgatcaagctgactcttctgcatgtagccaaatgggacagatagttaaagctgatagttctttaactagacctaagcctggagaaatcaagaaaagtggtcatcaacttgtttacagccaaagaaagcagttagtgaaatctaatgggagctttactgaaagtcatgttggaaaaaccaagagaaatggagatagatctgaggtcttacttacgtatagccggaggaagaagagtgggaaatctattggtgttcgggttaatggctttctagtttatacccggaagaagttaaaattcagaggaccttttgctagacgtgacctaagcgaaaccaagaaaaatggtgatcaacgttctactgtcagttctcgagaacttttagacgatacccaagttaccgaagtgacatgttcttctgatggaacaaatgacagctgctcctcattgaaatccagttctgaagttaattcaacttctagtaaatctcgggaagatgattgctattcctctgattctggggtgtctgagacagatacagatggtagtagcagccctttcaggcagtgtaaacattgtgataagccaggaactgtcgaaaagatgctaatttgtgatgaatgtgaagaagcatatcatacacgctgctgcggtgttcaaatgaaagacgttgcagagatagatgagtggctctgtccatcctgtttgaaaaatcagtcatcaaagaccaagactaaggggagaatttcacatgaacggaaatggagagttacagtaccatttgtaataggaattagaataggaaaaatgtttcaagcagatgttccagactggtcaggtccaacaatgagtgatacttcttttgtgggtgaaccattggaaattggccagtcagaatacatgcatgatctcaagaaggccaagaatagtaagaaacaatgttctgcagtgaattggcttcaatgcagagaagaagatactaatggagttatctgcggaaagtggcgtagggcccctcgttcagaggtacaaaccaaagactgggaatgcttctgctgcttctcttgggatccatcacgtgctgactgtgccgtccctcagaaaaatccttccgaggatgaaaagttagcagccgaactggagacaagtgagatccttaaacaactcaagtacatcaagatggttcgttatttttctcattacttgtttgatctttcccgaccatattcctttctgatcaaggatctaaaactgaaacgcttagacctcgatcagacgccaaaaagcgaaaactag

SEQ ID NO: 2310 - DNA, 759 bp, Arabidopsis thaliana
  Clone ID: AT_F14L17.C1.o25.tg
atggaaggaattcagcatcctatacctcgcactgtcgaagaggtttttagcgactttcgtggtcgtagagctggtctcatcaaggctctctctactgatgtacagaagttttaccatcagtgtgaccctgagaaggaaaacttgtgtctttatggacttccaaatgagacatgggaggttaatcttcccgttgaggaggtccctcctgagcttcctgaaccagcgttaggcatcaatttcgcaagggacggaatgcaagaaaaagactggatttctttggttgcagttcacagtgattcatggcttatctctgttgcattttactttggtgcacgtttcggatttggcaagaatgagaggaagaggctcttccagatgataaatgatctcccaaccattttcgaggttgtaactggcaatgcaaagcaatccaaggatcaatctgctaaccacaacagtagcagaagcaaatctagtggtggcaagcctcgtcattctgaatctcacactaaggcttcaaagatgtcccctccaccaagaaaagaagatgagagcggagatgaggatgaagatgacgagcaaggtgctgtttgtggtgcgtgtggcgacaactatggaggagatgagttctggatatgttgtgatgcttgcgagaaatggttccatgggaaatgcgtgaagatcacaccagcaaaggctgagcatatcaaacattacaaatgcccaagttgcactaccagcaagaaaatgaaagcctga

SEQ ID NO: 2311 - DNA, 2232 bp, Arabidopsis thaliana
  Clone ID: AT_T25N20.C1.o2.tg
atggaaggaggtggtggttctggtgagcgttcacggattgcttcgaatactcctcgaagcttgaaggagaagagcgatggggttggtaggactgtgtcttctactgaaactaggcagaattatcagaagagatccagaatggttgttagtgattcggaatcaagtgatgagtttatgaaaccacctccacgtagaagtggcgttgaccgcaaaacccttggagcaaaagagaagtttgttcggaagagggatagggttgagcatgatcgaaatgggtatgtgaggaggaacaacgaggcgtcaggaagttttatgaagatgaacaagttagatatttttgagtttgatgaatacgatgggtttgatagcgccaatttgatgaggaaacgctttgataatggcagtgttggtgttagaggaagaagctcttttgcatccagaagggttgatagtagtgtgggaaggtctggatcaggcagggagggtctatttgatagaagaagaaacacatttgtaaatggcacatgtagtgcgagctcacaggaagattcgagtagtgaatctgattctgatgaaccaatgagggtgcaagggataaacggtgttctgaaggtgaaggtcaacaataagacaaacactcttgctgcctcaatcaacccccgggatgcagagatatatgagagaccgccttcctccaggaaggcacaaaggcgtgagaatgttgtagttaaaccaccctttaggaaatcaaataatgtagacaataattcagagtcagaagagagcgacatgtcgaggaagtcaaaaaggaagaaatcagagtatagtaagcccaaaaaggagttcaataccaaatcaaaatcaacctttcctgaattggtgaatcctgatgtgagagaggaaagaagaggaaggcgtggtggtggaacagacaagcaaagattacgtgagcgaattaagggaatgctaactgatgcaggatggacgatagactataaacctaggagaaatcaaagttatctggatgctgtatatgtaaacccctcaggaacagcatattggtcaataattaaggcatatgatgcacttctaaagcagttaaaagacgagggagttgatgccaggcctaggaaagatactgctgccgttgcttcagtatctgaggaaattgtgaacaagttagcaaggaaggcaaagaagacccggtctgagatgacaaagaaatggaaacaaaattccagtggtagtgatagtgaaaacaaaagtgagggaggagcctacactgatacctctgaagagaggatacgttcatccataaagctgggtgggaaatccaccaaaaagggaagaaatggagccgattgggatgagttacacaagaaaagtaaaagatcattatattataataatgcaaggccatcatgtggatcagattcacattatctacatggacgaaaaaccaaaaaaattggaagatgtactttgttggtgcgtagttctaaggataaaaagaatccagcgattaatgggttcaatccatactctggaaaaaggacattgctctcttggttgattgaatctggagttgtccaactaagacaaaaagtgcaatacatgaggcgtcgaggtgcaaaggtgatgctggagggatggataacaagagaggggattcattgtgattgctgcagtaaaatactcacagtctccaggtttgagattcatgctgggagcaagtcatgtcagcctttccaaaatatttatctggaatctggcgcttctcttcttcaatgccaagtcagagcgtggaatatgcagaaagatgctacgaatcttgctctccatcaagtggacactgacggggatgatccaaatgatgatgcttgtggtatatgcggtgatggtggagatttgatttgctgtgatggttgtccatcaacatatcatcaaaactgccttggtatgcaggtgcttccttcgggtgattggcattgtccaaattgcacatgcaagttttgtgatgcagctgtggcttctggtggcaaggacgggaattttatatcattactttcctgcggcatgtgtgagagaagatatcaccagttatgcctgaatgatgaagctcacaaggttcaatcttttggttcagcttcttcgttttgtgggcctaagtgcttagagttttgtgcatcatacaaaaactctcatatgtgtatcagcatcagtgaaggctaa

SEQ ID NO: 2312 - DNA, 1992 bp, Arabidopsis thaliana
  Clone ID: AT_T22E19.C1.o16.tg
atggctggatgcttagttcctgaatgtgctgatgatatttccatcctgctaatcgaccatgacactgcatcaatcgcgtctctcacatcaatgcttcaacaattttcaaaaagagtgatgagcgtggatgtggcaagtaaggctctatcgatgattgagaagcagaagaaggaaattggactcatcatagctaacattgaaatgcctcacatagactcacattcgttcctcaatgctttgcttctcaaagatattcctctcatattgattaatccagagataaagacaaaagaaccatcagatcttttgacaaaaagagcgtgcttttctctagataaaccaatttcaaatgacgacatcaaaaacatgtggcaacacgtcttctctaaaaagagtcaagagttaaagaaaatcaacataactgaagatcaagagaatgtcatggataaagatacatatcagattgaagctttccgagcaaaccttaagagacagagaataagtcaagcttctttgttaggaagacgaccattcatcgacacattttcaacttatgaaacattccaaaagagaaaaagtattgcaaatgttgaatggaaaactacaccaagttatgctattgagattgagaataagagaaaggaatggaagaaaagtgttggaagacgtaagagtttgtggaatagtgagcgtcacatgaagtttatagctgctatctccattttgggtgaagaagttttgtttaaaaaacctattggtgagaaagaggaaacaatgccaaagtttcatataggcgggaaattagatctaagcaatcattcagttcatggtaacgtccttaacaagctatctatgaatgttaacttcgttccttcaaccataagtaataatccagcttacaatattctttctatcgatagctctagtatcgatagctctagctatactggtttagtttcaactggcttaagtagtgaaaattctcctatcctttatggtttaccatcgaatgatggtgcatctaacacatgcacatctcagatggaatccgaaaggatttctattccgcagtatgatcctaatcaatgtcacccacatagatccatccttgaaactgatgtaaaccaaatagatttagattttacttctatactagattctttcgatcctctagtagatgagtgccttatgaaggaaaacaatagatttcttccaaaccctaccatgaaccttttggataccgatatagacaagatggattgggtttcatttatagaaaaccttagtcaccatgatatcaatatgaaccatatggattgggatccttcaacagcaaattacgttcttcctgaaaccaacatgaacataaattttcctgaaaaacatacaaacgagataggttgggtttcttcacaagtaggttatgttccttttgaaaatatgattccctctgaagtagatataaaccatatgggcatgggttattctggaggaagtattccccctcaagaagaaactaatacaaataatgtgggctttgtttcttgtgaaatacatagtgaaatccctcccaaaactaatatggccattctagaaaccaattattcaaatccgttagattgggttttccctgaagatataacttcactcgaaaccaataccatccaaaagagtttggtttcttgtgaaacaagttacgatgctttggataatatggttcctttggaaaccaatatggaagagatgaacgatgctctttacgatatttcgattgaagatctgatttcttttgacattgatgccaatgagaaggatatattctcttggttagaagacaatggtttttctgaggaaaataatatgatggagtcatgcgaatatcataatatagaatctgtgaatcaaagtgatgatatgaagatagacgataactttgatgattatcgtgaatgcatggattggattaacgaagagatgaataaagatgtatga

SEQ ID NO: 2313 - DNA, 3279 bp, Arabidopsis thaliana
  Clone ID: AT_F17L21.C1.o11.tg
atgagtctgttccatgtgctagggtttggtgtcaagattgggcatctcttctggatgctatgctgctggtttgtttcttggttcgttgataatgggatcgaggacaagtctggtcttttagttggctctgtcggtgatcttgagaagactaagatgactacgttgaagaagaagaacaagatgtggttctggaataagatctctagcagcggactcaagatcccgagtttctcttatcagtttcttggctctgttaaattcaacaaggcgtggtggaggaagcttgtggtggtttgggttgtcttctgggtcttggtctctatttggacgttttggtactttagctcgcaagctatggagaagaggaaagagacgctagctagtatgtgtgatgagagagctcgtatgctgcaggatcagttcaacgttagcatgaatcatgttcaagccatgtctatcttgatctcaaccttccaccatggcaagattccttctgctatcgatcagagaacattctcagagtacactgatagaacttcctttgagaggcctcttactagcggggtagcttatgctatgagggtgctccattcagagagggaagagttcgagaggcaacaaggttggactattaggaagatgtattctcttgaacaaaacccagttcacaaggatgactatgacctggaagctttggaaccatcccctgtccaagaagagtacgctccagtcatctttgctcaggacactgtttctcacgttgtttctctcgatatgctgtctgggaaagaagatcgtgaaaacgttttgcgggccaggagttcaggtaaaggggttttgacagctcctttcccattgataaagacaaatagacttggggtgatcctgacatttgcagtgtacaagagagatctcccctccaatgcaacgccaaaagagagaattgaggctactaacgggtatctcgggggagtgtttgacattgagtccctggtagaaaacttgcttcaacagctggctagcaagcaaacgattcttgtcaatgtgtacgatatcaccaatcactctcaaccgattagcatgtatggtacaaatgtgtcggctgatgggttggaacgtgttagtccactaatctttggcgatccattgagaaagcatgagatgcgttgcaggtacttgcagttggcacatacatatgtctgtaatttcttcttgtttgcaagaatccaggtgctaacattttgttgtgagcttcttcctctttgtagatttaagcagaaaccaccatggccagtgctatcaatggtgacatcattcggtatccttgtgattgcgttacttgttgcacatataatccacgcaaccgttagtcgaatacacaaagttgaagaagattgtgataaaatgaagcagctcaagaaaaaggctgaagcagcagatgttgcaaagtcacagttccttgccactgtttcacatgaaatcagaactccaatgaatggtgttctaggaatgttgcatatgcttatggacacagagttagatgttacgcaacaggattatgttaggaccgcacaggcaagtggaaaagctttagtctcgctaataaatgaggttttggaccaagcaaagattgaatctggaaagcttgaacttgaggaggtgcggtttgatttgagaggaatattagatgatgtcctgtcactcttctctagcaagtcccaacaaaagggggtggagttggcagtatacatatctgatcgtgttccagatatgttaattggtgatcctgggaggtttcgacaaatactcacaaatcttatgggtaattccattaagttcactgagaaaggacacatctttgtaactgttcatttggtggatgagctatttgaatctatcgatggagagacagcatcatctccggaaagtacactgagtgggcttccagttgcagaccggcagaggagctgggaaaactttaaagctttcagctccaacgggcatcggagctttgaaccatctccccctgatataaacctaatcgtctcagttgaggatactggcgtagggatccctgtagaagcgcagtcccgtatttttacgcctttcatgcaagtcggaccatccatatccaggacgcatggaggcacaggaattggacttagcataagcaaatgtctagttggactgatgaagggagaaattggattctcgagtactcccaaggttgggtccacattcacatttactgctgtattttccaatgggatgcaaccagctgaaagaaagaatgacaacaaccagcccatattctcggaattccggggcatgaaagctgtggttgtggaccataggcctgcaagggcaaaagtctcgtggtaccattttcagcgtcttggaattcgagtcgaagtagttccacgtgttgaacaggctctacattatctgaagattggtactaccactgtgaatatgatactcatagagcaagaaatatggaatagggaagcagatgatttcattaaaaagctacagaaagaccctcttttcctttctcctaagttgattttgttagcaaactcagtagaatcgtcaatatcagaggctttatgcaccggtatagatcctccaatagtgatagtgaaaccattgagggcgagtatgctagcagcaactttgcagaggggattgggtattggaatcagagaaccacctcaacacaagggacctcctgctttgattctcaggaatcttctccttggtagaaaaattttaatcgtggatgataacaacgtaaacctcagagtggcagcgggagctctgaaaaagtacggagctgatgtggtctgcgctgagagtgggataaaggcaatctcattgcttaagccacctcacgagtttgatgcttgcttcatggacattcagatgccagaaatggatggatttgaagctacaaggagaatacgagatatggaagaggagatgaacaagagaataaagaatggggaggctttgatagtagagaacggtaacaaaacaagctggcatcttccggtattagcaatgacggcagatgtgatccaagcaacgcatgaggaatgtctgaagtgtggaatggatggatacagaatcataagaggagatggggctggaagaagaacagcgaaggaaacacaaaaactcgtgtctcctatgcatcttgaagtagtagaaaaacagattgacgattgcaaaaagagtgtatatagaaaggccggtgtgaccaggccaagaacttag

SEQ ID NO: 2314 - DNA, 3573 bp, Arabidopsis thaliana
  Clone ID: AT_T13L16.C1.o16.tg
atgggttcgaggaagaagaagatgcagatcaggaaggtgttcgataaaatgactgaatgggttaccccttggagaagtaatttggagagtccaagagagatgatgattttgcgtggagatgttgaacaagatgagtttcaatacgctagtagtcactgtttgtcttcttactacagtgtctttgttgttcgcctcgctataatggttatgttagcaattttgatagggcttttaacggttctaacatggcatttcacaaggatttatacaaagcagtcgcttcaaacattagcgtatggccttagatacgagcttcttcagcgtccagtcttacggatgtggagcgttttaaacaccacatcagagctaacaacagctcaagtcaagttatctgaatatgtcatcaaaaaatatgacaagccaacaactcaagaagaacttgtggagatgtatcaagcaatgaaggatgtgacatgggctctgtttgcgagtgccaaagctctaaatgccataaccataaactacagaaatggatttgtccaagcttttcacagagatccagcaagtagcagcacattctacatcttctccgatctaaaaaactattccatcagtggaacagggcctgaagatgtaagtgggtggaacaacaagtcaatacacgggaacatgtctgccatttggtatcagcaacagcttgatccagtaacaggggaaaatttgggaaagcctcttaaaattccaccggatgatctgatcaacatcgcaggaatctcacaagtgcctgatggtgaagcttcttggcatgtgacagtgagcaaatacatggactctccgcttctctcagcggctttgcctgtctttgatgcatcaaacaagagtattgtggctgttgtgggggtgacaactgcactttacagcgtaggacagttgatgagagatcttgtagaagtccacggtggacatatttatttgacatctcaagaaggatacttgcttgctacctccacagatggtcctcttttgaaaaatacatcaaacgggcctcagctaatgaaagccactgattcagaagagtgggttataaagtcaggagctcagtggttagagaaaacttatggaagtaagcgccctcacgttgttcatgctgagaatgtaaagcttggtgaccaacgatattacattgattcattctatcttaatctcaagagacttccaattgtaggtgttgtcattattcccaggaagttcattatgggaaaagtggatgaaagggccttcaagactttgattattctgatttctgcttctgtctgcatcttctttattggatgtgtctgcattttaatactcacaaatggagtttcaaaggagatgaagctaagagcagaactgataaggcaactggatgcaagaagaagagctgaagcttcaagcaactacaaaagccagtttttggcaaatatgagtcatgagttgaggacaccaatggctgctgtaattggattactagatattcttatatcggatgattgtctttcaaatgagcaatacgcaacagtcactcagatcagaaagtgctctacagctctccttcggcttctcaataatatactggacttgagcaaggttgagtcaggaaagcttgttctggaagaagctgagtttgatttggggcgagaacttgaaggacttgttgacatgttctcggtgcagtgtattaatcacaatgtagagacagttctagacctctctgatgatatgccagcattagtcagaggagactcagcaagacttgttcaaatatttgcaaatcttataagcaattctataaagtttacaacaacgggtcacattattcttcgtggatggtgcgagaacataaattctctacatgatgagatgagcgtatctgttgacagaaggaaaccatgggctccaatgaagacaaaacaggtgcaacacagaaatcacttgcagaagtcttgtaagaacgcgaacaaaatggttctttggtttgaggttgatgatactggatgtggaatagatccaagcaaatgggactctgtttttgagagctttgagcaagctgatccttctaccactcggacgcacggaggaactggacttggactatgtattgtgcgaaacttggttaacaaaatgggtggagaaatcaaagtagtgcagaagaatggcttagggactcttatgagactgtacttgattttgagtactcctgacactgtagatcaaaacatccagccagatttctccaaatacggtctcgtggttatgctttccatgtatggaagtacagcaagaatgatcacatcaaagtggttgcgaaaacacggcattgcaactgttgaagcatcagactggaacgagctgactcagatcattagagacctcttggagacgggaagccgtgacaacagctttgattcacagcacaatatatctgatccactgagagcagagctttcaaatatagtagaaatcaagaaccctgtgtttgtcatagtggtggatatcggagtacttgatctcaccacaaatatatggaaggaacagcttaactacctcgacagattctccaacaaagcaaagtttgcttggctactgaagcatgacacctccaatacagttaaaacagaacttagacgaaaagggcatgtcatgatggttaacaaaccgttgtacaaggccaaaatgatccagattctggaggctgtaataaaaaaccggaagagaggcttgtgtaatgacttaagaaacagaggaaacggaagtgatgaatcccacgattgcttagaaattgatccaacacaattcgacacttgcagttccgatgattcctcggagacatctggcgagaaacaagtagataaatctgttaaaccaagcaccttgcactctccagtgcttaagaactatctcatcgatgccactaccagcaatgatgactcaacatctgcaagtatgactcaaaagaacccagaagaagaagattggaaggatcggctgtattcaggaattgcgttggatggaaagaatcagaaatctcttgaaggtataaggatcttgctggcagaggatacacccgttcttcaacgagtagccaccataatgcttgagaaaatgggagcaactgtaactgcagtctgggatggacaacaagcagttgattccctcaactacaagtctatcaatgctcaagctccaactgaagaacacaaatcgttcgaagaagaaaccgctaacaaagttacaactcgggagactagtttacggaattcctcgccttatgacttgatcctcatggactgccagatgccaaaaatggatggatatgaggcaacaaaggcgataaggagagcagagattggcacagagctgcacattccaatcgtggcgttgacagcgcatgcaatgtcttctgatgaagcgaaatgcttggaggttggaatggatgcttatctcacaaagcctattgatcgaaagcttatggtctctaccattttgtcactcactaaaccatcagcattccaaacttcattgtccgcttga

SEQ ID NO: 2315 - DNA, 1677 bp, Arabidopsis thaliana
  Clone ID: AT_T31K7.C1.o5.tg
atgactagtagcgaggaagtagttgaagtgacggtggttaaagcacctgaagctggcggaggaaagttatcacgtcggaagattcggaagaaagacgccggtgttgatggtttggtgaagtgggagagatttctcccgaaaatcgcgcttagagttttgctcgttgaagctgatgattctactagacagattatcgctgctcttctcaggaaatgtagttacagagttgctgcagtacctgatggcttaaaagcttgggagatgctaaaaggaaagcctgaaagtgttgatttgatattaacagaggttgatctaccttcaatatctggatatgctctgctaacacttatcatggagcatgatatttgcaagaacattcctgttataatgatgtcgacacaggactcggtgaatactgtgtataagtgtatgttgaaaggtgcggctgattatcttgttaagccgttgaggaggaatgagcttagaaatctttggcagcatgtctggagaagacaaacttcacttgctcctgatagctttccatggaatgagagtgttggacagcagaaagccgagggtgcgtctgcaaacaactcgaacggaaagagagacgatcatgttgtgagtgggaatggtggtgatgcccagagctcgtgtacaagaccagagatggaaggtgagagcgcagacgtggaggttagtgcgagagacgcagtacagatggagtgcgcaaagtctcagtttaatgagacacggcttctagcaaatgagttgcagagtaagcaagcagaagccattgacttcatgggagcatcgtttagaagaactggacgacgtaacagagaagaaagtgttgctcaatacgaatctcggatagagcttgatctttctctgagaagacctaatgcttctgagaaccaatcttctggagaccggccttctcttcatccttctagtgcctcagctttcacacggtacgttcacaggccgttgcagacacaatgttcagcctccccagtggttactgatcaaagaaagaatgttgcagcaagtcaagatgataacattgtgctaatgaaccaatacaatacatctgaaccgcctccaaatgctccaagaagaaacgacaccagcttttacactggagctgactcacctggtccaccgtttagtaatcagctgaattcttggccgggacagagttcataccctacgccaacccctatcaacaatatacagttcagagatcccaacacagcttatacatctgcaatggctcctgcttcactctccccaagccctagttccgttagcccgcatgagtacagttccatgtttcacccattcaacagtaaacccgaggggttacaagaccgggattgttccatggatgtagatgagaggagatacgtctcttctgcaaccgaacatagtgcaataggcaatcacattgatcagcttattgagaagaagaacgaagatggctattcattatccgtcgggaaaattcagcaatctcttcaacgagaagccgctttaaccaaattccgaatgaagcgaaaggacagatgttatgagaaaaaggttcgttacgagagccggaagaaattagcagagcaacgaccacgaatcaaaggccaattcgttcgtcaagtccaatccacacaagctccatag

SEQ ID NO: 2316 - DNA, 621 bp, Arabidopsis thaliana
  Clone ID: AT_F14D16.C1.o12.tg
atggcggttggtgaggtcatgaggatggagattcccgccggtggagatttgactgttactactccggagttgcatgttcttgccgtcgatgatagtattgtggatcgtaaagtcatcgagaggttgcttagaatctcttcttgtaaagtgacgactgtagagagtggaactagggctttgcagtatcttggcttagatggaggcaaaggggcttctaatcttaaggatttgaaggtgaatttgatagtgacggattactcaatgccaggactttcaggatatgatctccttaaaaagattaaggaatcttcagcattcagagaagtaccagtagtgattatgtcatctgagaacatcttacctcgtatacaagaatgtctcaaagaaggagcagaggaattcttgttgaaaccggtgaagctagcagatgtaaagcgaatcaaacaacttataatgaggaatgaagctgaggaatgcaaaatcttaagccattctaacaagagaaagcttcaagaagacagtgatacatcatcatcaagtcatgatgatacttctatcaaggactcttcatgttcaaaacgaatgaaatcagaatctgaaaaccttttttctctactttga

SEQ ID NO: 2317 - DNA, 2163 bp, Arabidopsis thaliana
  Clone ID: AT_F9G14.C1.o120.tg
atgaatgctaatgaggagggggagggttcacgttacccaatcactgatcgaaagaccggagagacgaaattcgatagggttgagagtcggacagagaagcatagtgaagaagagaaaactaatggaattactatggatgtgagaaatgggagttcaggtggactgcaaattccattgtcgcaacaaacagcggcaactgtctgttgggaaaggtttcttcatgtgagaaccattagagttctgcttgtcgaaaatgacgactgcactcgttatatcgttactgcacttcttcgcaattgtagctatgaagttgttgaggcgtcaaatgggatacaagcttggaaggtgttagaagatctaaacaatcatattgatattgtgctaacagaggtgatcatgccttacttatctggtatcggtctcttgtgcaagattttgaaccacaaatctcgtcggaacatccctgtcatcatgatgtcatctcatgactcaatggggctggtctttaagtgcttatcgaaaggagctgttgactttcttgttaagccaataagaaaaaatgagcttaagatcctttggcagcattctagtggtagtggaagtgagagcggaacgcatcaaactcaaaagtctgtgaaatcgaaaagtattaaaaaatctgatcaagattcaggaagcagtgatgagaatgaaaatgggagcattggcctgaatgctagtgatggaagtagtgatgggagtggcgctcagagctcttggacgaaaaaagctgtggatgttgatgacagtccacgagcggtatctctatgggaccgagttgatagcacttgcgcccaagtggtacattctaaccctgagtttccaagtaatcagttggttgcaccacctgctgagaaggagactcaagaacatgatgataaatttgaagatgtcacaatgggtagagacttggagattagcattcgtagaaactgtgatctggccctggagccaaaagatgaacccctatctaaaactactggcattatgagacaggataattcgtttgaaaagagctctagtaaatggaaaatgaaagttggaaaaggaccattggacctcagtagcgaaagtccttcaagtaaacaaatgcatgaagatggaggctcgagtttcaaagctatgtctagccaccttcaagataacagagaacctgaggcgcctaacactcacttgaaaactttagatacaaatgaagcttctgttaaaatttctgaagagctaatgcacgtggaacatagttcaaagaggcatagaggaactaaagatgatgggacactagttagggatgatcggaatgtgctgaggcgttcagagggctcagctttctcaaggtataatccagcctcaaatgccaataagatttctggtgggaacttaggaagcacttcgcttcaggataataatagtcaggatcttataaaaaagactgaagcagcatatgattgtcactcgaacatgaatgagagtctcccccataatcatcgctcacatgtcggtagcaataactttgatatgagttccacgactgagaacaacgctttcacaaaaccaggagctccaaaagtaagctcagcaggatcttcatcagtgaagcattcatcgtttcagcctttaccctgtgatcatcataataatcatgcctcctataaccttgtccatgtcgctgagaggaagaagctaccgccacaatgtggatcctcaaatgtgtacaacgaaacgattgaaggtaacaacaacacagtgaattacagtgtgaatggaagtgtatcaggtagtggtcatggaagtaatgggccatatggaagcagtaacggtatgaatgctggaggaatgaatatgggaagtgataatggtgctggcaaaaatggaaatggcgatggtagtggaagcggaagtggaagtggtagcggaaacttggcggatgaaaataagatctctcaaagggaagctgctttgacaaagttccgtcagaagagaaaagagaggtgcttccgaaagaaggtacgataccaaagccggaaaaaactagcagaacaacgccctcgagtgcgaggccaatttgtgcgtaaaacagccgctgcaactgatgataacgacataaaaaacattgaggatagctaa

SEQ ID NO: 2318 - DNA, 1365 bp, Arabidopsis thaliana
  Clone ID: AT_F19D11.C1.o7.tg
atgggggagattgtggttttaagtagtgatgatggtatggagactataaagaacagagtaaagtcatcggaagttgttcagtgggagaagtatttgcctaaaactgtacttagggttttgttagttgaatctgattactcaactcgtcaaatcatcactgcccttcttcgtaaatgctgttacaaaggtcgattggtctttcctttcattagcttatttgtagctgtttctgatggtttagctgcgtgggaggttctaaaggagaagtcacataacattgatcttatactaacagagctggatttgccatctatatctggttttgctctgcttgctttggtaatggagcatgaagcttgcaagaacattcctgtcataatgatgtcttctcaagattcgataaaaatggtgttgaagtgtatgctgagaggtgctgctgattatctaatcaaaccaatgaggaaaaacgagttgaaaaatctatggcaacatgtttggagaagactgactttgcgtgatgatcctactgctcatgctcaaagcttaccagcttcacagcacaaccttgaagatactgatgaaacttgtgaagattccagatatcattcagatcaaggaagtggtgctcaggctatcaattacaatggtcacaataagctgatggagaatggcaaatcagtggatgaaagagacgagtttaaggaaacttttgatgtgacaatggatttgattggtggaattgacaagcgtcctgatagtatttataaagacaagagtcgagatgagtgtgttggtcctgagcttggactttctctgaaaagatcttgctctgtaagttttgagaaccaagatgaaagcaagcatcaaaagcttagcctctctgatgcgtcggccttctcaagatttgaggaaagcaagtcagcagaaaaagccgtcgttgctttagaggagagtacttcaggtgagccaaagacaccaaccgaatcacatgaaaagttaagaaaagtaacatctgatcaaggaagcgccacaacgagcagcaaccaggagaatatcggatcatcaagcgtaagcttccgtaaccaagttcttcagtccacagtaacgaatcagaagcaagattcacccataccggtagaatcaaatcgcgagaaagcagctagcaaggaagtagaagctggttctcaaagcaccaatgaggggattgctggacaaagcagtagcacagagaaaccaaaggaagaagaaagtgcgaaacaacgttggagtagaagccagagagaagctgcattgatgaagttccggttgaagaggaaagatcgatgctttgacaaaaaggtaagagacacacaagcttcatcataa

SEQ ID NO: 2319 - DNA, 2853 bp, Arabidopsis thaliana
  Clone ID: AT_MAJ23.C1.o80.tg
atggagactgatcagattgaggaaatggatgtcgaagttttgtcttcgatgtggcccgaagatgttggaactgaagctgacaaacagttcaacgtcgagaaacctgccggagatttagacacgttgaaagaagttactatcgagacacggaccattgcggatatgacacggttaccaaacctattgaattcgactcatcaaggctcctctcaactaaccaaccttgtgaaacaatgggagtatatgcaagacaacgcggttcggctgttaaaagaagagctaaaaaatctcgatagacagagagaagaagccgaggctaaagagttgaagatcattgaggagtataagtttgagagcaacgagcctgagaatgttccggttttggatgagacgagtgatttgttccgcaggtttaggcagaaaaaacgagatgccttggtcgatagcaagaagattgagatctatgaggagtttgacactgttgcatattggaaacagaaggcgttgagtcttgagaaaatgcttgaggcgagtactgagagagaaaggcgattgatggagaagctgagtgagagtttgaaaactatggagagtcagtcagcaccggtccaagagcttactcagaatcttaagagagctgaaggtttcttgcatttcatacttcagaatgcacctattgttatgggccatcaggataaagatttacgctacttgttcatctacaacaagtatcctagtttacgggaacaggacattttgggaaaaacagacgtggagatattccatggaggtggagttaaagaatctgaagatttcaagagagaagttcttgagaaaggaaaagcttcaaagagagagatcacatttactacagatttatttggatcaaagacgtttttgatatatgttgagcctgtttacaacaaagctggcgagaaaatcggtataaactacatgggaatggaagtaactgatcaggtagtgaaaagggagaaaatggcgaaacttagagaagataacgctgtgagaaaggcgatggaatcagaactgaacaagactattcacattacagaggagacaatgagagcaaagcagatgctagcgacgatgtctcatgagataaggtcaccattgtcaggagtagtgggaatggctgagatactttcaactacaaaactggataaagagcaaagacagttgttgaatgtcatgatctcttctggtgatttggtgcttcagctaatcaacgacattcttgatctctccaaggttgaatcaggtgtgatgagattagaagctacaaagtttcgaccaagagaagtagtgaagcatgtgctacagacagctgcagcatcgctgaagaaatctttgacattagaaggaaacattgcagatgatgttcctattgaggtagttggagatgttctaaggattaggcagatcctcaccaatttgataagcaatgctatcaagtttacacatgaaggaaatgtaggaatcaaactccaagtgatatcagaaccatcctttgtgcgggataacgcattgaacgcagacaccgaggaacacgaacaaaacggtttgaccgagacttcagtttggatttgctgtgacgtatgggacactggaattggaatcccaggcaagcaagcaattctgacaaatgaacatgaaaagactaaaaaactccaactaacctatatattaacctggttcatgttttggtgttcttgtgcagaaaacgctcttccatgtttgttcaagaagtacatgcaagcaagcgctgatcatgcccgaaaatacggtgggactggtctcggacttgctatttgtaaacagctggttgagttaatgggaggccaactcactgtgacaagccgggtgagcgaaggttcaacgttcacatttatattaccctacaaagttggaagatcagatgattattcagatgatcaagatgagttctctgatatggcggatcaacaatctgaaccagacgatacagctgaaggatatttccagtttaaaccgctcttaggatcgatatattcgaatggcggaccggggatcagcaatgacttcttacctcataaagtcatgcttactagtcctattaagctcatcaatggttttgtcgctgatccctctaataacactggacagagcgagatgctacagcttgaaaacggtggttacatggatgaatctaaactcgaaaccagttctggtcattgccctgaatcagctcaccaatatgagaatggaaatggtcgatgtttctctaaggaatctgaatcttgtagcagttcacaagctagctcagaaggtggaaccttagaaatggagtcagagctcacagtttcatctcatagggaagaggaaaaagccgagacagaagtaaaagaaacatcaaagccaaagattttgcttgtggaagataataagatcaacatcatggttgcaaagtcgatgatgaagcagttaggccataccatggatattgctaataatggagttgaagccataaccgcgattaatagctctagctacgatctggtactcatggatgtgtgcatgccggtgctcgatggtttaaaagctacaagactgatccgttcgtatgaagaaactgggaactggaatgctgcaatagaagccggagtagatatatcgacatcggagaatgaacaagtttgtatgcgtcccacaaaccggctgcctataatcgcgatgacggcaaatactttagcagagagttcagaagaatgttatgcaaatggtatggactcgtttatttcgaaacctgtaacgttgcaaaaactgagagagtgtttgcaacagtatttgcactga

SEQ ID NO: 2320 - DNA, 3063 bp, Arabidopsis thaliana
  Clone ID: AT_F14G6.C1.o18.tg
atgggtgaggtaggtcctcaagtcgctgctccgatttcagttcatcatcctatggggaaaaaacgcgacctttatgtacaaccacactggcttgtgtcatctcagttacccaaggatgattggcagatgaacaggtggaagtgggatggtcagagatttgaagctatagaactacaaggagagtctctccagctaagtaacaaaaaaggtcttgatttgaatctaccttgtggttttaacgatgttgaaggcacgccggtggatttaaccagaccgagtaagaaggttaggtcgggatctccgggaagtggcggcggaggaggaggaaactatccgaagtgtcaggttgataattgtaaggaagatttatcaattgctaaggattatcatagaagacataaagtttgtgaggttcatagcaaagctactaaagctcttgttgggaaacagatgcagaggttttgccaacagtgtagcaggtttcatctgctttctgagtttgatgaggggaagagaagttgtaggcgtagattggatggtcataacaggcggaggagaaaaacacagcccgatgcgattacatctcaggttgtagctctggagaatcgtgataatacttctaataacactaatatggatgttatggctttgttaacagctttagtttgtgcacaaggtaggaacgaggctactactaatgggtctccgggagtgcctcaaagagagcaacttcttcagatacttaacaagatcaaggctttacctttgcctatgaatcttacctcgaagttgaacaatatcggaattttagccaggaaaaatccggagcaaccctccccgatgaatcctcaaaatagtatgaatggggcttcttctccatctacgatggacttgcttgctgctctctcggcatctttaggttcatctgctccagaggccatagcttttttatctcaaggagggtttggtaacaaagaaagcaatgataggactaagttaacttcttctgaccacagcgccacaaccagtttagaaaagaaaactttggagtttccttcttttgggggaggagagaggacaagtagcactaaccattctccatctcagtattcagattcacgcggtcaagacactagatcgagcttatctctacaactattcacctcttcaccagaagaggagagtcgaccaaaagttgcatcttcaacaaagtattattcttctgcgagcagtaaccctgttgaggatagatcaccatcatcatctccagtcatgcaagagttattccctttgcatacttctcctgaaaccaggaggtataacaattacaaagacactagtaccagtcccaggaccagttgtttgcccctagagctctttggtgcatcaaatagaggagctactgcaaatcctaattacaatgttttgaggcatcaatctggttatgcttcatctggttcggattattctcctcctagcttaaactctaatgctcaggagcgcacaggaaagatatctttcaaactatttgaaaaagatcctagtcagctccctaacacattgcgaaccgagatctttagatggctttctagttttccatcagatatggagagttttatcaggcctggttgtgttattttatctgtctatgtggcaatgtcagcttctgcttgggaacaacttgaggaaaatttactgcaacgagttagatctttggttcaagattcagaattttggagtaattcaagatttttggtcaatgcaggcagacagctcgcgtcacacaaacatggtgaaattcgtctgagcaaatcttggagaactttgaatttaccagagctaatcacggtgtcgccgttggctgttgtagccggtgaagaaacagctttaatagtaaggggtagaaacttgactaatgacggaatgagacttcgttgcgcacatatgggtaactacgcgtcaatggaggtaactggaagagaacataggttaacaaaagttgatgagttaaacgtaagtagtttccaagtccagagtgcaagctctgtttctctaggacgatgtttcattgagttggagaatggattaagaggtgacaatttccctttgataatagccaatgccacgatttgcaaagagttgaatcgccttgaagaagagtttcatccaaaagacgtgatagaggaacaaatacagaacttagatcgtccaagatcaagagaagaagttctttgcttcttgaatgagcttggttggctatttcagaggaaatggacatccgatattcatggagaacccgacttttctcttcctcgcttcaaatttttgctcgtatgctctgttgaaagagattactgttctctcataagaaccgtcctggatatgatggtagagagaaatttgggaaaagacggtctgttgaacaaggagtccttagatatgctggctgatattcagctactgaatcgcgctatcaaaaggagaaacacaaaaatggctgaaactctgatccattattccgttaatccctctactagaaacttcatcttcttgcctagtatcgctggacctggcgatatcacacctttgcatttggctgcttccacatctagttctgatgatatgattgatgccctgactaatgatccacaagagattggattatcttgctggaataccctagtcgatgcaaccgggcaaactccctttagctacgctgcaatgagagacaaccacagttacaacaccttggtggctcgtaaacttgcagataaaagaaacggtcaaatatctctgaacattgaaaatgggatcgatcagattggcctgagtaagagactaagctcagagctaaagagatcttgcaacacatgtgcaagtgtggctctaaagtatcagaggaaggtttcgggttcacgtcgattgttcccaactccgatcattcactcgatgcttgcggttgcgacagtatgtgtttgcgtctgcgtgtttatgcatgctttcccaatggtcagacaaggctctcacttcagttggggtggtcttgattatggctcaatctaa

SEQ ID NO: 2321 - DNA, 1080 bp, Arabidopsis thaliana
  Clone ID: AT_MBA10.C1.o13.tg
atggactggaatttcaaacttagctctggttatttatctggattcgatcaagaaccagatttatcaccaatggatggttcgatctcgtttggtgggtcgtcacagtcaaaagcggatttttcatttgatctaaaacttggaagaaacattggaaactcttcctctgtttttggtgatacagagcaagtgattagtcttagtaagtggaaagatagtgctttagctaaaccagaaggttcaagaagctcgagttcaaagagaacaagagggaatggtgttggaaccaaccagatgccgatttgtcttgttgatggatgtgattctgattttagtaattgtagagagtatcataagagacataaagtttgtgatgttcattcaaaaactcctgtggttactattaatggtcataaacagaggttttgtcaacaatgcagcaggtttcatgctttggaggagtttgatgaagggaagagaagttgtaggaaacgtcttgatggacataatcgaagacgacggaagccgcagcctgaacatatcggtcgtcctgccaacttctttacgggttttcaaggtagcaaattgctagagttttctggtggttcacatgtgtttccaactacatctgtgttgaacccgagctggggaaatagtcttgtaagcgttgctgtagccgccaatggttcgagttatgggcagagccagagctatgttgttggttcttctcctgcaaagacagggataatgtttccaatctcttcttctccaaacagtaccagaagcatagcaaaacaattccctttcttgcaagaagaagaaagctcgagaaccgcatcgttgtgtgagagaatgacgagttgcatccatgactctgattgtgctctctctcttctgtcatcctcctcgtcgtcagtccctcatttgcttcaaccaccactttctttgtcccaagaagcagttgagacagttttttacgggtcgggattgtttgagaatgcgagtgcagtctctgatggatcggttatatccggtaacgaggctgtccgtcttccgcagacattcccgtttcattgggagtag

SEQ ID NO: 2322 - DNA, 1080 bp, Arabidopsis thaliana; identical to SEQ ID NO: 2321
  Clone ID: AT_MFB16.C1.o6.tg

SEQ ID NO: 2323 - DNA, 1533 bp, Arabidopsis thaliana
  Clone ID: AT_MCP4.C1.o5.tg
atgttgttggaagaaacagaaccaccaaaccagactctagatcatgtcctaagctggcttgaggattctgtgtccttatccccattaccaggatttgatgattcttatttgctccacgagtttgatgggtctcaaacgtgggaatgggatcagactcaagatccggagcatggttttattcaaagctatagtcaagatcttagtgcagcatatgttggttgtgaagcaactaacctggaagtggtaacagaagctccatccattgatttggatcttccacctgaaattcagcaaccaaacgatcagtccaggaaaaggagccacgacgggtttctcgaggcacaacaggtgaaaaaatcggcaaggagcaagagaaaagcaatcaagtctagtgagaagagctccaaagatggtaacaaggaagggagatgggcagagaagttgcttaacccttgtgccttggccattacggcaagtaactcatcaagggttcaacattacctttgtgttctctctgaactggcctcttcttctggtgatgctaatcgtcggcttgcagcttttggtcttcgggctttgcaacatcatctttcctcatcctctgtgtcatcatccttttggcctgtttttacttttgcttcagcggaagtgaagatgtttcaaaagactctgcttaagttctacgaggtaagcccttggtttgctttgcctaacaacatggcaaactcagctatcctgcagattttagcacaggatcccaaagataaaaaggatcttcatattattgatattggtgtttctcacggtatgcaatggcccactttgttggaggctctgagctgcagactagaaggacctcctcctcgtgttcgaataaccgttatatcagatctaaccgcagacatacctttctctgttggtccaccaggttacaattatggttctcaactcctaggctttgctcggtctctcaagatcaaccttcagattagtgtacttgacaagttacaactcattgatacctcacctcacgagaacttaatcgtgtgtgctcagtttaggctgcatcacctgaagcatagcatcaatgatgagagaggcgagactttgaaagcagtgagaagtttaaggccaaaaggagtggttctttgtgagaacaatggagaatgcagtagtagtgcggactttgcagcaggattctcgaagaaactggagtatgtatggaagtttctggattcaacaagctcgggatttaaagaagagaatagcgaagagagaaaactaatggaaggagaggcaacaaaggtgttgatgaatgcaggagatatgaatgaaggaaaagagaaatggtatgagaggatgagagaagctggtttttttgtagaagcatttgaagaagatgcagttgatggagccaaatccttactaagaaagtatgacaacaattgggaaataagaatggaagatggagatacctttgctggattaatgtggaaaggagaggcagtttccttttgttcattgtggaagtag

SEQ ID NO: 2324 - DNA, 1233 bp, Arabidopsis thaliana
  Clone ID: AT_F3A4.C1.o30.tg
atgaccaaaacccggattctcaacccgacccgattcccttctcccaaacccttacgtggctgcggcgacgctaacttcatggaacagctcctccttcactgcgccaccgccatagactccaacgacgctgcattaactcaccaaatcctctgggtcctcaacaacatcgctccaccagacggtgactccacccaacgtcttacatccgcattcctccgcgcgttgctctcacgcgccgtctccaaaacccctacactatcatccaccattagcttcctacctcaggccgatgaactccatcgtttctcagtcgtggagttagccgctttcgtagacctcactccgtggcaccggttcggattcattgcagccaacgccgcgatcttaaccgccgttgaaggttactcaacggttcacatcgttgacttaagtttgactcattgtatgcaaatccctactcttatagacgccatggcaagccgactcaacaaacctcctccgcttcttaaactcaccgtcgtctcttcctccgaccacttcccaccattcatcaacatctcctacgaagaactcggatctaaactagtcaacttcgccaccacacgaaacattacaatggagttcacaatcgtaccttctacttactccgatggcttctcctccctcttacaacagttacggatttatccttcttcattcaacgaagctctcgtcgttaactgtcacatgatgctccgttacatccctgaagaacccctaacttcatcatcatcatcgctccgaacagttttcttgaaacaactccgatctttgaatccaagaatcgtaaccctaatcgaagaagacgtagatctcacatcggagaacttggttaaccggttaaaatcggcgtttaactacttctggattccgttcgatacgacggacacgtttatgagtgagcagagacggtggtacgaggcggagataagttggaagatagaaaacgtggtggcgaaggaaggtgcggagagagtggagaggacggagacgaagagacggtggatagagagaatgagagaggctgagttcggtggagttagggttaaagaagatgcggtggcggatgtgaaggcgatgctggaggagcacgctgtcgggtggggaatgaagaaggaagacgacgacgagagtctcgtgctgacgtggaaaggtcatagtgttgtgtttgctaccgtttgggttcccatttaa

SEQ ID NO: 2325 - DNA, 1338 bp, Arabidopsis thaliana
  Clone ID: AT_T5A14.C1.o22.tg
atgcttacttccttcaaatcctctagctcctcctccgaagatgccaccgctaccaccaccgagaatcctcctcctttgtgcatcgcctcctcctcggccgcaacctccgcctcacatcacctccgtcgtcttcttttcaccgctgcgaatttcgtctcccagtcaaacttcaccgccgctcaaaacttactctcaatcctctcccttaactcttctcctcacggcgactccaccgagcgacttgtacacctcttcactaaagccttgtccgtacgaatcaaccgtcagcaacaagatcagacggctgaaacggttgccacgtggacgacgaacgaaatgacgatgagtaactccacggtgttcacgagcagtgtatgcaaagaacagttcttgtttcgaaccaagaacaacaattctgacttcgagtcttgttactatctttggctaaaccaactaacgccgtttattcggttcggtcatttaacggcgaaccaagctatcctcgacgcgacggagacaaacgataacggagctctacatatacttgatttagatatatcacaaggacttcaatggcctccattgatgcaagccctagcagagaggtcatcaaaccctagcagtccacctccatctctccgcataaccggatgcggtcgagatgtaaccggattaaaccgaactggagaccggttaacccggttcgctgactctttaggtctccaattccagtttcacacgctagtgatcgtagaagaagatctcgccggacttttgctacagatccgattgttagctctctcagccgtacaaggagagaccattgccgtcaattgtgttcacttcctccacaaaatatttaacgacgatggagatatgatcggtcacttcttgtcagcgatcaagagcttaaactctagaatcgttacaatggcagagagagaagctaatcatggagatcactcgttcttgaatagattctctgaggcagtggatcattacatggcgatctttgattcgttggaagcgacgttgccgccaaatagccgagagagactaaccctagagcaacggtggttcggtaaggagattttggatgttgtggcggcggaagagacggagagaaagcaaagacatcggaggtttgagatttgggaagagatgatgaagaggtttggtttcgttaacgttcctattggaagctttgctttgtctcaagctaagcttcttcttagacttcattatccttcagaaggttataatcttcagttccttaacaattctttgtttcttggctggcaaaatcgtcccctcttctccgtttcgtcgtggaaatga

SEQ ID NO: 2326 - DNA, 1452 bp, Arabidopsis thaliana
  Clone ID: AT_T12G13.C1.o90.tg
atgaattatccttacgaggacttcttggacctcttcttctctacccacactgacccgcttgccacggctgcaagcacctcttcgaatggttatagcttgaatgatcttgacattgattgggactgtgacttccgtgatgtcattgaatccattatgggtgatgaaggagccatgatggaaccggaatcggaagctgttccaatgcttcatgaccaggagggactttgtaactctgcgtcaacgggtttgtctgtggctgatggggttagttttggtgagcctaagactgatgaatcaaagggcttgaggttggttcacttacttgtggctgctgctgatgcgtcaactggtgcgaacaagtctagagagctaactcgggttatacttgcaaggcttaaagatttggtttctcctggtgaccgaactaacatggagaggttagctgctcacttcaccaacggactttcaaagttgctcgaacgagatagtgttctgtgtccccaacaacatcgtgatgatgtctatgatcaggcggatgtgatctcagcgttcgaactgctgcaaaacatgtctccatatgtcaactttggttacctcactgccacacaggctattcttgaagctgtgaagtatgaacgtcgaatccatatagtggattacgatatcaatgaaggcgttcagtgggcttcattgatgcaagccttggtgtctagaaatacaggcccgtcagcccaacatcttagaatcacggctttgtcacgagcaacaaacggtaaaaaatccgtggctgcagtccaagagactgggcggcgtctaactgcgtttgccgattctatcggccagccattttcatatcaacactgtaaacttgacaccaatgcattcagcacatcatctttgaaacttgtaagaggagaagcagtggtaatcaattgtatgttgcatcttcctcggtttagtcaccaaacacccagttcagtcatttcctttttgtcggaagctaaaactctaaacccgaaacttgttacgcttgttcacgaagaagttggtctgatgggaaaccaaggttttctatatcgttttatggacttgctacatcagttctcagccatattcgactctctagaggcaggcctttcaatcgctaacccggcccgtggctttgttgagcgtgtttttatcggtccttgggttgctaattggttgacgcgtatcaccgctaatgatgcagaagtcgagagctttgcttcgtggccacagtggttagagactaatgggttcaaacccttggaagtgagctttaccaaccgttgtcaagcaaaactccttttgagtttgtttaatgatggatttagagtggaagaattgggccaaaacgggctcgttttgggatggaaatctcggcgtcttgtgtcggcctccttttgggcctcgtgccagacgaatcagtaa

SEQ ID NO: 2327 - DNA, 2904 bp, Arabidopsis thaliana
  Clone ID: AT_T24P13.C1.o13.tg
atggaagctactgctgtaaatccctccattgtcactgcctcgagaacagttcaaccttacaggcgattatcaactctctcacttcgattccctacataccggaacaaacgtgtttctcctttcacgctcacaatcacaagatgttccaccacaaaaagtagagaagcaggtcaagattcatcgatctctttgaagagagggctagtttttgatcttggcgtctctaaagattcgtggcacagtgaggagattggctctccggttgtgaagagatttctaagcgataacgaagagagatggtacatgtggtaccatggaagctcaaagcagaaccctgtttctgattctatcggattagcggtttccaacaatgggattcattgggaaagaggaaatggtaaagttgagtcaagcgaagatgtgggtttggttatgagctgtggtgaagactggtggggatttgatactgcaagtgttagacccggtgaggttgtgataatgtcgagttctaaagtcagagctaatagctctgtttactggatgtattacactggctacactaaggagactgttgagtttcaatcccaagattttacgtccgtgttgggaaatccggaaaggtttcacctttgtgatgagaatgcggagaaatctagggtttattataggtcacttccagggttagctattagtcaagatggtaggcattgggctagaattgaaggtgagcatcatagtggggcattgtttgatgttgggtctgaaaaagattgggactttctctatattgcatctccacatgtagttttccatggagatggcgatttacggatgtattaccattcattcgatgagaaaaccggtgaattctgcattgggatggcgaggtctagagatgggatcaagtggttaaaattgggaaagatcttaggaggaagaaaatccgaaaaggatggattaggtttcttcgatgagcttggaggaagatatccttgtgtgacaaggaacaagagagatgagagttatgtgatggcttatgaaggtgtagatagaaccgggaagacgagcataggcttcgcggtttcgaaagacgggattaaagattggaaacgagtgcaagacgaggaagcggtgatcgcggttggtgaaggcggtgcgtgggataacgaaggagttgggtgtccatatttgattgagatggatggagattctgatcatcaatggagattgtattatagaggtgttggtaatggtggaagaacagcaatgagaggagagcaattcgagctagaggaagatagagacgggccactggagctgttgcagagcttgagatctaaagcaacggagcttcttcttcgagaagaatgggaagaatctataaaagtttacacggagttcatcgatctctctcggaggcaagtctcaagtactggtggatccgacccggatccggattcgattgctaagctccggaaatctctctgtttggctctatgtaatcgagctgaggcaagagctaggctacgagattttttggaagcaatgagggattgtgatcaagcacttgaaatcgagaagactcatttcaagactcttctttgtaaaggtaaagttttgcttggattgagcaaatactctttggctttggaatgttttaaaacggctttgctcgatccacaagcgagtgataacttggagactgttactgtgtatatagagaaatgtaagaagcttgagtttcaggcaaagactggagcttttgatttgtctgattggatcttaagtgagtttcgtgggaaatgtcctgagcttgctgagtttattgggtcgattgagattaagaaatctgagcttagtgggcgtggattgtttgctacgaagaacattgttgctggtactttggttttagttacaaaggcggttgcgattgagagagggatcttaggaaatggagagtgtggggaaaaagcgcagttgatcatgtggaagaacttcgttgaagaggttactgaatccgtgagaaaatgcggtaggactcgtcgagttgtctccgctttgtccactggacaaggtgaagatagtctggagattcctgagatagctctgtttagacctgatgaagcatttgaaacttgtggtgactggaaacagagtttggatacagagaagttgttgagtatcttggatgtgaattctctggtggaagatgcggtttcaggtaaagttatggggaagaacaaagagtattacggtgtagggctatggactttagcttcattcatcaaccactcgtgtatccctaacgcaagacgtcttcacgttggagactacgtgattgttcatgcctcgagagatatcaaaacaggggaagagattagctttgcttactttgatgtgctttctccattggaaaaacggaaagagatggctgagtcatgggggttttgttgcggatgcagtagatgcaagtttgagagtgtcttgtatgctaccaaccaggaggttagagagtttgaaatgggtttagagagaggcgtagatgcagggaacgcggtttatatggtggaggaagggatgaagagatggaaggtaaaagggaaagataaagggttgctgagagcatcttattggggagtttatgatgagatttataactcagagagacttatgaaaaggtggggaaggaagataccaacaatggaagttgtggtggatagtgtctctgatgttgttggaagtgatgagagattgatgaagatggctgtggaagggatgatgaagaagcatggaggtttcagtaacattgtggagatggagaaaatcatgaagctagggaagggggtttatggcaaagtggtatcgaaaaagaaggcaatgaagactcttcttggcatagagtaa

SEQ ID NO: 2328 - DNA, 909 bp, Arabidopsis thaliana
  Clone ID: AT_T14P4.C1.o30.tg
atggagaagagaaaattcgagctgagatacattccaagtgtggctactcatgcttcacaccatcaatcgtttgacttaaaccagcccgctgcagaggatgataatggaggagacaacaaatcacttttgtcgagaatgcaaaacccacttcgtcatttcagtgcctcatctgattataattcttacgaagatcaaggttatgttcttgatgaggatcaagattatgctcttgaagaagatgtaccattatttcttgatgaagatgtaccattattaccaagtgtcaagcttccaattgttgagaagctaccacgatccattacatgggtcttcaccaaaagtagccagctgatggctgaaagtgattctgtgattggtaagagacaaatctattatttgaatggtgaggcactagaattgagcagtgaagaagatgaggaagatgaagaagaagatgaggaagaaatcaagaaagaaaaatgcgaattttctgaagatgtagaccgatttatatggtgctcaaaggattgcaacaatcgctttggaggatgtaattgtgcaattggccaatgcacaaatcgacaatgtccttgttttgctgctaatcgtgaatgcgatccagatctttgtcggagttgtcctcttagctgtggagatggcactcttggtgagacaccagtgcaaatccaatgcaagaacatgcaattcctccttcaaaccaataaaaagttgatgattgtgagaggagatcagaggattggtctatttgcggagagagcaatcgaagaaggtgaggagcttttcttcgactactgctatggaccagaacatgcggattggtcgcgtggtcgagaacctagaaagactggtgcttctaaaaggtctaaggaagcccgtccagctcgttag

SEQ ID NO: 2329 - DNA, 1383 bp, Arabidopsis thaliana
  Clone ID: AT_MSD21.C1.o13.tg
atggattccgtttacaaaaccgacgaaaacttcgccgcggatgtcgccgctcttcttgctccgcttccaactccccaacttcaggagtatttcaacaagcttataactagtagaagatgcaatggaattgaagtgaaaaacaatggaaccattggaaaaggtgtttatgcaaattcagagtttgacgaagatgaactcattttgaaagatgagattcttgttggtatccaacattcttccaacaaggtggattgtttagtttgcagtttttgtttccggttcattggatcaatcgagaaacaaatcggcaggaaactctatttcaagaatctcggtgtctctggttgttgtgacgacgattcatccgaagaagatgaatgtgtgaagtacaatggaaatgaggaacaatgtggtggaagcagttcaagccataatactcttccagaaggagttgttagttctttgatgaatggtgaaatggcattgccgcatactgataagtttcctttgccgtcgcctctttcgtgtcctggaggatgtcaggaggctttctactgcagtgaatcatgcgcagcggcagattgggagagttctcattccttactttgtactggtgagaggtctgaatcaatatctagagaggcgcttggagagtttattaaacatgctaatgataccaatgatatttttctcctggctgcgaaggcaatcgcctttaccattctaaggtacaggaaactgaaagcagaacatgtggacaaaaaagcgaaacagagtgagccaaagcagtcgcttctcttggaagcatggaaaccagtatcgattggatacaaaagaaggtggtgggactgcattgcattgccagatgatgttgatcctactgatgaaggagccttcaggatgcaaataaagaaccttgcgtgtacgtctttggagctcctgaagatagccatatttgacaaagaatgtgaagcccgtatcccccctagtcaagacttggtggtagcatcaccagtagaggactatttcttgtatattgatgatcttcctgatgcagaaaaggaagaaaccgaggaaatcacaagaccgtttctagatgctcttggtgatgagtactcggactgttgccaaggaacggccttcttccctctgcaaagctgtatgaaccattcttgttgccctaatgcaaaagccttcaaaagagaagaggacagagacggacaagcagtgataattgcattaagacgcatcagcaagaacgaagaggtgacgatttcatatatcgacgaggagcttccatacaaagagagacaagcattacttgcagactatggtttcagctgcaagtgctctaagtgtcttgaagattcttcatcaatttga

SEQ ID NO: 2330 - DNA, 939 bp, Arabidopsis thaliana
  Clone ID: AT_T6P5.C1.o10.tg
atgggtctagtggggctccattcaggcaccattgacatggagtttataggagttgaagatcacggggacgaggagggtaaacagattgcagttagtgtcatctcttcagggaaaaatgctgacaaaaccgaagatcccgattcattaatatttaccgggtttggtggtacggacatgtatcatggacaaccatgtaatcagaaacttgagaggttgaatattccactagaagccgcttttcggaagaaaagtattgtgagagtggttagatgtatgaaggatgaaaaaaggacaaatggtaatatttacatatatgatggaacatatatgattactaataggtgggaagaggaaggtcaaaatgggttcatagtgtttaaattcaaattggtgagagagcctgatcaaaaacccgctttcggtatttggaaatcgatacagaattggaggaatggtttgagtataagaccaggtcttatccttgaagatctctctaatggagctgagaatctaaaggtttgtttggtgaatgaagttgacaaggagaatggtcctgccttgtttaggtatgtcacttcacttatacatgaagtaatcaataatattccatcgatggttgatcgttgcgcttgtggacgtagatcatgtggttcaaaacatgtattcagagaaaagcttagtgtgtcatcgtcattggtgattagtgcaaagaagtcaggtaatgtggctcgatttatgaaccatagttgctcacccaacgtgttttggcagtctattgctcgtgaacaaaatggtttatggtgtctttacattggcttttttgcaatgaaacatattcctccattaacggagttgagatatgattatggaaaatctagaggtggtgggaagaagatgtgtctatgtagaacgaagaaatgttgtggttcatttggataa

SEQ ID NO: 2331 - DNA, 1587 bp, Arabidopsis thaliana
  Clone ID: AT_F28O16.C1.o8.tg
atgcaattttcttgtgatcctgatcaagaaggagatgagctgccacaatatgaacacatttatcaaaatgacttctcttatcgaaagcacaagaaacaaaaggaagaagatatatctatctgcgaatgcaagtttgatttcggagaccctgacagtgcttgtggtgagagatgcctcaatgtcattaccaacactgaatgtactcctggttactgcccctgtggtgtctattgcaagaatcagaagttccaaaaatgtgaatacgccaaaacaaagttgatcaagtgtgaaggtcgtggttggggactagtggctcttgaagagataaaggcggggcaatttataatggagtactgtggtgaagtaatatcatggaaagaagcaaagaagagggctcaaacttatgaaactcatggtgtcaaggatgcatacattatatctctcaatgcatctgaggctattgatgccactaagaagggaagccttgctaggtttataaatcattcatgtagaccaaattgtgagacgaggaagtggaatgtactgggagaagttagggttgggatctttgcaaaagagagcatctctccccggaccgaattggcttacgactataattttgaatggtacggtggtgccaaagtgcgttgtctctgtggtgcggttgcatgctctggatttcttggagccaagtctcgtggctttcaggcaagtccttacgttatcatcctcatagaggatacatatgtatgggaggatggtgacgatcggtattcagttgataaaattccagtctatgattctgcagaggacgagcttacatctgagccttctaagaatggcgagtccaacacaaatgaagagaaagagaaagatatctcaacagagaaccatttggagtctactgctctgaatattcaacagcaatcagattcaactccaactcctatggaggaagatgtcgtcacggagactgttaaaaccgaaacatctgaagacatgaagctgctctcacaaaattcacaagaagattcatcgccaaagactgcaattgtatcacgggttcacggtaacatttccaagatcaagtccgaatctcttccgaagaaaagaggcaggccgttttcaggcggaaaaacaaagaatgtcgctcagaagcatgttgacatagcgaatgtggttcagctactagcaaccaaagaagctcaagatgaagttctcaaatacgaggtaaaacagtttttcaagcgtataggtacaaattcaaaaccttctcagtatcagatgtgtttggtaaattgttgcttgcaggaggtgaagaaggaagcagcagtacgactctcgtcattgtacgacgagataaggccggcgattgaggagcatgaaagagatagccaagacagtgtagcaacaagtgtggcggagaaatggatacaagcaagctgtaataaactcaaggcagagtttgatctttactctagtgtaataaagaacatcgcttccactcccatcaaaccacaagacacaaagaccaaagtcgcggaagcaggaaacgaagaccatattaaactcttggaagccaaatga

SEQ ID NO: 2332 - DNA, 1407 bp, Arabidopsis thaliana
  Clone ID: AT_F21M11.C1.o35.tg
atgcttgagatggggaaatcaaatatacatgtgcaagaatgggattgggaaaccaaagatattctcaatgatactactgccatggatgtgtctccttcttcagctattggggaatcaagtgagcataaggttgctgctgcttcagttgaattagcttcttcgacttctggtgaggcaaagatttgtctaagtttcgcgcctgcaactggagaaacaacgaatttgcatttgccttctatggaggatcttcggagagcaatggaggagaagtgcctcaagtcgtacaaaattgttcaccccgagttttcggtccttgggttcatgaaggacatgtgtagctgttacatagacttggcaaagaattcaaccagccagttgcttgaaacagaaaccgtatgtgacatgagtaaggcgggtgatgaaagtggtgcagttggcatttcgatgccgttggtggttgttcctgaatgcgagatctcgggagatggctggaaagcaattagcaacatgaaggacattacggctggtgaagaaaacgttgagattccatgggtgaatgagatcaacgagaaggttccttcccgtttccgttacatgcctcacagctttgtgtttcaagatgctccagtgatattctcgctctcaagtttctctgatgagcaaagctgctccacttcttgtatcgaagactgcctggcttcagaaatgtcgtgcaattgtgcaattggtgttgataacgggtttgcgtacacattagatgggttactcaaagaagaattcttggaagctcggatctctgaggctcgtgatcaacggaaacaggtgctgcgattctgtgaagagtgcccattggagagagctaaaaaggttgagattttggaaccatgtaaagggcatctaaagaggggagccattaaagagtgttggttcaaatgtggttgcactaagagatgcggtaaccgagtggtgcaaagaggaatgcacaacaaattacaggtgtttttcacgccaaatgggaaaggctggggacttaggactttagagaaactgcctaaaggggcatttatttgtgagtacattggagagatattgacaattccggagttataccaacgtagctttgaagataaacccactttgcctgtgatattggatgcacattggggttctgaagaaaggttagagggtgacaaagctctgtgtcttgatgggatgttttatggaaatatctcaaggttccttaaccacagagacatcgaggcaatggaggaactcgcatgggattatggcattgacttcaacgataatgactctctaatgaaaccctttgattgtctgtgtggtagcagattctgcaggaacaagaagcgatcaacgaagaccatgcagattttgaacaaagcatga

SEQ ID NO: 2333 - DNA, 1953 bp, Arabidopsis thaliana
  Clone ID: AT_T6G15.C1.o10.tg
atgggttcttctcacattcctcttgatccgtctctaaatccgtcaccttcactgatcccaaagcttgaaccagtcactgaatcaacccaaaacttggcctttcaacttccaaacacaaacccacaagccctaatttcatcagccgtctccgatttcaacgaagccacagacttttcctcagattacaacaccgtcgccgagtcagcccggtctgctttcgctcaacggcttcaacgtcacgatgatgttgcggttcttgattccttaaccggagcaatcgtaccggttgaggagaatccggaaccggaaccgaatccttactcaaccagtgactcttcaccgtcggttgctactcaacgacctagaccgcagccacgttcgtcggagctagtgaggatcactgatgttggacctgaaagtgagagacagtttcgtgaacatgtgaggaagacgagaatgatttatgattctcttaggatgtttttgatgatggaagaagctaaacgtaatggggttggtggaagaagagctagagctgatggtaaagctggtaaagctggttcaatgatgagagattgtatgttgtggatgaatcgtgataaacgaatcgtcggttcgattcccggtgttcaagttggggatatcttcttctttaggtttgagttatgtgtcatgggcttacatggacaccctcaatctgggatcgattttcttacagggagtcttagttctaatggggagccaatagctactagtgtgattgtttctggtgggtatgaggatgatgatgatcaaggagatgtgattatgtatacaggtcagggtggacaagataggcttggaaggcaagctgaacatcagaggctggaaggtggaaaccttgcgatggaacggagtatgtattatgggattgaagtgagagttattagagggttgaagtatgagaatgaggtttctagtagagtttatgtttatgatgggttgtttaggattgttgattcttggtttgatgttgggaagtctggtttcggtgtgtttaaatatcggttggagaggattgaaggacaggctgagatgggtagttcggtgttgaagtttgctaggactcttaagactaatccattgtctgtgagaccgagaggttacatcaatttcgatatctcgaatgggaaggagaatgttcctgtctatttgtttaacgacattgacagcgatcaagaacctttgtattatgagtatcttgcgcaaacttcgtttcctcctggcttatttgttcagcaaagtggtaatgcaagtggatgtgactgtgtcaatggttgtggcagtggctgcctttgtgaagccaagaattcaggtgagattgcttatgattataatgggacgctaataagacagaaaccgttgatacatgaatgtggatcagcgtgtcagtgccctccaagctgtcgaaaccgtgtgactcaaaagggtttgaggaataggctagaagtgtttaggtcactggaaacgggttggggagttcggtctttggatgtattacatgctggtgcttttatttgtgagtatgctggggttgctttgacaagggaacaagccaacattctgaccatgaacggtgatacattggtatatcctgctcgtttctcttctgcgagatgggaagattggggagatctgtctcaggtccttgctgatttcgagcggccttcttatcctgatattcctccggttgatttcgcaatggatgtgtccaagatgaggaatgttgcttgttacataagccacagtactgatccgaatgtcattgtccagtttgtactccatgatcacaacagtctcatgttccctagagtcatgcttttcgctgctgaaaacatccctcccatgactgagctcagccttgattacggagtagttgatgattggaacgccaagcttgccatttgtaattaa

SEQ ID NO: 2334 - DNA, 1059 bp, Arabidopsis thaliana
  Clone ID: AT_F24G16.C1.o230.tg
atgtcttcctcgaagaagggttccgatcggaatcaaatcaggaagtcgttgaggaagttaaaaaagcagattggggaattggagaaacttgaatctccggatcggttgaataatgtgaagcctatcttcatcaagcgcaatatatacttgaagaagaaactcaagaagaaagttaaggatcatggcatattctgttcttgctccttggatcctggttcttcaactctttgtggcagcgattgcaattgtgggattctactctcaagctgttcgtctagttgcaaatgcagtagtgaatgcaccaacaagccgttccaacaacgacatatcaagaagatgaagttagttcagacagagaaatgtggatatgggattgtagcagatgaagatatcaactcaggagagtttatcattgaatatgtgggagaagttattgacgacaagatttgtgaagaaaggctttggaagctgaatcataaggtcgagacaaatttctatttgtgtcagataaactggaacatggtgattgatgctactcacaagggtaataaatcaagatacatcaatcacagctgcagtcctaacacagagatgcagaaatggataattgatggcgagacaagaatcggcatttttgctacccgtttcataaacaaaggcgagcagttgacttacgattaccagtttgttcagtttggtgcagatcaagattgctactgtggtgcagtgtgttgcagaaaaaagctaggtgcaaaaccttgcaaaactaagaacacaaccttagaagaagctgtgaagccagtggcatgtaaagtgacctggaaaacgcccaagcttctcaattcagaggtaagagaaaccaatttggatgcgtcaggacaagcttggaacaatcatagccagaggaaaatatgttgccgggactgcattggtgcgtattacacggctcagatgaaggttttgactctagtagttgacatttttcaggtcatgtatgaggatggtgttaccgagatcatcgacatgtgcagagaagtttggaaggttgtaactgcttga

SEQ ID NO: 2335 - DNA, 1227 bp, Arabidopsis thaliana
  Clone ID: AT_T14N5.C1.o15.tg
atggtttgtcactgcaaaccatcacctgatggtaggttgggttgtggagaagaatgcctcaatagaatgcttaacattgaatgtcttcaaggtacctgtccagctggcgatttgtgttcaaatcagcagtttcaaaaacggaagtatgttaagtttgagagattccaatccggtaagaagggttatggcctgagattgctcgaggatgtacgagaggggcaattcctaattgaatatgttggagaggtgcttgatatgcaatcctatgagactcgccaaaaagaatatgctttcaagggtcagaaacatttctatttcatgacactaaatgggaatgaggtaatagatgctggtgcaaagggaaacctagggcgtttcattaaccatagctgtgaaccaaactgccgtactgaaaagtggatggtgaatggtgaaatttgcgttggaatattctccatgcaagaccttaagaagggtcaagagttgacatttgactacaactatgtgagggtttttggtgctgccgccaaaaagtgctattgtggatcatcacattgcagagggtatattgggggagatcctctgaatggtgatgtaattattcaaagtgattcagatgaagagtatcctgaacttgtgatccttgatgatgatgaaagtggagaaggaatcttaggtgcaacatctaggaccttcactgatgacgctgacgagcaaatgccacagagctttgaaaaggttaatggttacaaggaccttgctcctgataatacccaaacacagagctcagtatctgtaaaacttccagagagagaaattcctccacctcttcttcagccaactgaagttttgaaggaactttcgtcaggcatatctattactgctgtccagcaagaggttcccgctgaaaagaagactaaaagcacatctcccacgtccagttctcttagcagaatgtccccgggtggtacaaattctgataagacgacaaagcatggatcaggagaagataaaaagatacttccacgtcctcgtcctcgtatgaaaacttctcgctcatctgagtctagtaagcgagacaaaggaggtatttatcctggtgttaacaaagcacaggttataccagttaataagttgcaacagcagcccatcaaatctaaaggatcagagaaagtttctcccagtatcgaaacatgtaatgtactagttttagacgtgaattgttaa

SEQ ID NO: 2336 - DNA, 4266 bp, Arabidopsis thaliana
  Clone ID: AT_MDH9.C1.o9.tg
atggttgcggttgattccacttttcctagccatggtagctcttattctagtagaaggaagaaagtttctgctttggaaccgaattatttcggttcaatgtgtatgggagtttacagtgatgatgtttcaatctctgcaagagaagtagctcaagattactcttgtgacagctgtggtgatttggctactgtatcttccgcttgttgcaattttgatgaactgtgtggtttggattcagccttggagatgggatgtcgttcaaatgaagactgtcgtgcgggtcaagaggcttctggtagtggcatagcttcaggtctagacaagagtgttccagggtataccatgtatgcaagtggttggatgtatggtaatcagcaaggtcagatgtgtggcccttacacgcaacagcagctatatgatgggctatcaactaacttcttaccggaggatcttcttgtatatccaattatcaatggttatactgcaaattctgtaccacttaagtacttcaagcagtttccagatcatgtcgctactggctttgcatatctacaaaatggaataataagtgtagccccatctgttacttcatttcccccttctagtagtaatgctacagtccatcaagatgagattcaaacagagcatgcaacttctgctactcatttgatctcccatcagacgatgcctccacagacaagttctaatggttctgttttagatcagctaacactaaaccacgaggaatcaaatatgttagcttcattcctctcattgggaaacgaacatgcttgctggtttctcgttgatggtgaaggtagaaatcatggtccacattctatattggagctttttagttggcagcagcatggatatgtttcagatgcagccctgatacgtgatggtgaaaataagcttagaccaatcacattagcatcgttaattggtgtatggagggtgaaatgtggtgatgctaattgtgacgagccagtgactggcgtgaacttcatatccgaagtttcggaagaactctctgttcatcttcagagtggaataatgaaaatagctagaagagctctactcgatgaaatcatcagcagtgtgatttcagactttctgaaggccaagaaaagtgatgagcatctcaagtcttatccacccacttctgctgttgaatccatatcgtctcgggttattaatgcggagaaaagtgttgtctcaaacactgaatctgcaggctgtaagaatacaatgaatgaggggggtcatagtagtatagctgcagagtcgtccaaatatactaaatctgttggaagcattgagaactttcagacatcttgctcagctgtgtgtagaacgcttcaccaccattgcatgcaaatcatgtggaatgcagtcttttatgatactgtggcaactcattcatcatgttggagaaagaacaaaatttggtttcggtcttctgatatctcgactgttaattactgcaaaggttcccatacaaagtattcagacaaacctgaatcatttgagagttttacttgtagggtggattcctcttcctctaaaactgcttactctgatgaattcgacttagctaccaatggagccagagttcgtggattgtcatcagatacttatggaacggaaagtgtcatagcaagcatctcagaacatgttgaaaatgaactctttctgtctcttaaaactcacctaactgattatactagtattctcattaaagatggagcgaataatactactagtagtgcacgagatggcaaaatgcatgagggttccttccgtgagcagtataatttggaagggtctagtaaaaagaagaatggcttaaatgtggttcctgctaagttgcggttttccaatgatttcagtgattctcagagactgttgcaagagggagaatcctccgagcaaatcacatctgaagatattattgctaatatttttagtacagcattggagacatcagatattcctgttaatgatgaacttgatgctctggccattcatgagccaccaccacctggatgtgaaagcaatattaatatgccatgtctgcgctataagtatcagcctgttaggtccaaggaatccattccagagattaaagcatatgtttcaatggcattatgtagacagaagttgcacaatgatgttatgagagattggaaatcactgttcttaaagtgttatctcaacgaattccttgcttcactgaaaggaagccatcaagtttctcgtaaagaaacattggcactgaagaagcgcaaaactgttactcggaacaaaaagctggtacagtctaatatatcaaatcagacagcagaaaagctaaggaaaccatgtgtcggagcgtctgaaaaagttctggttaaacgatctaagaaactgtcagattctcactccatgaaagaagtccttaaagtcgatacacccagtatagatttgtcagttcggaaaccaagtcaacagaagatgaggaatactgaccggcgggatcattgtatcataaaggatgcgacgaagctccataaagaaaaggttggtaaagatgcgtttagtaaggtgatctgtgataaaagccaagatcttgaaatggaagatgaatttgatgacgcactccttataacaagactaagaagaatatctaggaataaaacaaaagagttaagagaatgtagaaacgctgcaaaatcatgtgaggagatttcagtgactgctgaggaatctgaggaaaccgttgactgcaaagatcatgaggagagtctttcaaataagccttctcagaaagtgaaaaaagctcatacatcaaagctaaagagaaagaatctgtcagatgctagagacgaaggtacaaaatcttgcaatggagcagtcaaaagttttactgagatttctggaaaggagggtgatacagaaagccttggattagcaatcagtgacaaggtttcccatcaaaatctcagcaagagacggaaaagtaagatcgctttgtttttattcccaggttttgagaatacctcccgcaagtgctttactaaattactatctccagaagatgcagcgaagaatggtcaggatatgtcaaaccctactggtaatcctccaagactcgctgaaggaaaaaagtttgtggaaaagtctgcgtgcagtatatcacagaagggcccgtcccaatcctcaattctaaaaagaaagcaccagttggatgaaaaaatctccaatgtaccttcacgtcggaggttatctctctcttccacggattctgaggatgctgttattaaggaagactatgatgttcgaaatgaagagaagcttccctgtcatacatcagataagctgcaaaaaggtccaaataaattgatacgtagaaggaagccattagcaaaacatacaacagaacgttctccaattaaggatttgtcagtggatgatggcaggcctaagccgattgcattaaaaccattggaaaaactgagttcgaaaccaagcaagaaaaagctgtttttgtcaatcccaaagtctgatggatgtgcacgcacatctattaatggttggcattggcatgcatggtcattaaaggccagtgctgaagagagagcccgtgttaggggaagttcttgcgtacacatgcaacattttggttccaaaagtagtttgactcagaacgttctttctgcaagaactaatagggcaaaactgcgtaatcttttagctgctgcagatggggctgatgtcttgaaaatgtctcagttgaaggctaggaaaaagcatttacggtttcaacaaagcaagattcatgattggggtcttgtcgcacttgaaccgattgaagctgaagactttgtgatcgaatatgttggagagttgatacgttcttctatatctgagatacgtgaacgccaatatgaaaagatgggaataggaagcagttatcttttcaggcttgacgatggctatgtgcttgatgccacaaagcgaggtggcatagcgaggtttatcaaccattcatgtgagccgaactgttacaccaagattataagcgtagaaggtaagaaaaagatattcatttatgctaagcggcatatagacgccggtgaagaaataagttacaactacaagttcccattggaggacgacaaaatcccctgtaactgtggagcgccaaatgtgtattgcttttgtgagcaggtgccgtggatcgctaaactaaaaagaaggacgtggttttcaagacgaaactga

SEQ ID NO: 2337 - DNA, 1434 bp, Arabidopsis thaliana
  Clone ID: AT_F6I18.C1.o230.tg
atgaacgatgaggaaccatcgaatcggactaaacgagggatgttagatctgggaaacatgtctatgtctgcatctgttgctctcacttgttgcccttcttttcttccggcggcttcaggccctgaattagccaaatctatcaattccccggaaaatctagccggagaatgcaatgggaaacatttaccaatgattccaccggaggaagaggtcaaggacattaaaattgctaatggagtcactgcttttacccggaaacagaatccgtctgacagagtcaagaaagggtttgtcttggatgatcatgtgaaggattgggtcaagagaagagtggcttctggtgtttcagagtcgacatgtttccttccttttcttgttggtgccaagaaaatggttgattgtcttgtttgccataagccggtgtacccgggggaagacttatcgtgttctgttcgcggctgccaaggcgcttatcactcgctttgtgcgaaagaaagtcttggtttttctaagtcaagcaaatttaaatgccctcaacattttctgatagaatggagtatgcaggagtgctttgtctgcaagcaaagaacacaatggcggtgtgttaagtgtccaatggctgctcatgataaacattctccatggtcaaaagaaatacttcacttaaaagaccaaccaggaagagcagtttgttggaggcatccaactgattggcggctagacacaaaggttgattttttagtttaccgctttcataagatacttcttgaagcttcttacgatttgtactttcatagagttttactcacaggactgacaaaatctctgttgattgagcagcatgcagttgcacagagtgagattgagggatgcagctgtcctgaaagttgtggaaacagaccattccgcaaagagaaaaagatcaaaattgttaagactgaacattgcggttggggagttgaggcagcagaatcaatcaacaaagaggacttcattgtcgaatacattggtgaagtgattagtgatgctcaatgtgagcaaaggctttgggatatgaaacacaaaggcatgaaagacttttacatgtgtgagattcaaaaagacttcacgattgatgctaccttcaaagggaacgcctctcggtttctgaaccacagttgcaacccaaactgtgtattggaaaagtggcaagttgaaggtgagacccgtgtgggtgtctttgcagctcgtcaaatagaagcaggagagccacttacatatgactacagatttgtgcagtttggtcctgaagtaaagtgcaattgtggttctgaaaactgtcaaggttatcttgggacaaagaggaaagaaccaaactgtttggttgtatcttggggagcaaaacgcagaagattgtttcaccgacctatagcccgtaaaccgcagcaagattag

SEQ ID NO: 2338 - DNA, 1275 bp, Arabidopsis thaliana
  Clone ID: AT_T27C4.C1.o2.tg
atgcaacaagcgatgctcaccaataaagacgagaaggtactcaaagctttagagagaacaaggcaattggatattcccgatgaaaagacaatgccagtgcttatgaagctcctagaagaggctggtggcaattggtcgtatataaagttggataactatactgcactggtcgacgctatttattctgttgaggatgagaataagcaaagtgaaggttcatctaatggtaatagagggaagaatcttaaggtcattgactctcctgctactctgaaaaaaacttacgaaacccgttctgcatcctcaggttcctccattcaggtagtccagaagcagccacagcttagtaatggtgatcgcaagaggaaatataaaagcagaattgctgacataactaaaggttcagagagcgttaaaatccctcttgtcgatgatgttgggagtgaagctgtgccaaagtttacttacatccctcacaacattgtttaccaaagtgcttatctccacgtgtctctggctcgaatctctgatgaagattgctgcgcaaactgcaaagggaactgtctttcagctgactttccttgcacttgtgctcgtgaaaccagtggagaatatgcttataccaaagaagggctgctaaaggaaaagtttctggacacctgtcttaagatgaaaaaggaaccagattcgttccctaaagtttactgcaaagactgccctttggagagagatcacgataagggcacatatggaaaatgtgatggacacttaatccgaaagttcatcaaggaatgctggagaaagtgtggatgtgatatgcagtgtggaaatcgagtagtacagagagggataaggtgccaactgcaggtttactttactcaagaagggaaaggatggggtcttagaacactgcaagacttgcccaaaggaacctttatctgtgaatacattggtgaaatattgaccaacacggagttatacgatcggaatgttaggtctagtagtgaacgacatacatatcctgtaactctggatgcagactggggttctgaaaaggatctaaaagatgaagaagctctctgcctggatgccacaatctgtggaaatgtcgcaaggtttatcaatcacagatgcgaggatgcaaacatgattgatattccgatagagatagagacgcctgacagacattattatcatattgctttttttaccctacgagacgtgaaggccatggatgagttgacatgggtaagcaccatgattaagctaccttag

SEQ ID NO: 2339 - DNA, 1035 bp, Arabidopsis thaliana
  Clone ID: AT_F6E13.C1.o28.tg
atgccagccagcaaaaagatttcggaccggaatcacttagggcaagtgttcgacaagctattgaatcagattggagaatctgaagaattcgagttaccggagtggttgaataaaggaaaacctactccttatatcttcatcaggcgcaatatatacttgacgaagaaagtcaaaaggagggttgaagatgatggaatcttctgttcttgctcctcctcgtctcctggttcttcttcaactgtctgtgggagtaattgccattgtgggatgctattctcaagctgttcctcaagttgcaagtgtgggagtgagtgtaacaataagccgttccaacaacgacatgtcaagaagatgaagttaattcagacagaaaaatgcggatcagggattgtggcagaagaagaaatcgaagctggagagtttatcattgaatatgttggagaagttattgatgataagacttgtgaagagaggctttggaagatgaaacaccgtggcgagacaaacttttatttatgtgagataaccagagatatggttattgatgctactcataagggaaacaaatcaagatatattaatcatagctgcaaccctaatacgcagatgcagaaatggataattgacggcgagaccagaatcggcattttcgccacccgtggtatcaaaaagggagagcatttgacctatgattatcagtttgttcagtttggtgcagatcaagactgccattgtggggctgtaggttgcagaaggaagcttggtgtaaaacctagcaaacctaagatagcctcggatgaagcttttaatctagtggcacatgaattggcccagacactgcccaaggtgcatcaaaatggacttgtaaatagacacatagatgcaggaaaatcatggaacaatcttagtcaaagggatacatgttcgcgtgatgttcgaggatggtgttaccgagtttgtcgacatgtcgagagaagactgggagattgtctaatattgttttcagattgctttgaagttgagaaaccaaaataa

SEQ ID NO: 2340 - DNA, 2739 bp, Arabidopsis thaliana
  Clone ID: AT_T13J8.C1.o20.tg
atgattatcaaacggaaatttaaaacccagataccgagtttggaacggtgcaaactcggtaatgagtcaaggaagaagaagagaaagttgaacttgggaggaggtggttactactatcctctcaatcttctcggagaaatcgccgccgggattgttccaggtaatggacgcaatggattctctgcttcctggtgcactgaagttacaaaacctgttgaggtggaagagtcattgtctaagagaagatctgattccggtactgttagagattctcctccggcggaagtctcacgtccaccgcttgttcggacatctaggggaagaattcaggtgcttccttctcgattcaatgattcggtgcttgataattggaggaaggatagtaaaagtgattgtgatttggaggaagaagaaatagaatgcaggaatgagaaagttgttagttttcgggttcctaaagctactaatttgaaaagcaaggaacttgataggaagagtaagtatagtgcattgtgtaaagaagaaaggtttcacgagcaacataatgatgaggctcgtgctcgtgttgatgagaagcttccgaataaaaagggtacttttgggccagagaacttctattcaggtgacttggtttgggcaaagtctgggagaaatgagccgttttggccggctattgttatcgatccaatgacacaagcacccgagcttgttttgcgttcttgtatacccgatgcagcctgtgttgtgttctttggtcactctgggaacgagaatgaaagggactatgcatgggtgaggagagggatgatcttcccttttgtggactatgttgccaggttccaggaacagcctgaactgcaagggtgcaagcctgggaattttcagatggcattggaggaagcatttttggcagatcagggattcacggagaagttgatgcatgatattcacttggctgctgggaactcgacttttgacgattctttctacagatggattcaagaaactgcggtctcaaatcaggagctcaataacaatgctccaagacaggcaagtgtctctatgattttggggctgttaaagaaacacagaaatccactagcatgtgcaggatgtgaaacagtcatttcttttgagatggcaaaaaaaatgaaagatctgattcctggagatcaattgttgtgtaaaccatgttcaagggtgcgctgtgatggttgtaaagtccggatacacgcagaatgtgaccaaatatcagataggcatttgaagattactactgtcctacttgcagagcaaaatttaactttgacctatcagattcagaaaaacaaaactcaaagtcaaagtaggcctcttcgtcttaacttttattattgttttctcaacggcttccttttgattgccaaatgtctaaatttgggagttttctggtacagagttgcgaaaggcgatggtcagatggttcttcctgacaaggttattgttgtatgcgctggagtagaaggagtttatttcccgaggctccatttagtggtatgtaaatgtggctcctgtggacctaaaaagaaagcccttagcgaatgggaaaggcataccggatcaaagtcaaaaaattggaagaccagtgtgaaagtcaaaagctcgaagctggcactagaagattgggtagaaaaggaaatggaatcctgtaacatgttgcagtgttttgagtgtttttgtgatgcttttgttggcttttcctttcgttgttggcagagacatatgagccggtcaatgcgaagtggacaacagaacgatgtgcagtttgcagatgggttgaagattgggactacaacaagattattatctgcaacaggaggtgcattgaagccaactgatgtggaaacgttgtgggttcatgtgacatgtgcttggtttcagcctgaagtatgttttgcaagtgaggaaaaaatggaacctgcagttgggattttgagtattccatcaactaattttgtgaagatatgtgtaatatgcaaacaaatacatggctcgtgtactcagtgttgcaagtgttctacatactatcatgccatgtgtgcctcccgagctggttatagaatggagttgcactgcttggagaaaaatggtcagcagataacaaagatggtgtcctattgtgcttatcacagggctcccaacccagataacgtgttaattatacaaactccttcaggagccttctctgcaaagagtcttgtccaaaacaagaagaaaggtggttccaggcttatttcattaatcagagaagacgatgaagcacctgcagagaataccattacatgtgatccattttctgctgctcgttgtcgagtatttaaaagaaagatcaatagcaagaagggaacgacttcaccacttgcaggcaagaattctctgatgtttgaacgagattggaatgttcagaggacagaaatggatcgggtctgctttgggcgatctggaattcatggatggggtctttttgcaagaagaaatatccaagaaggagaaatggttcttgaatacagaggggaacaggtgagaggtagcattgcagacttgagagaagcacgttatcgcagagtaggaaaggattgctatcttttcaagatcagtgaagaagtagtggttgatgctacagataaagggaatatagctcggctcatcaatcattcggtaagctgcttggcatggactttttacgtacaagaaatttga

SEQ ID NO: 2341 - DNA, 1875 bp, Arabidopsis thaliana
  Clone ID: AT_MAC12.C1.o7.tg
atggctggaaaaaggaaacgagctaatgctcctgaccaaacagagcgaagatcgagtgttcgggttcagaaagtgagacagaaagcgttagatgagaaggcgcgtttagtacaggagagggttaagctcctcagtgacagaaagagtgaaatttgtgtcgatgacactgagttacatgagaaagaagaggaaaatgtcgatgggagccctaaacgaagaagccctccaaagctaaccgcaatgcagaaaggaaagcagaaattgagtgtttctctgaatggtaaggacgtgaacttggaacctcatctcaaagtgacaaagtgtctgaggttatttaacaagcaatatctcctctgtgtccaggctaagttgagcaggcctgatttgaagggtgtaactgagatgataaaagctaaggcgatattgtacccaagaaaaataatcggtgaccttccaggtatagacgttggacaccgttttttttcaagagctgaaatgtgtgctgtaggattccataaccattggctaaatggcattgattatatgtcaatggaatacgaaaaagagtatagtaactacaaattaccgcttgctgtttctattgttatgtcgggccagtacgaggatgatctagacaatgcagatacagtgacttacactggacagggagggcataacttaactggtaataaacgtcagataaaggatcaacttttagaacgagggaatttggcgctaaagcactgctgcgaatataatgtgcctgtcagagtaactcgtggtcacaattgcaaaagtagctataccaaacgagtatacacttatgatggactgtacaaggttgaaaagttctgggcacaaaagggcgtttcaggatttacagtgtataagtaccgactgaaacgattggaggggcaaccagaactaactactgatcaggtcaactttgttgctggacgcataccaacgagtacttcagaaattgagggtttggtatgtgaggacatctccggagggctagaatttaagggtatccccgccactaatcgtgttgatgattcaccagtttcaccaacatctggtttcacatacatcaaatctttgattattgagcctaatgtcataattccaaagagttcaactgggtgtaactgccgaggcagctgcactgactcaaagaaatgtgcatgtgctaagcttaatgggggtaactttccatatgttgaccttaatgatggcagattaattgagtctcgagatgttgtatttgaatgtggtcctcactgtgggtgtgggccaaaatgtgtcaaccgaacttctcagaagcgtctaagattcaatcttgaggttttccgctctgcaaagaagggttgggcagttagatcatgggagtacataccagctggttcaccagtatgtgagtacataggagttgtcaggagaactgctgatgtggatactatctctgacaatgaatacatatttgagattgactgccaacagacaatgcaaggtcttggtggaagacagagaagactaagagatgttgctgtaccaatgaataatggagtcagtcagagcagtgaagatgagaatgcgccagagttctgcattgatgctggttcaacaggaaactttgctaggtttataaatcacagttgtgaaccaaacctatttgttcagtgcgtcctgagttctcaccaggatataaggcttgcccgtgtggttcttttcgcagctgacaacatttccccaatgcaggagctcacttacgactatggatatgcgcttgatagcgttcatggaccggatgggaaggtgaagcagctcgcttgctactgtggagcgctaaattgtaggaaacgcctttactaa

SEQ ID NO: 2342 - DNA, 2133 bp, Arabidopsis thaliana
  Clone ID: AT_MRH10.C1.o10.tg
atggcacctaatctgcatatcaagaaagcatttatggctatgagggctatgggaatagaggatgcgcgagtgaagccggtcttgaaaaaccttctcgccctttacgagaaaaactgggagttaattgctgaagacaattacagggttcttgctgatgctatcttcgatagccatgaagatcaggctattcaagaaagcgaagaaaagaaggcagacgaagttaaagaggatgaaggctgtgccgcagaagttgacagaggaaagaaaaagctccatgaatctatcgaggatgacgaagatgttatggctgagtctgatcgccctttaaagaggctgcgacgcagaggtgaaggaggctctgctttggcaagccctagcttgggcagtccgactttagagggaccttcaattaatgacgaagaaaatgctccgatcctattgccatatcatcctgtaccaattgaaaatgaccatgatgctggtgagctcattcttacaaaagtcgagcccattacaaatatgcctctcagttctattcctgattcagtagatagaggggactcttccatgcttgagatagacaaatcaaatggacatgtggaagagaaggctggtgaaacagtaagtactgctgatggtactaccaatgacatttctcctacaactgttgcgagatttagtgatcacaagctagctgcaaccatagaagaacctccagcacttgaattagcttcttctgcttcaggcgaggtgaagattaatcttagttttgctcctgcaactggaggatcaaatccccatttaccttctatggaggaactacgaagagcaatggaggagaagtgtctccgatcatacaaaatactggaccccaacttttctgtgcttggttttatgaacgacatctgtagctgctacctggacctggcaacaaacgggagagattcagctaaccaattgccaaaaaacttgccgtttgtcacaacgaacattgatgcattgaagaaatctgcagcaaggatggcttatacttctcaggccagtaatgatgttgttgaaatctgcagcaacgaacatatgcgtgatgctgaaaacggtgcagttggtgattccatggctttggtagttgttcctgaatgccaactttctgcagatgagtggagattgataagcagcgtcggggacatcagtctagggaaagaaactgttgagattccctgggtgaatgaggtcaacgacaaagttcctccagttttccattacatagcccaaagtcttgtgtatcaagatgctgcagtgaagttttcgcttgggaatatcagggatgaccaatgctgctcctcttgctgtggagattgcttggctccgtcaatggcatgcagatgtgcaactgcttttaatggctttgcatacacagtagatggcctcctacaggaagattttctggaacagtgtatctctgaggcccgtgatccgcggaaacaaatgttactgtattgcaaagaatgtcctttagagaaagccaaaaaagaagtaatcctggaaccgtgcaaagggcatctaaagagaaaggccattaaagaatgttggagcaagtgtggctgcatgaagaattgtggcaaccgagttgtccaacagggcattcacaacaagctgcaggtgtttttcacgcccaatgggagaggctggggactcagaactctagaaaaactgcctaaaggagcatttgtctgtgagcttgctggagagatattgaccattccagagttgttccaacgcatctctgacaggcctacttctccagtaatattggatgcgtactggggttctgaagacatttcaggggatgacaaagcactttctcttgaaggaacgcactatggaaatatttccaggttcatcaatcacagatgcttagatgcaaatttgattgagatcccagttcatgcggagactactgattcacactactatcatcttgcattcttcacaacaagagagatcgatgctatggaggaacttacctgggattatggtgtcccattcaaccaagatgtgtttcccacgagtccgttccattgtcaatgtggtagcgacttctgccgagtcaggaagcagattagcagtgagtaa

SEQ ID NO: 2343 - DNA, 1065 bp, Arabidopsis thaliana
  Clone ID: AT_F20H23.C1.o22.tg
atgcagcgactgcgagagtcaccaccaccgaagacgcgttgtcttggagaagcttccgacattattccggccgccgatcgatttctccgatgtgcgaatttgattctcccatggctaaaccctcgagaactcgccgttgttgctcaaacctgcaaaaccttatccctaatctcgaaatctctaaccattcaccgatctctcgacgctgcacgatccttggaaaacatctcaatcccgtttcacaactccatcgattctcaacgatacgcgtacttcatctacacaccttttcagatccccgcttcatctcctcctccgccgcgacaatggtggggagctgctgctaatgaatgtggatcggagtctagaccttgttttgactcagtgagtgaaagcggacgttttggggtgagtttagtggacgagtcaggatgcgaatgcgagaggtgtgaggaaggatactgcaagtgtttagctttcgcggggatggaagagatagctaacgaatgtgggtcgggttgtggatgcgggtccgattgttcgaaccgggttacgcagaagggggtttcggttagtttgaagattgtgagagatgagaagaaaggttggtgcttgtacgctgaccagcttatcaagcaaggccaattcatctgtgaatatgcaggtgagctattgacaacagatgaagcacgtagacgtcaaaacatttacgacaaactcagatcaacacaatccttcgcttcagctcttttggtcgtacgcgaacacctcccttcaggacaagcttgtttaaggataaacatcgacgccacaagaattgggaacgttgctagattcatcaaccattcttgtgacggtggaaatctctccactgttctgttgagaagctcaggagcgttgcttcctcggctctgtttctttgcagcaaaggacataatcgcagaggaggagttaagtttcagttatggagacgtaagtgtggccggagagaacagagacgacaagctaaactgctcttgtggtagttcctgctgtttgggaacgttgccttgtgagaatacctga

SEQ ID NO: 2344 - DNA, 2010 bp, Arabidopsis thaliana
  Clone ID: AT_F3N23.C1.o30.tg
atgcaaggagttcctggatttaatactgttccaaatcctaaccattatgacaaatcaatagtgttagatattaaaccgttgcgaagtttgaaacctgtttttccaaatggtaatcaaggtccaccttttgttggttgtccaccttttggtccttcctcatctgagtattcttctttcttcccatttggagcacaacaaccaacgcatgatactccagatctcaaccaaactcagaacacgcctattccatcatttgttccacctcttcgatcgtatagaacacctactaaaacaaatggccccagcagctccagtggaactaaaagaggtgttggtcgacctaagggaactactagtgtgaagaaaaaagagaagaagactgtggccaatgagcctaacttagatgttcaggtagtgaaaaaattcagttcagattttgacagtgggatcagtgcagcagagcgagaagatggaaatgcgtacttagtaagtagtgtattgatgcgttttgatgcagttaggaggcggctcagccaagtagaattcacaaagtccgctacttctaaagcagcaggtactctgatgagcaatggggtgcggacaaacatgaagaagagagttgggacggttcctggaattgaggttggagatatcttcttttcccggatagagatgtgtttagtgggtcttcacatgcagactatggctggcattgactatataattagtaaggccggttcagatgaagagtctttagcaactagcattgtttcatctggacgttatgaaggtgaagctcaggatcctgagtcattaatttacagtggacaaggcggcaatgcagacaagaacagacaagcatctgatcagaagcttgaaaggggtaatctagcattagagaatagcttgaggaagggaaatggagtaagagtcgtaagaggggaggaggatgcagcttcgaaaacaggaaagatctatatctatgatgggctttattcgatctcagagtcatgggtagagaaagggaaatctggttgcaacacctttaaatataaattggtgagacaacctggtcaaccacctgcgtttggcttttggaaatctgttcagaagtggaaggaaggtttgactacaagaccaggcctgatccttccagatctcacctcaggagctgaaagtaaacctgtttcacttgtgaatgatgttgatgaggataaagggcctgcttattttacctatacctcctctctgaaatactcagagacctttaaactaactcagcctgtaattggttgttcctgcagtggttcatgttcaccaggaaatcataactgctcttgtatcagaaaaaatgatggtgatctcccttaccttaatggggttatactcgtttcccggaggcctgtgatatatgaatgtggcccaacgtgtccttgtcatgccagttgcaaaaacagagtgattcagacaggactgaaatcccgcctggaagtgtttaagacaagaaaccgcggttggggtttacgttcgtgggattccttacgtgctggttctttcatatgtgaatatgctggtgaagtcaaagacaatggcaaccttagaggaaaccaagaagaggatgcgtatgtctttgacacatcgcgtgtttttaactcgtttaagtggaattatgagcctgagcttgtagatgaagacccttcaactgaagttcccgaagagtttaatctcccatcaccactcctaatcagtgccaagaaatttggcaatgtagctcggttcatgaaccatagttgctctcctaacgttttttggcagccagttattcgtgaaggaaacggtgaatcagttatccacattgctttctttgccatgcgtcatatccctcctatggcagaattgacatatgattatgggatttctcctacatccgaggccagagatgagagccttttacatggacagaggacatgtctctgtggatctgagcaatgtcgtggttcattcggatga

SEQ ID NO: 2345 - DNA, 2265 bp, Arabidopsis thaliana
  Clone ID: AT_MYC6.C1.o7.tg
atgaagtacggtgggaaggatgatcaaaagatgaagaacatacaaaacgttgaagattactatgatgatgctgatgaggattctcgtgatggtgaaggagaggagaagaggagagattttactgatttggagttgaagccggatcatggaaataggcctttgtgggcttgtgctgatggaaagattttcttggagacattttctcctctctataaacaagcttatgactttcttatcgccattgctgaacccgtttgcaggcctgagtcaatgcacgagtataatttaaccccacactcgttgtatgctgctgtttccgttggtcttgagacagaaactatcatctctgttttgaataagctatctaagaccaagctacccggggagatcattgatttcatccatgcttctactgctaattatgggaaagtgaagttggtattgaagaaaaatcggtattttattgaatcaccattcccggaggtgttgaaaaggcttctcagtgatgatgtcataaatcgagcaagatttacttctgagccatattatggtggtgatggatttacgatcggcaaaacaagtggtgaacttgaagcaggacctggggagttgttgaatgaagcagaattggcagcagcagcagaagagaaagaaactcactcatttgagatagaccctgcactggtggagaatgttaagcagcgttgcttgccaaatgccttgaattaccctatgttagaggaatatgacttcaggaacgataatgttaatcctgatcttgacatggaactgaagccccatgcacaaccaaggccataccaggaaaaaagtttgagcaaaatgtttggaaacggacgagcaagatctgggattatagtgttaccttgtggagctggtaaatctctagttggtgtttctgcagcggctcgtataaagaagagttgtctttgtttggcaacgaatgctgtctcggtggatcaatgggcctaccaatttaagttgtggtctactataaaagatgaccaaatatgccgtttcacttctgatagtaaagaacgattccgtggaaatgctggtgttgttgtgacaacctataatatgattgcctttggtggtaaacgatctgaagaagcagagaagattatagaagaaatgagaaacagagagtgggggttgctgcttatggacgaggtgcatgtggttccagcccatatgtttaggaaagttatcagtattacaaaatctcactgcaagctaggacttacagccacccttgtgagagaagacgaaaaaattacagatttaaacttcctcattggcccgaaactctatgaagccaattggctagatttagttaaaggaggctttattgcaaatgttcagtgtgctgaagtatggtgtcccatgaccaaagagttttttgcagaatatctgaagaaagagaactcgaaaaaaaaacaggcgctttatgtcatgaaccctaacaagttcagagcctgtgaatttttgatacgtttccatgaacaacaacgtggggataaaatcatcgtctttgcagacaatctttttgcacttacagagtatgcaatgaaactccggaaaccgatgatttacggtgcaaccagccatatcgaacgaacaaaaattctcgaggcgtttaaaaccagtaaaaccgtgaacactgtattcctgtcaaaggttggtgataactccatagatatccctgaagcgaatgtgatcatccagatttcgtcacatgctggttctagacgtcaagaggctcaacgtttgggtcgtatccttagggctaagggtaaacttgaagatagaatggctggtggaaaagaagagtacaatgcattcttctactcgcttgtttctaccgatacacaggaaatgtattattcaacgaaaagacagcagtttttgatcgaccaaggttatagcttcaaggtaataacaagcctcccacctccggacgcgggttcaagcttgggctaccacagtcaagaagaacagttgtctcttctcggaaaggtgttgaatgctggagacgatatggttggtttagaacaacttgaagaagacacagatggaaaggctctaaagacgcgacgaagcatgggatcgatgagtgcaatgtccggtgcaaatggaagggtctacatggaatacaactcaggtcgtcaaaaatctggtaaccaatccaagaaacctaaagacccaaccaaacgacacaatatcttcaaaaaacgttatgtttga

SEQ ID NO: 2346 - DNA, 5730 bp, Arabidopsis thaliana
  Clone ID: AT_T25K16.C1.o4.tg
atggtaatggaggatgagcctagagaagccacaataaagccttcttattggctagatgcttgcgaggacatctcttgtgatcttatcgatgatctcgtgtctgaatttgatccttcctctgttgctgtcaatgaatccactgatgaaaacggcgtcatcaatgattttttcggtgggattgatcacattttagatagtatcaagaacggtggaggcttaccaaacaatggcgtttctgataccaattctcaaatcaacgaggttactgtaactcctcaggttattgctaaggagacagtgaaggagaatgggttgcaaaagaatggcggtaagagagacgaattctcgaaagaggaaggagacaaggataggaagagagctagggtttgtagttatcagagtgaaaggagtaacctttcaggtagagggcatgttaataattctagggagggagataggtttatgaataggaaacgtactcgtaattgggacgaggcgggtaacaataagaagaaaagggaatgtaacaattacagaagagatggtagagatagagaagttaggggttattgggagagggataaagttggttccaatgagttggtttataggtcagggacttgggaagctgatcatgaaagagatgttaagaaagtgagtggtggaaaccgcgaatgcgatgtcaaggcagaggagaacaagagtaagcctgaagaacgtaaagagaaggttgtggaagagcaagcaaggcgataccagttggatgttcttgaacaagctaaagcgaaaaacacgattgctttccttgagaccggtgctggaaagacacttatcgcgattcttcttattaaaagtgttcataaggatctgatgagccagaacagaaaaatgctctcggtgttcttggttcccaaagtgcctttggtttatcagcaagcagaagtgatccgtaatcaaacttgttttcaagttggacattattgtggtgagatgggacaggacttttgggattctcgaaggtggcaacgagagtttgagtctaagcaggttctagttatgacagcacaaattctgttgaatatactgagacacagtatcattagaatggaaacaattgatcttcttattctcgacgagtgtcaccacgctgtcaagaaacatccatactctttagtgatgtcagagttttaccatacaactcctaaagataaaagacctgccatctttggaatgactgcttcgcctgttaatttaaagggtgtttcaagccaagtagattgtgcgataaagatacgtaacctcgagaccaagttggattctacggtttgtactataaaagatcgaaaagaattagagaaacatgtgcctatgccttcagagatagtcgtcgagtatgacaaagctgctactatgtggtctcttcatgagacaataaagcaaatgattgcagctgttgaagaagcggcacaagcaagttcaaggaaaagcaagtggcaatttatgggggctagggatgctggagcaaaggatgaattgagacaggtttatggcgtctctgaaagaacggagagcgatggtgctgccaatttgattcataaacttagagctatcaattatactcttgctgaattgggtcaatggtgtgcttacaaggtgggacaatcattcttgtctgctttgcaaagtgatgagagggtgaatttccaagtcgacgtgaagtttcaagaatcatacctcagtgaggtggtgtcactcttgcaatgtgagcttctggaaggcgctgctgctgaaaaagtcgcggcggaagttggcaaaccagaaaatggtaatgcacatgacgagatggaggagggagagctccctgatgatcctgtggtctcgggaggggagcacgttgatgaagtaataggcgccgcagtggctgatgggaaagttactccaaaagtacaatcattgatcaaactactcctcaaatatcagcacacagctgattttcgagctattgttttcgttgagagggtggttgctgctttggttcttcctaaggtttttgcggagctgccttcgcttagttttatacggtgtgccagcatgattggacacaataacagccaggagatgaaatcatctcaaatgcaggatacaatttccaaattccgagatgggcatgtgacactgttagttgccacaagcgttgctgaggaaggacttgatattaggcaatgtaacgttgttatgcgtttcgaccttgcaaagacggtgctggcatacattcagtctcgtggccgggcaagaaagcctggatcagactacatactcatggttgagagaggaaatgtatctcacgcagcgttcctaaggaatgctaggaacagtgaggagacacttcgaaaagaagcaatagaaaggactgatcttagtcatctcaaagatacatcgagattaatctcaattgatgctgtgcctggtacagtttataaggtggaggcaactggtgccatggttagcttgaattccgcggttggtcttgtacatttctactgctctcagcttcctggtgacaggtatgcaatccttcgtcctgagtttagcatggagaagcatgaaaagcctgggggccacacggaatattcatgtaggcttcagcttccttgcaatgcaccgtttgaaatacttgagggtcctgtttgcagttcaatgcgtcttgcacaacaggctgtatgtttagctgcttgcaagaaactgcatgagatgggtgcatttaccgatatgctattaccggacaaaggaagtggtcaagacgctgagaaggctgaccaagatgatgaaggtgagcctgttcctggaactgctagacatagagagttctatcctgaaggtgtggcggatgtacttaagggagaatgggtttcatctggaaaggaagtttgtgagagctcaaagctattccatttatacatgtataatgtcagatgtgtagattttggctcttcaaaagatccattcctaagcgaagtttcagagttcgcgattctttttggcaatgagctggatgcagaggtattatcgatgtctatggatctttatgttgctcgggccatgatcactaaagcatctcttgctttcaagggatcacttgatattacagaaaaccagctatcatctctaaaaaagtttcatgtgaggttaatgagtatcgtgttggatgttgatgttgaaccctccacgacaccatgggatcctgcaaaggcctacctgtttgtccctgttactgacaatacgtctatggaacccataaaagggatcaactgggaattggttgaaaagattacgaaaaccacagcgtgggacaaccctcttcagagagctcgtcccgatgtatatctcgggactaatgagagaactcttggtggggacagaagggaatatgggtttggtaaacttcgtcacaacattgtatttgggcagaaatctcacccaacttatggtattagaggagctgttgcatccttcgatgttgtgagagcttctggattgttacctgtgagagatgcttttgagaaggaagtagaagaggatttatcaaaaggaaaattgatgatggctgatgggtgcatggttgcagaagatcttattgggaaaatagtgacagccgcacattccgggaagcggttttacgtagattcaatttgttatgacatgagtgcagaaacatctttccctaggaaagagggatatcttggtcccctagagtacaacacgtacgctgactattacaagcaaaagtatggagttgatttgaactgtaagcaacaacctttgattaaaggacgtggtgtttcgtattgcaagaaccttctttctcctcggtttgaacagtcaggtgaatctgagacagtccttgataagacatattacgtgtttcttccacctgaactatgcgttgtgcatccgctttcgggttcacttatccgaggtgctcagaggttaccctctataatgagaagagttgagagcatgttactcgctgttcaactcaaaaatttgattagttatcctattcccacatcaaagattcttgaagccttgactgccgcctcgtgccaggaaacgttctgctacgagagagctgagcttttaggagatgcgtatctaaaatgggttgttagtcgttttctgtttctcaagtatcctcaaaagcacgagggtcagcttacaaggatgaggcaacaaatggttagtaatatggttctttatcagtttgctctggttaaagggcttcagtcatatatccaggcggatcgattcgccccgtctaggtggtctgctcctggtgtgcctccggttttcgacgaggacacaaaagatggaggatcttcgtttttcgatgaagagcaaaaacctgtttccgaggaaaacagcgatgtgtttgaagatggggagatggaggatggtgaactagagggtgatttgagttcgtaccgagttttatctagcaaaacgttagctgatgttgttgaggctttgattggtgtttattacgtcgaagggggtaagattgcagctaatcatttgatgaaatggattgggattcacgtggaggatgatcctgatgaagtcgatggaacattgaaaaatgttaatgttccagagagtgtgctcaagagcatcgactttgttggtcttgagagagctcttaaatatgagtttaaagagaaaggtcttcttgttgaagctataacacatgcttcaagaccatcttcaggtgtttcgtgttaccagagattggaatttgttggtgacgcggtcttggatcatctcatcacaagacatctatttttcacatacacaagccttcctcctggtcggttaacagatcttcgagctgcagcggttaacaacgagaattttgctcgcgttgcggttaaacataaactccacttgtaccttcgtcacggttcaagcgccctcgaaaaacagattcgggaatttgtgaaggaggttcaaaccgagtcatcgaaaccggggtttaactcttttggtttgggagactgcaaagcaccaaaagttcttggagacattgttgaatctattgcaggtgctatttttcttgatagtggaaaagatacaactgctgcttggaaggtttttcaacctttgcttcagcccatggtgacaccagagacacttccaatgcatccggtgcgagagctacaagagcggtgccagcaacaagcagaagggttagaatacaaagcgagtaggagtggtaacacagcgactgtggaagttttcatcgacggtgttcaagttggagtagcgcaaaacccgcagaagaaaatggctcaaaagctagctgcgaggaacgcacttgcagctttgaaagagaaagaaatagcagaatcaaaggagaagcatatcaacaacggtaatgcgggagaggatcaaggcgagaatgagaatgggaacaagaagaatgggcatcagccgtttacgagacaaacgttgaatgatatttgtttgaggaagaattggccaatgccttcttacagatgtgtgaaagaaggaggaccggctcatgcaaagagatttacgtttggggtaagagttaatacgagcgatagaggatggaccgatgagtgtattggcgagccaatgccgagtgttaagaaagctaaggattcagctgcggttcttctacttgagcttttaaataaaactttttcttga

SEQ ID NO: 2347 - DNA, 4770 bp, Arabidopsis thaliana
  Clone ID: AT_F5O24.C1.o210.tg
atgcgtgacgaagttgacttgagcttgaccattccctcgaagcttttggggaagcgagacagagaacaaaaaaattgtgaagaagaaaaaaacaaaaacaaaaaagctaaaaagcagcaaaaggacccaattcttcttcacactagtgctgccactcacaagtttcttcctcctcctttgaccatgccgtacagtgaaatcggcgacgatcttcgctcactcgactttgaccacgccgatgtttcttccgaccttcacctcacttcttcttcctctgtttcttcgttttcctcttcttcgtcttctttgttctccgcggctggtacggatgatccttcaccgaaaatggagaaagaccctagaaaaatcgccaggaggtatcaggtggagctgtgtaagaaagcaacggaggagaacgttattgtatatttgggtacaggttgtgggaagactcacattgcagtgatgcttatatatgagcttggtcatttggttcttagtcccaagaaaagtgtttgtatttttcttgctcccaccgtggctttggtcgaacagcaagccaaggtcatagcggactctgtcaacttcaaagttgcaatacattgtggaggcaagaggattgtgaagagccactcggagtgggagagagagattgcagcgaatgaggttcttgttatgactccacaaatacttctgcataacttacagcactgtttcatcaagatggagtgtatctcccttctaatatttgatgagtgtcaccatgctcaacaacaaagcaaccatccttatgcagaaatcatgaaggttttctataaatcggaaagtttacaacggcctcgaatatttggaatgactgcatctccagttgttggcaaagatggtccacctcttgacagctttacctacttttcagggtcttttcaatcagagaatttatcgaaaagcattaatagccttgaaaatttgctcaatgccaaggtttattcagtggaaagcaatgtccagctggatggttttgtttcatctcctttagtcaaagtatattattatcggtcagctttaagtgatgcatctcaatcgaccatcagatatgaaaacatgctggaggacatcaaacagcggcgtgctaatgtttattgtcttcgttttttggaggctgctaaaatccaattgaatagtgaccataatgtacaagacgagcctgtgggaaagaatcctaagtcaaagatatgtgatacatatctttctatggctgctgaggccctctcttctggtgttgctaaagatgagaatgcatctgacctcctcagcttagcggcgttgaaggaaccattattctctagaaagctagttcaattgattaagatcctttcggtattcaggctagagccacacatgaaatgtataatatttgtcaatcggattgtgactgcaagaacattgtcatgcatactaaataacttggaactgctacggtcttggaagtctgatttccttgttggacttagttctggactgaagagcatgtcaagaaggagtatggaaacaatacttaaacggttccaatctaaagagctcaatttactggttgccactaaagttggtgaagaaggccttgatattcagacatgctgtcttgtgatccgttatgatttaccagagactgttaccagcttcatacagtccagaggtcgtgctcgaatgcctcagtctgaatatgcgtttctagtggacagcggaaacgagaaagagatggatcttattgaaaattttaaagtaaatgaagatcgaatgaatctagaaattacttacagaagctcagaggaaacttgtcctagacttgatgaggagttatacaaagttcatgagacaggagcttgtatcagtggtggaagcagcatctcccttctctataaatattgttctaggcttccacatgatgaattttttcagcccaagccagagtttcaattcaagcctgttgacgaatttggtggaactatctgtcgcataactttacctgctaatgctcctataagtgaaatcgaaagttcactactaccttcgacagaagctgctaaaaaggatgcttgtctaaaggctgtgcatgagttgcacaacttgggtgtacttaacgattttctgttgccagattccaaggatgaaattgaggacgaattgtcagatgatgaatttgattttgataacatcaaaggtgaaggctgttcacgaggtgacctgtatgagatgcgtgtaccagtcttgtttaaacaaaagtgggatccatctacaagttgtgtcaatcttcattcttactatataatgtttgtgcctcatcccgctgataggatctacaaaaagtttggtttcttcatgaagtcacctcttcccgttgaggctgagactatggatatcgatcttcaccttgctcatcaaagatctgtaagtgtaaagatttttccatcaggggtcacagaattcgacaacgatgagataagactagctgagcttttccaggagattgccctgaaggttctttttgaacggggggagctgatcccggactttgttcccttggaactgcaagactcttctagaacaagcaaatccaccttctaccttcttcttccactctgtctgcatgatggagaaagtgttatatctgtagattgggtgactatcagaaactgcttgtcatcaccaatctttaagactccatctgttttagtggaagatatatttcctccttcgggctctcatttaaagctagcaaatggctgctggaatattgatgatgtgaagaacagcttggtttttacaacctacagtaaacaattttactttgttgctgatatctgccatggaagaaatggtttcagtcctgttaaggaatctagcaccaaaagccatgtggagagcatatataagttaacagaaccacaagaacttgacgaatacttcatagagattcctcccgaactttctcacttaaagataaaaggattatctaaagacatcggaagctcgttatccttgttaccatcaatcatgcatcgtatggagaatttactcgtggctattgaactgaaacatgtgctgtctgcttcgatccctgagatagctgaagtttctggtcacagggtactcgaggcgctcacaacagagaaatgtcatgagcgcctttctcttgaaaggcttgaggtgcttggtgatgcattcctcaagtttgctgttagccgacacctttttctacaccatgatagtcttgatgaaggagagttgactcggagacgctctaacgtctacatccgtgatcaagcattggatcctactcagttctttgcatttggccatccatgcagagtaacctgtgacgaggtagccagtaaagaggttcattccttgaatagggatcttgggatcttggagtcaaatactggtgaaatcagatgtagcaaaggccatcattggttgtacaagaaaacaattgctgatgtggttgaggctcttgtgggagctttcttagttgacagtggcttcaaaggtgctgtgaaatttctgaagtggattggtgtaaatgttgattttgaatccttgcaagtacaagatgcttgtattgcaagcaggcgctacttgcccctcactactcgcaataatttggagacccttgaaaaccagcttgactataagttcctccacaaaggtctacttgtacaagcctttatccatccatcttacaacaggcatggaggaggctgctaccagagattggagtttcttggggatgctgttctggactacttgatgacatcctattttttcacagtcttcccgaaactgaaacctggtcaactgaccgatctaagatctctctcagtaaataatgaggcgctagcaaatgttgctgtcagtttttcgctaaagagatttctattttgcgagtccatttatcttcatgaagttatagaggattataccaatttcctggcatcttccccattggcaagtggacaatctgaaggtccaagatgcccaaagattagtcctataaaagaactgattgaactttgccagtcttacaagtgggatcgggaaatatcagcgacgaaaaaggatggtgcttttactgttgaactaaaagtgaccaagaatggttgttgccttacagtttctgcaactggtcggaacaaaagagagggcacaaaaaaggctgcacagctgatgattacaaacctgaaggctcatgagaacataacaacctcccatccgttggaggatgttctgaagaatggcatccgaaatgaagctaaattaattggctacaatgaagatcctatagatgttgtggatcttgttgggctggacgttgaaaacctaaatatcctagaaacttttggcgggaatagtgaaagaagcagctcatacgtcatcagacgaggtctcccccaagcaccatctaaaacagaagacaggcttcctcaaaaggccatcataaaagcaggtggaccaagcagcaaaaccgcaaaatccctcttgcacgaaacatgtgttgctaactgttggaagccaccacacttcgaatgttgtgaagaggaaggaccaggccacctgaaatcattcgtctacaaggtaatcctggaagttgaagatgcgcccaatatgacattggaatgttatggtgaggctagagcaacgaagaaaggtgcagcagagcacgctgcccaagctgctatatggtgcctcaagcattctggattcctttgctga

SEQ ID NO: 2348 - DNA, 2067 bp, Arabidopsis thaliana
  Clone ID: AT_MVI11.C1.o12.tg
atggaggaagaagatgaagagatcttatcgtcttccgattgcgacgattccagcgatagttacaaggatgattctcaagattctgaaggagaaaacgataaccctgagtgcgaagaccttgcggtggtttctctttcatccgacgcagatcggaaatctaagaacgtaaaggatcttctgagcaatgtaacaactatcatggtgcattcagtgcttgtcaaatttcttcgccctcatcaaagagagggtgtccagttcatgttcgattgtgtttcaggattacatggttcggcaaatataaatggttgcattctggctgatgacatgggtttagggaagacattacagtccattactttactatacacacttctttgtcaaggatttgatgggacgcctatggttaaaaaggccattattgttacaccaacgagtcttgtcagtaactgggaagctgaaattaagaaatgggttggagacaggattcagcttatagccctctgtgagagcaccagagatgatgttttgtctggaatagatagtttcactcgaccaagaagcgctttgcaggtacttatcatttcttacgagacattccgaatgcactcatccaagttctgccagagtgaatcctgtgatcttctaatatgcgatgaggctcataggttgaaaaatgaccagacacttacaaacagggctttggcttcattgacatgcaaacgtcgagttttgttgtctggaactcccatgcagaatgacttggaagagttttttgccatggtcaacttcacaaatccagggagtttaggtgatgctgcacactttcgccattattatgaggcacctattatatgtggaagagaacctacagccactgaggaagagaaaaacttagctgctgaccgctccgcagaactgagttcaaaagtcaaccagtttattttgaggagaaccaatgcattgctctcaaatcacctaccacctaagataattgaagtagtttgttgcaagatgactactctccagtccactttgtacaaccattttattagctcgaaaaatcttaaaagggcgcttgctgataatgcaaaacaaaccaaagttttggcttatataacagctcttaagaagctctgcaatcatccaaagctaatctacgacacaataaaaagcggcaatcctggaactgttgggtttgagaattgcttagagttcttccctgcagaaatgttctctgggagatctggagcatggacagggggtgatggtgcctgggtcgagctctctgggaaaatgcatgttctctccagacttttggccaacctacgtcgaaaaactgatgaccgcatagtccttgtatcaaactacacacagacattggatctttttgctcaactctgtcgtgaaagaagatatccttttctgaggctggatggatcaacaacaatcagcaagaggcagaagcttgttaaccggttgaacgacccaacaaaggatgagtttgcatttctcttaagcagcaaggcgggtggctgtggattaaatttaattggtgctaatcgacttgttttgttcgatcctgattggaatcctgccaatgataaacaagctgctgctagagtttggagggatgggcaaaagaaaagagtatatgtctacaggtttcttagtactggaactattgaagaaaaggtttaccagcgccagatgtcaaaagaagggcttcaaaaagttattcagcatgaacagacggataacagcacgagacaggttcttgctggaatgttatatgcttcatctattaatgatacacattcaaatggtttatctcaaagcctcttttctggtaatgtggctaggtctgaaatccatgaaaagatgagctgcagcaggtgccaaaatgatgcctctggtactgagaatatcgaagaagggaatgagaacaatgtagatgacaatgcttgccagattgaccaagaagacataggcggatttgcaaaagatgcaggatgctttaacttgttaaaaaactctgagagacaggtcccttcttgtgcttgttactga

SEQ ID NO: 2349 - DNA, 6150 bp, Arabidopsis thaliana
  Clone ID: AT_F24B22.C1.o240.tg
atggcacagcaacaatcttcccgactcaatcgtctccttactttgttggacactggttcaacacaagctactcggctaactgcagccaagcagatcggggatattgcaaagtctcatcctcaggacttgagctctcttttgagaaaggttttgcatcacctccgtagtaaaaagtgggatacgagggttgctgctgctcatgccattggtgccattgttctgaatgtcaaacatccttcattgagtgaactgttaaattctttagcaacgaagttgggtgaggcagggatatctgataatgtagatgaagtggtggctttccgcaatcttcagtcaaagattctggcaaatgcgccctttagaagctttgagatgaataaggttttagagtttggcgctttgttggcttctggtgggcaggagtacgacattttgaatgacaattccaagaatccaagggatcgagtggctcgtcagaaaaagaatctccgacgacgtctaggtttggacatgtgcgagcagttcatggatgtcaatgaaatgattagagatgaggatcttattgagcagaagtccaatgttcctgccaatggggttgggaacagattatacgcaaactgttctccacatcatatccagcaattcgtttcaagaatggttccccgcgtcaattctaggaggccaagcgcaagggaattgaatttactgaaacgaaaagcaaaaataagctctaaagatcaagctaaaggtagctgcgaagtagcagatgttgagatgtcatcgtctcatgttgcctcaacctcaaaaagaatattgtccgactcattggactcgagcaaggcggacattggtaatgaggatgatatcgagcctgatggggatggaaaatggcctttccatagttttgttgagcaacttattcttgacatgtttgaccctgcatgggagatccgccatggaagtgtaatggctctcagagaaatattaatgcttcatggtggttctgctggagtgtcaacagaagagtttagttcagataatgggtttgagttgaaagacgtcttgaataaagtaacacgagaaagagaaatcgacttgaatatgcaggtttcagaaaatgagctggagccacttcggaaaagacctaagattgaagatccatcaaaatcttttattgataacactgttttagaagttattgggggtgactatgatattaatgttaaagatgaagatgctgagtttttgctgccaccagtgaaggtcaatggtcaaactgactgtagttctacgaaactggaacctcaatcttctatggatgactcgacatctcactctgaaataaaccatgtggcagaggttaacaatcattttgaagataagagttttattgaggagccagttatacctaagcaacaggaagaaaatctcgaagtgttggatttggtcaaacaagctaggcattcttggataaaaaattttgaatttctccaggattgcaccattcgcttcttatgtgtgctttcacttgaccgatttggggattatatttctgatcaggtagttgctcctgtgcgggaagcttgtgcccaagcacttggtgctactttcaaatacatgaatccctcgttgatttatgagacattaaatatcttgcttcagatgcagcgccggcctgaatgggaaattcgtcatggaagtcttttaggcatcaagtacttggttgctgtgcgacaggaaatgctccaagatttgcttggctatattcttccggcgtgtaaagcagggttggaggattctgacgatgatgtgcgagcagttgccgctgatgctcttataccggcagcagctgctattgtctctttgagaggacagacattactttccattgtcatgctactgtgggatatcttacttgagttggatgacttaagtccatcaacaagcagtattatgaacctcctggcagaaatttattctcaagatgacatgaccctagtgatgcatgaggaattatcactgggggaggaacaaaatattgaactcaatgaaatgggtcatatcgagagtattggagaaagaagagatgtaaaggaaagcccttatgcattatcaggtttggcccctaggttgtggccattcacgaggcatgacataacatcagttcgattttctgctattcgaactctggaacgacttcttgaagctggatgcagaaaaaacatttctgggcagtctaaaagttctttttggccatcttctattttaggggacaccctgagaatcgtctttcaaaatcttttgcttgaatcaactgaggagattctggagtgttcagagagagtgtggagactattggttcagtgcccagtggatgatctagaagacacggcaaaattctatatggcttcgtggatagaacttgcagctactccttatggctccacattggatgctacaaaaatgttttggccagtagctccccctcgtaagagtcatttcaaagctgctgctaagatgaaagctgtcaaacttgagaacgaagcttctagcattctgggatttgattatgcaagaagttctgcttcccttgaaaaacaggaagatgcttctgccaggtccactaaaattattgtcggctctgatatggagatgtcagtgacccgtacccgggtagttacagcatctgcattaggtatctttgcatcccggttgcgagagggttcaatgcagtttgtggtagatccactgagtagtactcttacttctatgtccggtgttcagcgccaggttgggtccattgtgctcatctcttggttcagagaaactaaatgcaaggccccttctgatggaagtggaagtttgcctggtttccctagtcctctgaaaaaatggctgctagatttgttagcttgcgcagaccctgctttccctactaaagacatatttcttccttatgctgaactctcaagaacatacactaaaatgaggaatgaagcttctcagttgttgcatacagttgaaacctgccattgttttgataagttattatcaacgaataaactcaatgtggagagcgtgactgctgatgagacaattgactttgcatcaacactagatttgtggaacaaagaaagtgctggaaatgaatccttagaaaagcaagtttttgaagacgtggagtcatctaggcaacagctattaagtactgctggttatttaaagtgtgtccagagtaatctacatatcacagtcacctccctggtcgctgctgcagttgtttggatgtcagaatttcctgctagacttaatccaataatcttgccgctgatggcttcgattaaaagagagcaggaacaaatactacaacaaatagctgctgaggctcttgcagagctcattgcatactgcgtagatcggaagccaagccccaatgacaagttaatcaagaatatctgtagcttgacgtgcatggatcctagcgaaacacctcaagctagcatcattagctctatggatatcgttgatgatatggattttctgtcctcacggagtaacacaggaaaacaaaaagcaaaagtcgtgttggctagtggcgaagataggtctaaagttgagggttttatcacgagaagaggatctgaactcgcgttgaagcatttaagcttgaaatttggtggttccttgtttgacaaactcccaaaattatgggagtgcctcactgaggttcttgttcctgaaattccttcagatcaacagaagattgaccttaaaatagaatctatttcggatccacaggtggtacgttcaatagcaccagtgatggaagaaacactgaaacctagactgctcagtcttctgccttgtattttcaaatgtgttcgccattcccatgtggctgttagattggctgcttctagatgtgttatgacaatggctaaatcaatgacaacagatgtcatggcagcagtagtggaaagtgctattccaatgttgggagatttaacatgcattagtggtagacaaggcgcaggaatgcttattggtttgcttgtgcaagggctgggtgttgaactggttccatattctcctctattggttgttcctctcctgagatgcatgagcgatgttgacagttcagtcaggcagagcgtaacacgtagctttgctgcccttgtacctatgcttccattagcacgtggtgttccccctcccgtcgggttgagcaaagatctatctagcaatgcagaggatgcaaaatttttggagcagcttcttgacaactcccatatcgatgattacaagctttgcactgagctaaaagttcaattaagaaggtatcaacaagaaggaatcaattggttaggattcctaaagcgttttaagctccatggaattctctgcgatgatatggggcttggtaagactcttcaagcatctgcaattgtggcatccgatgcagcagagcgtcgtggttcaacagatgaactggatgtttttccatctataattgtttgcccttcaacattagttggtcattgggcatttgaaattgagaagtatatcgacctttctctgctaagcgtgttgcaatatgttggctctgctcaagaccgcgtttctctccgtgaacagttcaacaaccataatgtcattataacatcttatgatgtggtccgcaaggatgttgattatctgacgcaattttcatggaactactgtatcctggatgaggggcacataattaagaatgctaaatctaaaattactgcagcagtcaaacaattgaaggcccagcaccggcttatccttagtggaacaccaatacagaataatatcatggagctgtggtccctttttgacttcttgatgcctggatttcttgggacagagagacagtttcaagcatcttatggaaaaccattgctggcagctagagatcctaaatgctctgctaaggatgctgaagcgggtgtactggcaatggaagcactccataagcaggttatgccattcttactcagacgtacgaaagaggaagtcctctctgatttgccagaaaaaatcattcaggacagatattgtgaccttagtcctgtccagttgaagctttatgagcaattttctggttcaagtgctaagcaagaaatatctagtatcataaaagttgatgggtcagcagattccggaaatgcagatgttgcgccaacaaaagcatccacacacgttttccaggcactacagtacctgcttaaactctgcagtcatccgcttcttgttctaggcgataaggtcacagagccggtggcttctgatttggcagcaatgataaatggatgttcggacattatcactgagcttcataaagttcaacactctccaaagcttgtagctcttcaggaaattttagaagaatgtggaataggttctgatgcttctagttcagatggcactcttagtgtaggccagcacagagttctgatatttgcacagcacaaagctttgctggatatcattgaaaaggacttgtttcaagcccacatgaaaagtgtcacatatatgcgactagatggttcagttgtaccggagaaaaggtttgagattgtgaaagcctttaattcagatcctacaattgatgttctgctcctgacaacacatgttggtgggcttgggttgaacctgacctctgctgatacacttgtatttatggagcatgattggaacccaatgcgtgatcatcagtttgctaatatagagctgaacaaactctggcaggcgatggacagagcgcatagattgggacagaagagagttgtaaatgtacaccgtctgataatgcgtggcacacttgaagagaaagtgatgagtctccaaaaattcaaagtgtcggttgccaatacggtaatcaatgctgagaatgcgagtatgaagacaatgaacactgatcagttgcttgacttgtttgcttcagctgaaacgtctaaaaagggtggtgggtcttcgaagaagggatcagaggataatgatcagattgctggaactggaaaaggaatgaaggcaattctaggaaacttagaagaactgtgggatcaatcacagtacacagaagagtacaatcttagccagttcttaactaagctcaacgggtaa

SEQ ID NO: 2350 - DNA, 3399 bp, Arabidopsis thaliana
  Clone ID: AT_F2O10.C1.o13.tg
atggtggctcagcagctccaagagagatgcggcggcacttctcaagaagatccagttgagaccaccaagtctctgatctgtgctctcaattacatttctcgtgaccttcctttgcctcctcacctcttcaccgccgtttcttcaatctaccatggcgcttcttcttcttctctctctgactccgatgtctctccgccgctacctacttcgccgcctgcgaataaagctccctatggagctgatttgatgggtgaattcgaggatgcacttttgaagcagagaccagattgtgaatcaggctctcgattgatacaattactggataatcggaataagagtcatatccaacgccgcttatctgaacttgaagggggatgctttgtgcttactctttgtgtttttgaatcagaattaccttctactagaggtgaagatttgcaggcaaagtgcttacttgagctttatgggcttaagctacgggaattgcaaggcaaggttcgaaccgcggtgagctcggaattctggctacgtctgaactgtgcagatgtcagtagccaagtatttgactggggcatgatgcggttgcctcgtccattttatggggttggagatccttttgctatggaagctgatgatcagttcagaaagaagcgtgacgctgagctttcaatcttcgtgattggcattgctgatgtgttaaaagtctttgttcagaggttatcacgtttagaagaagaggagaagaatctgattgaaactgccaagaggaaattctttgcagaagtactcaatgcagtacgtgaattccagttgcaaattcaggcgactcaaaaacgccgtaggcaaaggaatgatggtgtgcaggcttggcatgggagacaaagacaacgcgctacccgtgctgaaaagttgaggctcatggcccttaagtccgatgatcaagaggcatacatgaaactagtaaaggagagtaaaaatgaaagactaaccactcttttagaggagacaaacaaactccttgctaatttgggagctgctgttcaacgtcagaaagatgctaaacttccggaaggcattgatctacttaaagactcagaatctgacttgtctgaacttgatgctccaagaagtgaaccattgcaggatctgcttcctgatcaggatatagatattactgagtctgacaataacgatgactctaatgatttactagaaggacagaggcagtataactcggctatccattcaatacaagagaaggtgacggagcagccctcgcttctagaaggtggggaactacgatcctatcaattagaagggcttcaatggatggtttctctattcaacaataacctcaatggaatattagctgatgagatgggtttgggaaaaactattcaaacaatttctctgattgcgtatcttctggagaataaaggtgtgcctgggccttatcttatagttgctccaaaagctgtgctaccaaattgggtaaacgagtttgcaacatgggtaccaagcattgcagcttttctgtatgatggacgtttagaggaaaggaaagcaataagggaaaaaattgcaggagaaggaaaatttaatgtgttgataacccattatgatcttatcatgagagataaagcatttttaaagaaaattgagtggtactacatgattgttgatgaaggacatcggctgaagaaccacgaatctgctctagcaaagactttattaacaggctatcgtataaaacgcagacttctgttgaccgggacacccatacagaatagccttcaagaactatggtcattgcttaattttctccttcctcacatctttaactcggttcagaacttcgaggaatggtttaatgctcctttcgctgaccgtggtaatgtcagtctcacggatgaagaggagctcttgattattcaccgcctgcatcatgttataaggccgtttatactgagaaggaaaaaggacgaagtagagaaattccttcctggaaagacacaggtcatattgaagtgtgatatgtcggcgtggcagaaagtgtattacaaacaagttacagacatgggcagggttggccttcaaacaggatctgggaaatcaaagagtctgcaaaatctaacgatgcaattaagaaagtgttgtaaccatccttatctatttgttggaggagactacaatatgtggaagaaacctgagattgtgagagcttcagggaaatttgaactccttgatcgtctccttccaaaactgcgcaaggctggacataggattcttctcttctcccaaatgacccgtctcattgacgttcttgagatatacttgacacttaatgattacaaataccttagactcgatggtaccacaaagacagatcaaagagggcttttactgaagcaattcaacgagccagattctccctactttatgtttcttttgagcacgcgtgctggaggtctcggtttgaacttgcaaactgcagacactgttattatctttgacagtgattggaacccacaaatggaccaacaggccgaggatcgagctcatcgcatagggcagaagaaggaagtcagagtgtttgttttggttagcgttggctctgttgaagaagtaatattggagcgtgcaaagcaaaagatgggcattgacgccaaagtcatacaagctggacttttcaacacaacttccactgcacaagacagaagagagatgcttgaagagattatgcgtaaaggaacaagctcgctcgggacagatgtccccagtgagagagaaataaaccggctagcggctcgtagtgaggatgaattttggatgtttgagcgaatggatgaggagagacgaaggaaggagaattacagagcccgtctgatgcaagagcaagaagtccctgagtgggcgtacactactcagacccaagaggagaagttgaacaacggaaagttccattttggtagtgtcacaggtaagcgaaaacgtaaagagattgtttacagcgacacactaagcgagttacagtggctgaaagccgtggagagcggtgaagacctgtcaaaactctcaatgagatataataggagagaggagaacgcaagcaacacaaagacatcaacgagcaaaaaagtgatagaatctatccaaactgtgagtgatgggacgagcgaggaggatgaagaagagcaagaagaagaaagagcgaaggagatgagtggaaaacagagagtggacaagtctgaagaggaagaagaagaaggtgaagaagagaatgatggaaaggcaatattcaagtggaatactcataagaagaaaaggtctagatactcttttacgtgttcttcgtctgactctagagctcaaagttccaatggaagtagacgaaaatga

SEQ ID NO: 2351 - DNA, 2037 bp, Arabidopsis thaliana
  Clone ID: AT_T14P4.C1.o33.tg
atggctggtttaagatcagtccatgttggatctgagaccaaagtcgtctcaaagaacgaatgtgcacacgttacgttgtggacggggacggcccaaggagatttgggcgtcgcgatggagccacactctcaccacaagaatgcgattcttccgtctagtagccaagacgagaatctcaaagaagaagaagttcctgatgatgatgattcagtcggcggtgaagttcaaggtgaggtcaatgctaatgactatataccaaatcctgccgctcctgcaaacactaaaagaaaatggcagatcatgaaagaaaaggttcagatgacagaggatgatgattttgatgagcagaatgcagtcattgctgaagctgctgagcagcctctagatttgattataccgctactaaagtaccaaaaggagtttttggcttgggctacaatacaggaactatcagccgtaagaggaggcattctcgctgatgagatgggaatggggaaaacaatacaagccatctctctcgttcttgccagacgggaagttgacagagccaaatctagggaagcagttgggcacacccttgtgcttgttcctcctgttgctctttctcagtggttagatgagatttctcggttgacatccccgggaagcaccagggttcttcaataccatgggccgaagagagacaagaatgttcaaaagttaatgaattacgactttgttttgacaacatctcccatagttgagaatgaatataggaaggatgaaggagtggacgaaacaatgtctcctttacactctattaagtggaatcgtatcatcgtcgatgaggctcatgatatcaaaaacagaagtagtcgcactgccaaagctgtttttgctttggaggcgacctacagatgggctctgagtggtacccctctccagaatgatgttgacgagctctactccctggttagttactctttcctcaactttttctatagcacatacgcttccttcgcgtttcgccatactcatattacttttgcaagaaatgtgactgtgaagttcttgatcggaggtaacatcttaccactctcaattcctgtgcgcatcgaaaatgtcccagctgtcctcataatgcaaatcaacacatctcttggtggaaagaggcgagatgcactaagtgtagtagaagctgatttctatgaatcactatacaaagttagcaagacaacatttgatgggtatattcaggctgggacattgatgaataactatgcacatatatttggtcttcttatccgactgagacaagctgttgatcatccatacctggtgagttattctagtcctagtggcgctaacgctaacttgcttgatgcgaacaaaaatgagaaagaatgtggtttcggccatgacccttccaaggactactttgtgacttctagtgaacatcaggcaagcaagacaaagcttaaaggatttagagcctctagcattttaaatcggataaacctcgatgattttaaaacaagtacaaagattgaggctttgagagaagaaatcaggttcatggttgaaagagattggtctgccaaagcaatagtattcagccagttcacatcattcttggacctgataagttacgccttggggaagtctggggttagctgtgttcaactggtgggaagcatgtccaaggcagctaaagatgctgcactcaaaaattttaaagaagagccagattgcagagttttattaatgagcttgcaagctggaggggttgctctaaatctaacagccgcttcgcatgtgttcatgatggacccgtggtggaacccagcggttgagaggcaagcacaggacagaatacataggatcggacagtgcaagcctgtcagggttgtaagattcataatggagaaaacagtagaggaaaagatactaacgcttcaaaagaagaaggaagatttgtttgaaagtacgttaggtgactctgaagaggccgttgtacaaaagctgggagaagacgatatcaagtccctgttcgcataa

SEQ ID NO: 2352 - DNA, 3162 bp, Arabidopsis thaliana
  Clone ID: AT_MBM17.C1.o5.tg
atggcggaaaatacggccagccatagaagaaaacctcggagcttgaacgatcgtcactacagtatcctccaggatctttctgcgcctcctagacagcctccctcttcttctcatggagaagatgaagagacgaagaagtccatgattaagcttgctggacgacgtcgtctttgcaaggccttgccaaaggaagacgaagctgatggatatgacgatcctgatttggttgatttctattccccagttaaaggagagacatcactagacagcgctggaattgggaacaaattcacatcttgggatgaatcaaaggaagctaacactgagctggctggcgagcctaacttttcgataatcacagacttttgttcgccctcacctcagttgaagcaaaaagaggaaatgcaaggtgatggaggaaggaacgagatcatgggtattttggatgatttgacctctaagcttgggacaatgtcgattcagaagaagaaggatagccaaagcaatgattttgatgcatgtggagtgaagagccaggttgataaatttgattttgaggatgccaaatcctcattttccttgctatcggatctatctaagtcctcaccagatgtggttaccacatataatgctggcgttaatagtatcaaggacaagcaaggcaaatctggttttgccatccgggaagagcaaactagtaaggaattttcaagggaatgggaagaaagaatttcgaatgttggaaagcaaaactcatattctggtcggcactttgacgataactctgaagataataggcagggatacaatcttgaccgtgggaagagccaatgcaaggaagtcgaccaaagtatgaagacgaccaggcacatagaggtaagtgagaagataagaacagtcggaaggtctaatgctgccaagctaagagacttagacgaggatgatgatgatgatgactgtctcattttgtccgggaaaaaggcggctgaaatgaaaattaataagccagctcggtcttataacgccaaaagacatggttatgatgagagatcgttggaagatgaagggtctatcactttaactggcctcaatttgtcttacacattgcctggaaagattgcaacaatgttatatccacatcagagggaagggttgaattggctttggtcattgcatacccaagggaaaggtggaatacttggagatgatatgggtttaggtaaaactatgcagatttgtagttttcttgctggtttattccactccaaattgatcaagcgtgctctggtagtggccccaaaaaccttgctgcctcactggatgaaagaattagctaccgtgggactttcacaaatgactagggaatactacggtacttctacgaaagcccgggaatatgatctccaccacattctgcagggtaaaggtattcttctaacaacctatgatattgtgcggaacaatacaaaggctttgcaaggtgacgaccattatactgatgaggatgatgaagatggaaacaaatgggactacatgattctggacgagggacatcttattaagaaccccaacacacaaagggcgaagagtttgcttgagatcccaagttctcaccgtattataataagtggtacaccaatccagaacaatctcaaggctttaagctttaacaggtttaagcagaattatgagcattacattcttcgtggaactgacaaaaatgctactgatagagaacagaggataggctcaacagtagcaaagaacttgagggagcatattcaacctttcttcttgcggcgccttaagagtgaagtcttcggtgatgatggtgcaacctccaaactttcgaagaaggacgaaattgttgtatggttacggttaacagcttgccagaggcaattatatgaagctttcttaaacagtgaaattgttctgtcagcttttgatggttcacctctagcagctctaacgattctgaagaaaatatgtgaccacccgcttctcttaactaagagggctgctgaggatgtccttgaaggaatggattcaacattaacacaagaagaagcaggcgtggctgagagattggctatgcatatagcggacaatgtggatacagatgattttcagaccaagaatgacagtatctcttgcaaattgtcatttatcatgtcgctactggattctcttacctccaacggttatagtttcttgcgaattgatggtacaacaaaagcccctgacagattgaagactgttgaagaatttcaagaaggtcatgtggctcctatatttctcttgacttctcaagttggtggtctcggccttactctgactaaggcagaccgtgtgattgtggtggaccctgcctggaatccaagcacggacaaccagagtgttgatcgagcatatagaattgggcagacaaaggatgtcatcgtatataggttaatgacctcagcaactgttgaagaaaagatatacagaaagcaggtatacaagggaggattgtttaaaactgcaactgagcataaagaacaaatccgctacttcagccagcaggaccttcgagaactttttagtcttcccaagggaggctttgatgtttcacctacacaacagcaactatacgaagagcactataaccaaatcaaactagatgaaaaactggaatcccatgtaaagtttctcgaaacccttggtatagctggagttagccaccatagcttacttttctccaagacagctcctattcaagcgatacagaaagatgaagaagaacaaataaggagagaaacagcattgctcttgggacgcgcatcagcaagtatttcacaagacaccgtcatcaatggggctgactatgctttcaagccaaaggatgtgaatttggacaagagaatcaacatttccccagtcgatgacaaggaattgtcagaaagcgtaattaaagcaagactcaatcgtttgacgatgctattacaaaacaagggtacggtctcaaggctacctgatggaggggcaaaaatccagaagcagattgctgaattgactcgagaactgaaagacatgaaagcagcagaaaggatcaacatgcctcaagttattgacttggaggaggatataagtcggaagatgcaaaaaggattgaatctgtag

SEQ ID NO: 2353 - DNA, 1917 bp, Arabidopsis thaliana
  Clone ID: AT_MGL6.C1.o5.tg
atggatgatacaatggacatgagttcaggtagtgatgaagaagtacaagaagagaagaccactgttaacgagagggtcatctatcaggctgcattacaagatctgaagcaacccaagaccgaaaaggatctacctcctggtgttcttacagttcctcttatgaggcatcagaaaattgcattgaactggatgcgtaagaaagaaaaaagaagcaggcactgtttgggagggatattagcagatgatcagggacttggtaaaacgatctcgacgatctctcttatcctgttacaaaagttgaagtcacaatcaaagcagagaaagcgaaaaggtcaaaactctggtggtacattgattgtttgtccagcaagtgttgtaaaacaatgggcaagagaagttaaagagaaggtttctgatgaacacaaactctctgttttagtccaccatggatctcacagaaccaaagatccaacagaaatagcaatatatgatgtggtcatgacaacttacgccattgttacaaatgaagttccacaaaaccctatgctgaatcgttatgatagtatgagaggcagagaaagccttgacggatcgagtttgattcagcctcacgttggtgcactaggaagagttaggtggttgagagtagtattagatgaagctcatacaattaaaaaccatagaaccctaattgcaaaagcttgttttagccttagagccaaaaggagatggtgtttgactggaacgccgataaagaacaaagtagacgatctttatagctatttcagatttcttagatatcatccatatgccatgtgcaattcatttcaccaaagaatcaaagctccaattgataaaaagcctcttcatggttacaagaagcttcaagctattctaaggggtataatgttgcgccgcaccaaagaatggtctttctacaggaagcttgaattgaattcacgttggaagtttgaggaatatgctgctgatgggactttgcatgaacacatggcttatcttttggtgatgcttttgcgactacgccaagcttgtaaccatccacaacttgttaacggatatagtcactcagatactacaagaaaaatgtcagatggagttcgagtagcccctagagagaatctaatcatgttcctcgatctcttgaaattatcctcaaccacctgctctgtttgtagtgatccaccaaaagaccctgttgttactttgtgtggccatgtgttttgttatgagtgtgtgtctgtaaacattaacggggataacaatacgtgccctgcacttaattgccacagccagcttaaacatgatgttgttttcactgaatctgcagttagaagttgcatcaacgattatgatgatcctgaagataaaaatgctttagttgcatcaaggcgagtttatttcatcgaaaatccgagctgtgatagagattcttcagtcgcttgcagagcaaggcagtccagacactccaccaataaagacaatagtatcagtggactggtatgtgcgatgttgatgtctcttaaagctggaaaccttggattgaatatggtagctgcaagtcatgtcattctactggacctatggtggaatccaacaacagaggatcaagctattgatcgagctcatcgtatcggacaaactcgagctgttacggtcactcgtattgccatcaaaaataccgttgaggaacgaattttgactcttcatgaacgtaaaaggaacattgttgcatctgcattgggtgaaaaaaactggcaaaagttctgcgattcaactaacactagaagatctcgaatatctgttttttggtgtgtagaatatcccagagtttttattgataagaggaataaaacctttagctatttaataagtcacaagtgtgaatgtaatgaataa

SEQ ID NO: 2354 - DNA, 3834 bp, Arabidopsis thaliana
  Clone ID: AT_K9D7.C1.o2.tg
atggccattgttgatgacgcagagatgcggttaaccgaatccgaagctgtttcgagttccgatgatcgtaagatcgttgcagatactcccgattttatagacgaatcctctctagtcatcagaacaaccactggagtccgaatctcagctctaccggcggagcaaagccttgttgactccgatggatctaactcggaggttacgcttccggcgaaagacgaggtaattagtgatggttttacttgtgtgaacaaagagattgtagaatctgattcatttagggagcagaatctagagattggagaacctgatttagatgttgagaatcgcaaagaagcgatgattattgattcgatagaaaattctgtggttgaaattgtttcaagtgcttctggtgatgattgtaatgttaaggtagaggtagtggaacctgaattgcttgttgagaatctggtggttgctaaagaagaagaagaaatgattgttgattctatagaagattctgttgttgaaattgtttcaactgcttcgggttgtgattgtaatgtgaaggttgaggtagtggaccctgaattgtgtgttgataatctggtggttgttaaagaagaagaaatgattgctgattcgatagcggaatctgtggttgaaactgtttcgagaggtttagattatgagtgtgttgatgtcaaggtgaaagaagaacctgatttaggtacaaaattggaagaagattctgtttttccgaatgtgcttgagaagaaggatgaggtaatcaaagtcctggaagaccagccaagtgagattaataagaagctagagcaagagaatgatgatctcttttcgtctggagattcagatggtacatcagccaagagaaggaaaatggagatggaatcatatgcaccagtcggtgtggaaagctgtatcctggcgccgacgcctcttcgagttgtgaaaccagagaagttggatacccctgaagttattgatctggaatcagagaaaagttatactcatgtgaagatggaacctgttgaggaaataaaggtggaagctgttaagatgagttctcaagtggaagatgtgaaatttagccgtgagcagaaatctgtgtatgtgaagaaggaaccagttggagcaagaaaggtgaaagtggaagatggagattttccggtggagaaagattggtatttggttgggaggtcacttgttactgctacttctacgagtaaaggaaggaaattagaagataatgagattgtgaatttcacattttcttctgttgcaaaatggaaagtcccaaacattgttcgtttctctaccaaaagatgtggagagattggtagacttccgatggagtggtcaaattgggctgtgagccttttaagatctggtaaggtcaagatgttaggcagatgtgtagcggcgccaccatttcttacaatgatgcaagaaattatgctatatgtcagtttttacattcacagctcgatattcactgatgttagcaaatccacttggcggattggttcttccccaaaccttgagtccacccttcatcctcttctccagcttttcaaacacttgacaatcaaaccttatcaaaaggcggagtttactcctgaggaactcaactctcgtaaacgttcactgaatttggaggatgactatgatgaaagagcagcattgttggccatagcaaaaagaagaaaaggttgtcaacagtctctggagcagaacaaagatgaagaagaggctcctgagtcatatatgaatcgggttgtcggcgctgccgattcatacaaccttgaggaaatggaagctccaagtacactcacgtgtaacctgagaccgtaccagaaacaagctctctactggatgtcggaatctgagaaaggaattgatgttgaaaaggcagctgaaactctacatccttgctgggaggcttatcgaatctgtgacgagagggcaccttctatttatttgaacatctttagtggtgaagcaacaatccagtttccaacagcaacgcagatggcaagaggcggaatattggcagatgccatgggacttggtaaaactgtgatgacaattgcactaatacttgcacggccaggccgaggtaacccggaaaatgaagatgtcttggtggcagatgttaatgcagataaacgcaataggaaggagattcatatggcactaacgactgtgaaggcaaaaggaggcactcttattatttgtcccatggcattgttaagccaatggaaggacgagcttgagactcattcaaagcctgacactgtgtctgtgttagtttactatggaggggataggacacatgacgcgaaagcaatagcgagtcatgatgtggttttgacaacttatggtgttttaacctcagcttacaagcaggatatggcaaacagtattttccacaggattgattggtataggattgttcttgatgaagctcacacgatcaaatcatggaaaactcaagctgctaaagccacatttgagttatcttcacattgcagatggtgtctgactgggactcccttacaaaacaagctcgaagatctatacagtcttctatgtttcctgcatgttgaaccatggtgcaattgggcttggtggagtaagttgatacagaagccttatgaaaatggtgatccacgaggactgaagctgatcaaggcgattttgaggccattgatgctgagaagaacaaaggaaacaagggacaaagaaggaagtctaattcttgaacttcctccaaccgacgtccaagtcattgaatgtgaacaatctgaagcagaacgtgacttctatacagccttgttcaagagatccaaagtccaatttgaccagtttgtggcacaaggaaaagttcttcacaactatgcaaacatcctcgagctcctcctccgtctacgccaatgttgtaaccacccttttctagttatgagccgagcagattcacaacagtacgctgacttagatagccttgcaaggaggtttcttgataacaaccctgactctgtttcccaaaatgctccttctcgggcatatatcgaagaagttatccaagatttacgcgatggcaatagcaaagaatgtccaatatgtctggagtctgcagatgatcccgttctcacaccttgtgctcacagaatgtgccgtgaatgtctccttactagctggcgctctccatcttgtggtctatgcccaatctgcaggacaatcctgaagagaaccgaacttatctcatgcccgacagatagtatattccgtgttgatgtggtaaagaactggaaggagtcttcaaaggtttcggagctgctcaagtgcttagagaagatcaagaaatctggttcgggcgagaagagcattgtctttagccagtggacttcatttttggatcttttggagattccattgcgaagaagaggatttgagtttcttagattcgatgggaagctggctcagaagggaagagaaaaggttttgaaagagttcaatgaaaccaaacagaaaacgattctgcttatgtctctgaaagctggaggagtcggtctgaatctaactgcagcttcaagtgtcttcttaatggatccatggtggaatccagcggtggaagagcaagcgatcatgagaattcatcgaatagggcagaaacgaacggtattcgtcagaagattcattgtcaaggatacagtggaggaacggatgcagcaagttcaggcaaggaagcagaggatgattgccggagctttgacagatgaagaagtccggtctgcaagacttgaggagcttaaaatgttgttccgatga

SEQ ID NO: 2355 - DNA, 2646 bp, Arabidopsis thaliana
  Clone ID: AT_MUG13.C1.o1.tg
atgcgggttttgaaatactttcgagctccttcttctctccgtcatcgttcctctcccatggctcagtttcttcgacgcttctcttcctctcccatggcgaacgaagacgaattccaatctccggtggaaccatcacagcagcaatctcaggactgtgtttcggagtcttatctgatagggtttgttatcgcgaacatagtagggttaaagtactattccggccgaatcaacggtcgagagatggtgggtctggttcgagaacccttgaacgtatatgacaataatgcaatcagagtactcaacacgcgatctgagcaagtgggtcacatcgagcgtacagtagcagccgttctcgcgccgatgattgattctcacacgatcgtcgtcgagggtattgtacccaatactcgttctaactccaataggtacagaatcccttgtcaaattcatgtatttgcaaagttagaagcgtcctctactgtgaaatcgacgatttctagaggtgggttagtattgatttcggagtcagatacatcgtttgggttatctgaggctgttgtggttaaggaacagatgggaaatggagataagaggagtgttgataagatttttaaacttgttgatgagaatgtgaagttaatggggaaattggtagcggctgagccacctagggaagtgataaagtctgaactttttgctcatcagaaggaaggattaggctggttactccatagagagaaatctggagaattgcctccgttttgggaggagaaagatggagaatttttgaatactttgacgaattaccgctcggataagcggcctgatcctttgcgtggaggggtgtttgctgatgatatggggttgggtaagacccttactttgctttccctgatagcttttgatagatatggcaatgcatccaccagtacgccaaccgaagagcctttggatggtgaaggagacaagattgaaaagaagggtaaaaagagaggaagaggcaagagcagtgaaagtgtaactcgaaagaagcttaaaactgatgatgttgttggcatgaatgtgtctcaaaagacaacgttgatcgtttgtccaccttctgtgatttcagcatggataacacagttagaggagcatactgtaccgggaatcttgaaggtgtatatgtatcatggtggcgaaaggacagacgatgttaatgagcttatgaagtatgacatagtgttgactacttacggcactttagctgttgaggaatcgtgggaagattctcctgtaaagaaaatggagtggctgagaataattcttgatgaggcacacaccattaagaatgcaaatgctcaacagagccgagtagtttgtaagttgaaggcttcccgcagatgggctgtcacaggaactcctattcagaatggttcatttgatttgtactctttgatggcctttctccggtttgagccattttcgattaagagttattggcaaagtttgatacaacgcccgcttggccaagggaataaaaagggtctttcacgtctgcaggttttaatggcgacaatttcgttaagaagaacaaaagaaaagagtttgattggtttaccgcctaagactgttgaaacttgttatgttgagctttctccggaagaacgtcagttatatgatcacatggaaggagaagcgaaaggtgttgtgcagaatcttataaataatggaagcttgatgcgcaactactcaacagttttgagtataatcttacggcttagacagctttgcgatgacatgtctctatgccctccagaattaagatcttttaccacttctacatctgtagaagatgtgactgataagccagagctactgcaaaagctggttgcagcattgcaagatggcgaagattttgactgtccaatctgcatttcgccaccaacaaacatcatcatcactcgatgtgcccacatcttttgcagggcttgtatccttcaaactcttcaaagaagtaaaccattgtgccctctttgccgtggctcccttacccaatctgatctctacaatgctccgcctcctcctccggattcttccaataccgatggagaagacgctaaatcttcaaccaaatcctcaaaggtctcagctttactatccctgctcatggcatcgagacaagaaaaccccaacacaaagtctgttgtgttctctcaattcaggaagatgctgcttttactagaaactccactaaaagctgcgggtttcaccatcttgcgcttggatggagcaatgactgtgaagaaacggacccaagtcattggagaatttgggaatccagagttaaccggacctgtggtgttgcttgcgagcctcaaggcctctggtactggcataaacctaactgcagcctcaagggtttacttgtttgacccgtggtggaaccctgcagttgaagaacaggccatggacaggattcataggatcgggcagaaacaagaggttaaaatgataaggatgattgcgagaaacagtatcgaagagagggtccttgagcttcagcagaagaagaagaatctagcaaacgaagcttttaaaagaaggcaaaagaaagatgaaagagaggttaacgttgaagacgtggttgctctcatgtctctctga

SEQ ID NO: 2356 - DNA, 2451 bp, Arabidopsis thaliana
  Clone ID: AT_F3K23.C1.o21.tg
atgttcacagcttggaatttaaggtcacgtagcaggagcattactcaagaagaacttgccaagcgtcctgacccattctgtctaccgaatctccttgatgggcttgaagatggtttatacggacgtcttgctgatgatgtaaagagactttgtaagctgagacaggaatatttgaatggttccatctcattggaagatatcgaagctagacaagacaacaaacgagccaagtcttctcataatcttatcatcgattcagatgacgagttgcctcaagaatcagttactcaaattaatcctctagaaaaaaggctgaagaagctcaaggaagtgattgttgtgaagaatggagatagctcaggatctgactcgagtccacaaggttatgacgaggaggattcatcgaggaattctactgatattgacaatcaaagtctatatgtggatgcagaagaagaagaagaactttggaggaagatggcttttgctcaagaatcaattaaggtaacggtggaggattcacaaagtaatgatcacaaacaaatcgaagactgtgaccattccttcatttgcaaggacgatattggagaagtgtgtcgtgtttgtggacttatcaagaaaccaattgagagcatgattgaggttgtgttcaacaagcaaaagagatcgaggagaacttatatgcgtgaaaaagaaaatggggaaacgagcagggatttctcaggaatccagtcttctcatacaaacattttgggagaaaaaatgttcattcacccatggcatgatcaggagatgaggcctcaccagactgaaggatttagatttttatgtaacaaccttgcagcagatgagccaggtggatgcatattagctcatgctccgggatcaggcaagacatttctgctcatcagctttctgcagagtttcatggctatggatccgcaggctagaccattggttgtgctaccaaaggggatcatagagtcatggaagagagagtttactttgtgggaagttgagaagattcccctgcttgatttctacagcgtgaaagcagaatcacggaagcagcaactgaaggttttggggcaatggatcaaggagagaagcattctgtttcttggttaccaacagtttacgaggatcatctgcgatgataactttgaggcagcttcagaagattgtaagctgatattgcttgagaagccaacgttgcttatacttgatgagggtcatacctcaaggaataaggagacctacatgcttagttcgcttgctcgtgtcaagactcgtcgaaaggtggttctcacaggtaccttgttccaaaacaacgttgaagaagtgtttaacattttggatcttgttcgtcccaagttcttgaagcgccctggaactcgggagattgtttctcgtatcatgagcaaggcagagataccaagaggaaaacaggtgaaccagagtagtagtagtatcgaggggactttctttgctgcagtagagcttacattacagaggagtacaaacttttctgccaaagccagcttgataaaggatctacgcgaaatgacccgtaatatcttgcattatcacaaagcagattttagcggcttgcttccggggcttagtgagttcactgtcatgctcaacctgagctcaattcagagagatgaagtaaaaggtctgaggaaaatggaactgttcaagcagatctctcttggtgctgctttgtatatacacccaaagctcaaatctttcttggaggaaaacccttccaacggggaaaagggtttttctgataacaatacaacagttatgaagctggacaagatgctgaaaaagatcaatgtgagagatggggtgaagatgaaattcttcctcaacctcttagctctgtgtgaatcaacaggagagaagctcttggtgtttagccaatacattgttccaataaagactctcgagagactcatgagctcaatgaaaggttggcgtttagggaaagagatgttcacaatcacaggtgattcaagcaatgaacagagagaatggtcaatggagagattcaacaattcactagaggctaaagtgtttttcggatcgatcaaagcttgtggggaaggaatatcactagtgggtgcatcacgggttctgattcttgatgttcatctgaacccatcagtgactcagcaagccgtggctcgagcttatagaccaggacagaagaggaaagtatatgcgtacaagctcgtagctgcggattcaccagaggaagagaactacgaaacatgtacgcgtaaagagatgatgtcgaagatgtggttcgagtggaatgttggatcaggaagagaggattttgggtttagagccattgatgctgatcactccggtgatgcgtttcttgaaacgaccaagatgaaggaagatatcaagtgtttatacacaaaggtaaactga

SEQ ID NO: 2357 - DNA, 3786 bp, Arabidopsis thaliana
  Clone ID: AT_F7C8.C1.o10.tg
atgaagaaaagaggtttctacaatttgaagcatccatttgatccatgtcctttcgagttcttctgctcgggtacatggaagcctgtggaatacatgaggatcgaagatggaatgatgacaatacgtctgttagagaatggttatgtgttggaagatatccgtcctttccaaaggcttcgtctcagatcaagaaaagcggctttgagcgactgtatctgtttccttcggcctgatatcgatgtttgtgttctctatcgtatccacgaggatgacttggaaccggtttgggtggatgcgaggattgtttctatagagaggaagcctcatgagtctgaatgctcttgcaagatcaatgttagaatttacattgaccaaggctgcattggctcggagaaacagagaatcaatagagattccgtggttatcggtctaaaccaaatctccattctccaaaagttttacaaggaacaaagtactgatcagttctacagatggagattctctgaggactgcacttccttgatgaaaacaagactgtctttgggaaagttcttgccggatctttcgtggttgactgttacctcaactttgaaaagcattgtgtttcaaataagaacagtgcaaaccaagatggtttatcagattgtaacagatgaagaaggctctagcagtacgttgagttcgatgaatattactttggaagacggtgtttcgttatcaaaagtggttaagtttaatccggcagatatattggatgattctcaagatcttgaaataaagcaagaaaccgattattatcaagaagaagatgaggtagtggaactacgtaggtccaaaagaagaaacgtgagaccggatatctacaccggatgtgattatgagccagatacaattgacggttgggtgcggatgatgccgtaccagtttggaaaatgtgctgttaatgttgagagtgatgaagacgaggacgataacaatgaggatggtgatactaatgatgatttgtatataccattatcgcgtttattcatcaagaaaaagaaaactaattctcgagaagcgaaaccgaaaagtcgaaaaggcgagatcgttgtgatagacaagaggagagtacatggatttggtagaaaagagaggaaatccgagctttcggttattcctttcactccggtgtttgagcctataccgttggaacagtttggtcttaatgctaacagttttggtgggggtggtagtttctcaagaagccagtactttgatgagactgaaaagtatcgaagtaaaggcatgaaatacgggaagaaaatgacggaaatggaagagatgatggaagctgatctatgttggaaaggtcctaaccaggtgaagtcgtttcaaaaacgaacatcccgatcttcgcggtcagttgctccaaaaacagaggattctgatgaaccacgggtctataagaaagtaacattgagtgcaggtgcatataacaagctgatagatacatacatgaacaacattgagtccacaattgcagccaaggacgagcctaccagtgttgttgaccagtgggaggagttaaagaagacgaatttcgcatttaaactgcatggggatatggaaaagaacttgagtgaggatggtgagggagagacttcagagaacgaaatgttatggagagaaatggaactatgcttggcttcttcttacattctcgatgacaacgaggtaagagtggataacgaggctttcgaaaaggcgagaagtggttgtgagcacgattataggctggaggaagaaatcgggatgtgttgcaggttatgtggtcatgtaggaagtgagataaaagatgtatctgcaccatttgcagaacataagaaatggaccatagagactaagcatatcgaagaagatgacataaagactaagttgagccacaaagaagcccagactaaagatttctctatgataagtgattcttcagaaatgcttgcggctgaagaaagtgacaacgtttgggcattaatacctaagcttaagagaaaactacatgtgcatcaacgaagagctttcgagtttctctggagaaatgtagcaggatctgtggaaccctcgcttatggatcccacttcaggtaacataggtggttgtgtgatctctcattcacctggagctggtaaaacattcctaatcattgctttcctcactagctacttgaagctatttcccgggaaaagacctttggttcttgctcctaaaacaactttgtacacatggtacaaggagttcatcaaatgggagatcccagttccggttcatttgatccacggtcgaagaacctattgtaccttcaaacagaacaaaacggttcagttcaatggagttcctaaaccgagccgagatgttatgcatgttcttgattgcctagaaaaaatacagaaatggcatgctcatccgagtgttcttgtaatgggttacacctcgtttacgactttgatgagggaagactcgaagtttgctcaccggaaatacatggctaaagtgctaagagagagtcccgggcttcttgttcttgatgaagggcataacccgaggagtaccaagtcaagactacgtaaggccttgatgaaagttggtactgacttaagaatacttctttcgggtactttgtttcagaacaacttttgcgagtacttcaacacgctatgtttggctagaccaaagtttattcatgaggttctaatggagttagatcagaaattcaagaccaatcacggtgtgaataaggcgcctcacttgctcgagaatagagctcgtaaattattcctcgatataattgccaagaagattgatgcaagcgtgggagatgaacgccttcaaggtctcaatatgttgaagaatatgactaatggtttcattgataactatgaagggagtggaagtggaagtggtgatgctcttccaggtctacagatctatacattagtgatgaactcgacggatatacagcataagatactcacgaaacttcaggatgtaataaagacgtactttgggtatccacttgaggtcgagcttcagataacattagcagctatacatccgtggttggtcacaagctcaaactgttgcacaaaattcttcaacccgcaagaactttccgagatcggaaaactcaagcacgacgcaaagaaaggatctaaagtcatgtttgtgttaaaccttattttccgagtggtcaagagggagaagatcttgatcttttgccacaacattgcgccaatccgtatgtttaccgaactgtttgagaacattttcaggtggcaaagaggcagagagatcttgaccttaaccggtgatcttgagctgtttgaaagaggtcgagtgatagacaaattcgaagaacctggaaacccatcccgagtcctcctggcctcgatcacagcttgcgcagaagggattagtctgaccgctgcttcacgggtcatcatgctcgactcagaatggaacccttctaagacaaagcaagctatagctcgtgcattcagaccgggacagcagaaagttgtttacgtttatcagctcttgtccagaggaacattagaggaagacaagtacaggaggacaacatggaaagagtgggtctcgtgtatgatattcagtgaggagtttgttgcggatccatctctgtggcaagctgagaagattgaagatgatattcttagagagatcgttggagaagataaagttaaatctttccatatgatcatgaagaatgagaaggcttcaacagggtaa

SEQ ID NO: 2358 - DNA, 2319 bp, Arabidopsis thaliana
  Clone ID: AT_YUP8H12.C1.o27.tg
atggagcttcggtcccgcaataaggcgattcgtccatcgactgaagttgtggatctcgaggaaggaactggtatcaaccctgatgaagaaccttatgctatatcttcagatgacgattcaatcggctctgaatttcaaggtgacgaggaggaggaggaggagttagaggaggttgttgctaatgatgatttaccaaatcctgtacctgttttggcaattgtaaacctaccaagagcaagcaagaaaaggaaaaaacctgatgcacgcaaagagaaagtagtgctattgtgggagacttgggaaaaagagcagaatagctggattgatgaacatatgtcagaggatgttgatttagatcagcacaatgctgtgattgctgaaactgctgagccgccttcagatttgattatgccgctattaaggtaccaaaaggaatttttggcctgggcaacaaaacaggaacaatctgttgcaggagggattctcgcggatgagatgggaatgggaaaaacaatacaagccatctctcttgttcttgccagacgagaagttgacagggcacagtttggggaagctgcgggttgtactctggttctttgtcctcttgttgctgtttctcagtggttaaatgagattgctcggtttacatccccgggaagcactaaggtccttgtataccatggggcaaagagagcgaagaatattaaagagtttatgaactacgactttgttttgacaacatattccactgttgagagtgaatataggagaaacataatgccgtcgaaggtgcaatgtgcatattgcagcaagtcattttacccgaagaagcttgtgatccacctgcgatatttttgtggaccttcggctgtcaaaacggcaaaacaatctaagcagaaaaggaagaagacttcagattcatcctcacagcaaggcaaggaggctgatgcaggagaggataagaaattaaagaaatctaagaagaagaccaaacaaacagtagaaaaagatcagttaggttcagatgacaaagagaagtctcttttgcactctgttaagtggaatcggatcatcttggatgaggctcattacatcaaagaaagacgtagcaatactgcaagagctgtttttgctttggaggctacctatagatgggctttgagtggcactcctctccaaaatcgtgttggagagctttactcactgatccgcttcttgcaaattcgcccatactcgtattacttttgcaaggattgtgactgtagaattcttgattacgttgctcatcaaagctgccctcactgtcctcataatgcagttcgacatttctgttggtggaacaagtatgtggccaagccaataacagtatatggaagctttggactgggaaaaagagccatgatattgcttaaacacaaagttctgaaggacatccttttaagacgtactaaattgggccgggcagctgatcttgctcttcctcctagaattatcactttgaggcgggatacactagatgtaaaggagtttgattactatgaatcactatacaaaaacagccaggcggaatttaatacgtatattgaggctgggacattaatgaataactatgcacatatatttgatcttctcacccgcctgagacaggccgttgatcatccataccttgtggtgtattccaattctagtggcgctaatgctaacttggttgatgagaacaaaagtgagcaagaatgtggtctctgccacgatccggccgaggactacgttgtgacttcttgtgcacatgtgttctgtaaagcttgtttgattggtttctccgcgtccctgggaaaagtcacctgcccgacatgctcgaaactactgactgtggattggactaccaaagctgacacagagcataaggcgagcaagacaacacttaaaggatttagagcctcaagcattttaaatcgtataaagcttgatgattttcagacaagtacaaagattgaggctttgagagaagaaattaggttcatggttgaaagagatgggtctgccaaagcaatagttttcagccagttcacatcatttttggaccttataaattatacccttgggaagtgtggggttagttgtgttcaactggtgggaagcatgaccatggcagctagagatactgccatcaacaaattcaaagaagacccagattgcagagttttcttaatgagcttgaaagccggaggggttgctcttaatttaactgttgcttcacatgtttttatgatggacccgtggtggaacccagcggttgagaggcaagcacaagacagaatt

SEQ ID NO: 2359 - DNA, 2625 bp, Arabidopsis thaliana
  Clone ID: AT_F11M21.C1.o32.tg
atgtcgttgttacacactttcaaagagacattgaagccctgtggtagttttccgtcatcatcatcgttgcgagtttcatccacacaagaattggaaccgtcgagaaaacctcccaaatcgtcgctctcgcagcagcttctgcgtctcgatgattcttactttttaccctcaaagcacgaatctaaaatctcaaaaacccaagtcgaagattttgatcataacgaagatgatcacaaaagaaacatcaagttcgacgaagaagaagtagatgaagacgatgagagatcaattgaattcgggagacccgggttaagccgggctgaatttgactattccggtccttatgaaccacttatgctgtcatcaattggagagattccgatcatacatgttattttcttaccaaagtctttaacttttgctcatgtaccggcttctatcaactgtagattgcttgaacatcagcgagagggagtgaagtttatgtataatctctataaaaacaaccatggtggcattcttggcgatgacatggggttaggcaagaccattcagacaattgcatttcttgctgcagtgtatggaaaagacggtgacgctggtgagtcatgtcttttagagtctgataagggtcctgtactaataatctgtccatcttcgattattcacaactgggagagtgagttttctcgatgggcaagcttcttcaaggtttcggtgtaccacggatcaaacagagatatgattctggagaaactcaaggcacgcggtgttgaggtacttgtaaccagctttgatacgtttcgaatccaaggccccgttttgtccgggattaattgggagatagtgattgctgatgaggcacaccggttaaagaatgaaaaatcgaaactttatgaagcatgccttgagatcaagactaagaagaggattggtctcacgggtacagtgatgcagaacaagatcagtgagctattcaatctttttgagtgggtagcaccgggatcactaggcactcgtgaacatttccgagacttctatgatgaaccacttaagctagggcagagagctactgctccggaaagatttgtccagattgcagataagaggaaacagcatttgggcagtcttctccgtaagtatatgttgaggaggacaaaggaggaaaccattgggcatctcatgatggggaaagaagataatgtagtcttttgtcaaatgagtcaattgcagagacgggtttatcaaagaatgattcaactcccagaaattcagtgccttgtgaataaggacaatccatgcgcttgtggaagcccgcttaagcaatcagagtgctgcagaaggattgttcctgatggaaccatctggagttaccttcatcgagacaaccacgatggttgtgattcttgtcctttctgcttggtgcttccatgccttatgaaacttcagcagataagcaatcatctggagcttattaaaccaaacccaaaagatgagccagagaaacagaagaaggacgcagagtttgtatctacagtgtttgggacagatattgatctattaggcggaatatctgcaagcaagagcttcatggaccttagtgatgttaaacattgtgggaaaatgagagctttggagaagttgatggcttcttggatttcaaagggtgataagatacttctattcagttactctgtcaggatgctggacatactggaaaagtttctaattagaaaaggttatagctttgctagacttgatggttctactccaactaatctgcgacagtctcttgtggatgatttcaatgcgagtcctagcaaacaggtttttctgatatcaactaaagctggtgggttgggactaaaccttgtgagcgcgaaccgtgtggttatatttgacccaaattggaacccgtctcatgacttgcaagcgcaagatagatcatttcggtatggacagaaacgtcatgtggtggtttttcgtttgttgagtgctggttcccttgaggaactagtttatacaagacaagtatacaaacaacagctctcaaacattgcggttgcagggaaaatggagacaaggtactttgaaggcgtccaggactgtaaagagtttcaaggcgagctattcgggatttcaaatctgttccgtgatctctctgataagctcttcactagcgatattgttgagttgcatagggatagtaacatcgatgagaataagaagagatcactgcttgagacaggtgtttcagaagatgaaaaagaagaagaggtcatgtgctcttacaaacccgaaatggagaaacctatccttaaggacttgggcattgtgtatgcacatcgaaatgaagacatcatcaacattggagagacaacaacatcaacatctcagaggttaaatggagacggtaacagtgcggatcgaaagaaaaagaagagaaaaggttgtagtgaagaggaggatatgtcttcttcaaatagggaacaaaaacgagagaagtacaagatgttagccgagtttaaaggcatggagatattggagtttagtagatgggtattgtcagcgtctccatttgacagagagaagctacttcaagactttttagaaagagtcaagtaa

SEQ ID NO: 2360 - DNA, 3126 bp, Arabidopsis thaliana
  Clone ID: AT_F7K24.C1.o60.tg
atggtgaagcagctacaagagcaggaggagaacgatcccgtcgagaagacaaagtctctgatctctgctcttaactacctttctcgcgaccttctcttgccttctcacctttacgcttccgtttcttctatttaccatgcctccgtctccgatctctctccttctccgcctcttcgtggaaatagttatactcccaatagaggtgatttgatgagcgagttcgaagatgcacttttgcaacagcgactaaactatgaatcaggctctcgactagccgagttaaaggaaactcggtataagaatcgtatccacaaccgattatctcaacttgaaggattaccttccaatagaggtgaagatttgcaggaaaaatgcttacttgagctttatggtcttaagttacaagaactacaatgcagggttcggggtgaggtgagtgcggaatactggctgcgtttgaattgtgcagatccggagagacaactatatgattggggcatgatgcggttgcctcgccgaatgtatggggttggagattcttttgttatggaagctgatgatcagttcaggaacaagcgtgatgccgagaggttattacggttagaagaagaggagaagaatctgattgaaacgacacagaggaaattctttgcagaagtactcaatgctgttcgtgaattccagttgcaaattcaggcgtctcatagacggtgtaagcaaagaaatgatggtgtccaggcctggcatggaaagcaaaggcaacgtgccacccgagctgaaaaactaaggatcatggcccttaaatctgatgatcaagaggaatacatgaaactagcaaaggaaatccagcgtcagaaagatgccaaactttcagaaaacaccaaattactgaaaggctcagaatctgacttatctgatgttgatgctcctgaggatgtgcttcctgcccaagatattgagatcattgactctgacaataatgatgattctaatgacttactagaaggcgagaggcagtttaacttggctatccattccatacaagagaaggtgacaaagcagccatcccttctacaaggtggggaactaagatcctatcaattagaaggacttcaatggatggtctctctatacaacaatgactataatggcattttagctgatgaaatgggtttaggaaagactatccaaacgattgcactgattgcgtatcttcttgagagtaaagatcttcatgggcctcatctaatattggctccaaaagctgtgctaccaaattgggaaaatgagtttgcattatgggcacccagcatttccgcttttctttacgatggatcaaaggagaaaagaactgaaataagagcaagaatagcaggaggaaaatttaatgtgttgataacccactacgatcttatcatgagagataaagcatttttgaagaaaattgactggaactacatgattgttgatgaaggacatcgtctgaagaaccatgaatgtgctctcgcaaagactctaggaactggctaccggattaagcgcagacttctattaactggaactcccatacagaacagtctgcaagaactatggtcgctgcttaattttcttcttcctcacatctttaactcaattcataatttcgaagaatggtttaatactccattcgcagaatgtggtagtgccagtcttacagatgaagaggagctgttgattattaaccgtctgcatcatgtcataaggccgtttctactgagaaggaaaaaaagtgaggttgagaaattccttcctggaaagacacaagtcatactgaagtgtgatatgtcggcttggcaaaaattgtattacaaacaagttacagacgtaggcagggtcggtcttcattctggcaatgggaaatcaaagagtctgcagaatctgacaatgcaattaagaaagtgttgtaaccatccgtacctattcgttggagcagattataacatgtgtaagaagcctgagattgtgagagcttcaggaaaattcgagttacttgatcgcctccttccaaaactgaagaaagctggacatagaattctgctcttttctcaaatgactcgtctcattgaccttctcgaaatttacttgtcactcaatgactacatgtacctcagacttgacggtagcacaaagacagaccaaagagggattttactgaagcaattcaacgaaccggactctccctactttatgtttcttctgagcacacgtgctggtggtcttggtttgaacttacaaactgcagacactataattatatttgacagtgattggaatccacaaatggaccagcaagcagaggatcgtgctcatcggatagggcagaaaaaggaagtgagagtttttgttttggttagcattggatccattgaagaagtaatattggagcgtgcaaagcaaaagatgggcatcgatgcgaaagtcatacaagcagggctcttcaacacaacttctactgctcaagacaggagagagatgctggaagagatcatgagcaaaggaacaagctcactgggagaagatgtgccaagtgagagagagattaaccggctcgcagctcgaactgaggaagagttttggatgtttgaacaaatggacgaggaaagacgtaaaaaggagaactacaagacacgtctcatggaagagaaggaagttcccgagtgggcttacacttcagagactcaagaagacaagactaacgcgaaaaaccattttggtagcctcacgggtaaacggaaacgaaaagaagcagtgtatagcgactctttaagcgatttgcagtggatgaaagcgatggagagtgaagacgaagatgcttccaaagtctctcagaaacgaaagagaacggacacaaagacaagaatgagtaatgggtcaaaggcagaggctgtgttgagtgaaagcgatgaggaaaaagaagaagaagaagaagaaaggaaggaggagagtgggaaagagagtgaagaagaaaatgagaagccattacatagttggaaaactaataagaagaaacggtcaagataccctgttatgacttcttcacctaattctagaggtaaaggtagctcaaaaggaagtaaacgaaactga

SEQ ID NO: 2361 - DNA, 4344 bp, Arabidopsis thaliana
  Clone ID: AT_F22O13.C1.o8.tg
atggaggcaaacgaagaaagtttgaagggaaaaattgaaaagctagagggaaaggaggttattgtggagtcaaaagaggatgagatggatataataatagaagaaaatagggaagcagaacaggaggtaatggaggtgaaagcaagagatggaagaggggagcaaaatgatgtactgatggaagaaaacaacaatcagggtgagcaaaaagatgaggagatgcaagatgcttctagtagatctgaaagttctgacttcaattcagatgaagatgaacaaattctgtcccggcgtgatgatgagttggatcttgagaaacctttgagcgaggaagaaatagatgagttaatttcagatcttctggcagttgagagcaagttggatgaagctgttgctgctgaaatgatgacttttaaagacgaatgggaggcaactcttgatgagcttgaaacagaaagtgcaaccttgttggagcaacttgatggtgctggaatcgagcttccaaaattgtacgaaatgatagaaagtcaagcccctaatggttgctacactgaagcttggaagcaaagagcccattgggttggtactcaggtgacaaaagaaactgtggaatcattggctaacgctgagaggtttctgcacactcatcggcctgtccgaaaacgacatggaaaacttttggaggagggagctagtggttttctggagaaaaaactcgctgatggtgctgttaaagaatctctagctggaacatctgagcttgactggtcgtctctaaacaaagtgttttcggaaaaaagggatgagtctgtttcctttggtagtaagcagtgggcttctgtttacttggcaagcactccacaccaagctgcagccatgggattagaatttccaggagtcaatgaggtggaggaaattgaagagattgatgcaagcttagcagacccatttttagctgatgcaattgacaacgaaagagaacttgcccttactgaagaacaaaagacaaattatataagggtcaaagaagaggatgatataacttgtgatcgtgtacttcaacttcgtttgaaacggaaaagacgcaagaaaagatctaaacaggttattaggtgtgcggcagagaatatggatgatgattctgtgtatttggatgggaataatactaccccaaattttgccaaagatcaagtgaaaagtccggagactagcactcaagttcataatagtgaagtcaacatagaggaaaacgggaatttttctaattcagatgtagataagatgacccccagcacacatattaatgtagatgccaagagagatgattcacagaatccagcaaacaattttaggtgtactgcctgtaataaagtagctgtggaagtgcatagtcatccccttttagaagtaatagtttgcatggattgcaaacgttcaattgaagatagagtttctaaggttgatgactctttggaacgtcattgtgaatggtgtggtcatattgctgacttaatagattgtaggacatgcgaaaaacttttctgtgcatcatgtataaagaggaatattggtgaagaatacatgtctgaagctcaatcctctggttgggattgttgttgttgctctccaattcccttgcaaagattgacactggaactggagaaagctatgagagataaaaagtcaatagaattgagctctgattcgagttctgattccagctctgataacaattctgttgatacagatgctgatgtcaatgtaacaatcagctcaaagaagaaatcgaaaaagaaaattcggcggataatcgatgacgctgaactagggaaagatacgagaacaaagattgcaatcgaaaaggcacgacaggagcgccttaggtccttgcagttttctgccagatacaaaacaattagctctatgggagacgtgaaatctattccagaaggtgcggaagttgaggttcttggtgatgctcacagtggttacatagtgaatgtggttagggagattggtgaagaagctgtgagggttcctcgtagcatatctgccaaactaaaagtccatcaggtaacagggataagatttatgtgggaaaatattattcagtctatcagcagagtcaagtctggtgataaaggtcttggttgcattctagcacatacaatgggcctgggcaaaacttttcaggttatagcattcctgtacaccgcaatgagatgtgttgatttagggttgaaaactgctcttattgtgactcctgtaaatgtgttgcacaattggcgaagtgagtttgagaagtggatgccttcagaagtgaaaccgcttcgcatttttatgcttggagatgtttcaagggagagaagatttgatttgctaacaaagtggcgaaagaagggtggagtctttttgatgggatatacaaattttagaaacctgtctcttgggaggggggtgaaggacttaaatgcggccagagggatctgtaatgccttgagggatggacctgatatacttgtttgcgacgaggctcacatcattaagaacaccaaggctgacacaacgcaagcattgaagcaagttaaatgccagagaagaattgccttaactggctcaccccttcaaaacaatctcatggagtattattgtatggttgattttgtgagagaaggattcttgggaagtagccctgagtttagaaaccgcttccaaaatccaatagaaaacggacagcatatgaattcaactgcggaggatgtaaaaattatgaaccagaggtcacacattctgtatgagcaattgaaaggttttgtgcaaagaatggatatgaatgtggtgaaaaaggatctgccacctaaaacagtcttcgtaatatctgtcaagctatctcccttgcaacggatattgtatcagagatttcttgagctttatgggttcagcgatggaagaacagatgaaaggatgagaaaaaacttttttgctgcttaccaggtcttggctcagattttgaatcatccagggattccgcaattaagaagtgaagatagcaagaatggtcgtcgtggtagcattgttgatattccagatgactgttcaagtgatgaaaatatagactacaacatggttacaggagagaaacagagaactatgaatgatctgcaggataaagttgatggatacctccagaaggattggtgggtcgacctacttcaaaaaaataattataaggtgtcggacttcagtggcaaaatgattctgctattggatattttatctatgagtgctgatgtgggggataaggcgcttgtgtttagccagagtatcccgacattggatctcatagaactttatctttcaagagtacctcggcatgggaaacaaggaaagttctggaaaaaggggaaagactggtatagaattgatggaaaaactgaaagctcagaacgccagaagttggttgataggtttaatgagcctgacaacaaaagagtgaaatgtacactaatttcaaccagagcgggatcccttggaattaacctttatgctgctaaccgtgtgatcatcgtcgatggttcatggaatccaacctatgatcttcaagctatatttcgagcttggaggtatggccaaaagaagcccgtatttgcgtacagattgatggcacgtgggactattgaagaaaaaatatataaacgtcaggtaaccaaggaagggctagctgcgagagtagtggatagacaacaagtgcacaggactatctccaaagaagagatgttacatctttttgaatttgacgatgatgatgaaaaatctgaagccgtaactgagataagcaagcaaaatgaagcgggacatagcaatctggtggagcaagcaatcttgtggacaaagaaggccactttatctcgtgttggtggcgacaaattgatggagaacttactacagagacacggccccaactggatttccagtttccatgagcacgagacattgctacaagagaatgaagaagaaagactgacaaaggaagaaaaagacatggcctgggaagtttataggagagcacttgagtgggaggaagttcaacgggtcccattcagtgaatctccagtggttccaaaaccttctccttccacacaaacagagcccttgccccagccaaaggggttcaacaggagtcgttttgtaaaccgcaactgcactagaatcgcgcaccagcttacactcataagccaaggattaaaagtcggcagcagcacagtctgtggggagtgtgggcgcgtcataaggtgggaagatgttatacccgcatccaaactttcagcggtaattgtaaactaa

SEQ ID NO: 2362 - DNA, 3171 bp, Arabidopsis thaliana
  Clone ID: AT_F11F12.C1.o24.tg
atggattccgctattgatatcagttctgatagtgatgtcgagatacaagaaactagaaccaggcctcaacatcccccacggatagctgaaggatctcatagaagagatctctctacgctgagaccgcactttcttagtgggagttcttccggtgcaaatggccacactaaaacaggacttacaaatctcgactcacgtaatggttttgaatccaagccactgcctcgggcagaacaccatacacatattccgggaaatgggagtatcgtaacttccagaattcccaatatctctgttggtgattatgagaaattttcatctcaacaagcttttaaaaggacacatccaccaacctttagtcgacctccttttcctcctagacctgatattggtacaagtaacgggaatgcgagtcactttcgtggtggagcacatgatgatctaggcatggggcgtgtgactaacggcactcggatcctacctccatctgtggcgcacggaacatctgcgtctccttcacattttaatggattaagtgatccaatgcataggaatggcataggcgaagaaaggaattcggaaaatgacgagaggctgatctatcaggctgcactacagaccatgtgtatggaagcattgttgttcttcctttttgacaaacgagaaggaataggaacattcactattgttgcattcgtctcttatttcgcactgttgcatcaaggttatgatttccatttgaagagtttggtgtttttgcataattcccctggaactgaatcaacccaagtccgaggtcgatttacctgctggtcttctttcggttccccttatgaagcatcaggtattcaggtttacatcatctttcagtatctgtcagaatggtcttgtgtacttaacactgttgtttctcagaaaattgcattggcatggatgtttcagaaggaaactaatagtttgcactgtatgggagggatattagctgatgatcagggccttggtaagacagtctcgactattgcgcttatcctaaagcaaatgcacgaggcaaaattaaagtccaagaattcaggcaatcaagaggctgaagcattggatctggatgctgatgatgagtcagaaaatgcatttgagaaaccagagtctaaggcttcaaatggtagtggtgtgaatggtgattcaggcataaagaaagccaagggagaagaagcgagtacttcaacacgcaaattcaacagaaagagaccagctgctggtactttaattgtttgtccagcaagtgttgtgcggcagtgggcaagagaacttgatgagaaggttactgatgaagccaaactttctgttttaatataccacggcggtaacaggaccaaagatcctattgaactagcaaaatatgatgtggttatgacaacttacgccattgtttcaaatgaagttccaaagcaacccctggttgatgacgatgagaatgatgaaaaaaattctgaaaaatatggtctcgcttctggcttctccatcaataagaaacggaaaaatgtagtgggtactactaagaagagtaagaagaaaaaaggtaacaataatgctggcgattcatctgaccctgactctggtactctagcaaaagttgggtggttcagagttgtactagatgaagctcaaacaattaagaatcatagaacccaggtggcaagagcatgttgcggtcttcgagccaaaaggaggtggtgtttgtctggaacaccaatacaaaatacaatagatgatttatacagctatttcaggtttctaaaatatgatccatatgctgtgtacaagtcattctgccaccaaattaagggtccaatttccagaaattcccttcaagggtacaagaagcttcaggctgttctaagggctataatgctacgccgtacgaaaggaacattgcttgatggccagcctataattaatctaccaccaaagacaattaatttgagccaggtggacttttcggtagaggagcggtctttctacgtgaagcttgaatccgattcccgttctcagttcaaggcatatgctgctgcaggaactttgaatcaaaactatgcaaacattcttctcatgcttttgcgactacgccaagcttgtgaccacccccaacttgttaaaagatataactcagattctgttggaaaagtatcagaagaagctgttaaaaaactccctaaagaggatctagttagcctgctcagtcgcttagaatcgtctcccatctgttgtgtctgccatgatccaccagaagaccctgttgttactttgtgtggccatatattctgctatcagtgtgtatcagattatatcacaggggatgaggacacgtgccctgcgcctagatgcagagaacagcttgcgcatgatgttgttttctctaaatccacgcttagaagttgcgttgctgatgatttgggttgtagttcctcagaggataatagtcatgataaatcagtttttcagaatggcgagtttagttcatcaaagatcaaagctgtcttagatattctgcagtcgctttctaaccaaggcacttcaaactcaacacagaatggtcaaatggcttcttcctcgcagcagccgaatgatgatgatgatgatgatgatgatgatgtcaccattgtcgagaaaacgagtctgaagtcaactccttctaatggaggaccaataaaaacgattatattttctcagtggactggtatgcttgacttggtggagctatctctaattgaaaatagtatagaattcagaagattagatggtacaatgagtctaattgccagagacagagctgtgaaagaattcagcaacgatccagatgtaaaagtgatgataatgtctttaaaagctggaaatcttgggctgaatatgattgctgcatgtcatgtcattcttcttgatctatggtggaatccaactactgaagatcaggctattgatcgagcacatcgtattggacaaactcgacctgttactgtaactcgtattacgataaaaaatactgtggaggatagaattttggctctccaggaagagaaaagaaaaatggttgcgtctgcctttggtgaagatcatggtggaagctctgcaactcgattaacagttgatgatctcaaatatctattcatggtgtag

SEQ ID NO: 2363 - DNA, 4491 bp, Arabidopsis thaliana
  Clone ID: AT_F28O9.C1.o150.tg
atggatccttcaagacgaccaccgaaggactctccttacgcgaatctattcgatctcgagccgttgatgaagtttagaattccgaaacctgaagatgaagttgattattatgggagtagtagccaggatgaaagtagaagcactcaaggtggggtagtggcaaactacagcaatgggtctaaatcgagaatgaatgcgagctccaagaagagaaagcggtggacagaagctgaggatgcagaggacgatgatgatctctacaatcaacatgttactgaggagcactaccgatcaatgcttggggagcatgtacaaaaattcaaaaataggtccaaggagactcaagggaatcctcctcatctgatgggttttccggtgctaaagagcaatgtgggcagttacagaggtaggaaaccagggaatgattaccatgggaggttctatgacatggacaactctccaaattttgcagctgatgtgaccccacataggcgaggaagctaccatgatcgtgatattacacccaagatagcatatgaaccttcgtatttggacattggtgatggtgtcatctacaaaatccccccaagttatgacaagctggtggcatcattaaacttaccgagcttttcagacattcatgtggaagaattttacttgaaaggaactctggatctgagatcattagcagaactgatggcaagtgataaaaggtctggagtaagaagccgtaatggaatgggtgagcctcgacctcaatatgaatctcttcaagctagaatgaaggccctgtcaccttcaaactccaccccaaattttagcctcaaggtgtcagaagctgcaatgaattctgccattccagaaggatctgctggaagtactgcacggacaattctgtctgagggtggtgttttacaggtccattacgtgaagattctggagaagggggatacatacgagattgttaaacgaagtctaccgaagaagctgaaagcaaagaatgatcctgcagtcattgagaaaacagaaagggataaaattagaaaagcctggatcaatattgtcagaagagatatagcaaaacaccatagaattttcactacttttcatcgtaaactatcaattgatgccaagaggtttgcagatggttgccaaagagaggtgagaatgaaggtgggtagatcatacaaaatcccaagaactgcaccaattcgcactaggaagatatccagagacatgctgctattctggaagcgatatgacaagcagatggcagaagagaggaaaaagcaagaaaaggaagctgcagaggcttttaaacgtgaacaggagcagcgagagtcaaaaaggcagcaacaaaggctcaatttccttattaaacagactgagctttacagtcacttcatgcaaaacaagaccgattcgaatccttccgaagccttaccaataggtgatgaaaatccgattgacgaagtgctcccagaaacttcagcggcagaaccttctgaggtagaggatcctgaagaggctgaactgaaggaaaaggtcttgagagctgcccaagatgcggtgtctaagcagaagcaaataacagatgcatttgacactgaatatatgaagctacgccaaacttctgaaatggaaggtcctttaaatgatatatcagtttctggctcgagcaatatagatttgcataacccatctacaatgcctgttacatcaacagttcagactccagagttatttaaaggaacccttaaagaataccaaatgaaaggccttcagtggctagtcaattgttatgagcagggtttgaatggcatacttgctgatgaaatgggcttgggtaagactattcaagctatggcgttcttggcacatttggctgaggaaaagaacatttggggtccatttcttgttgttgcccctgcctctgttcttaacaattgggctgatgaaatcagtcgtttctgtcctgacttgaaaactcttccatattggggaggattacaagaacgaacaattttaagaaagaatatcaatcccaagcgtatgtaccgaagggatgctggctttcatattttgattactagctatcagctattagtcactgatgaaaagtattttcgccgggtgaagtggcaatatatggtgctagatgaggcccaagcaatcaagagttcctccagtataagatggaaaacccttcttagttttaactgtcggaaccgattgcttctgactggtactccaattcagaacaacatggcagagttatgggccctgctgcatttcatcatgccaatgttgtttgacaaccatgatcaatttaatgaatggttctcaaaaggaattgagaatcatgctgaacacggaggcactttaaatgagcaccagcttaacagactgcatgcgatcttgaaaccgttcatgcttcgacgggtaaaaaaggatgtggtttctgagctaactacaaagacggaagttacagtacactgcaagctcagttctcgacaacaagctttttatcaggctattaagaacaaaatttctctggctgagttgtttgatagcaaccgcggacaatttactgataagaaagtattgaatttaatgaatattgtcattcaactaaggaaggtttgcaaccatccagagttgttcgaaaggaatgaagggagctcgtatctctactttggagtgacttccaattctcttttgccccatccctttggtgagctagaggatgtacattattctggtggtcaaaatccgataatatacaagatacctaagctactacaccaagaggtgctccaaaattctgaaacattttgttcttctgtcgggcgtggcatctcaagagaatcttttctgaagcattttaatatatattcacctgagtatattcttaagtcaatattcccatctgatagtggggtagatcaagtggttagtggaagtggagcatttggcttttcacgcttgatggatctatcaccatcagaagttggatatctggctctgtgttctgttgcagaaaggctattattttctatactgaggtgggagcggcaatttttggatgaattagttaactctcttatggagtccaaggatggtgatcttagtgacaataacatcgagagagttaaaaccaaagctgtcacaagaatgttgctgatgccatcaaaagttgaaacgaattttcagaaaaggagactaagcacagggcctacccgtccttcatttgaagcgctagtgatctctcatcaggataggtttctttcaagtatcaaactcctgcattctgcatatacttatatcccaaaagccagagctccacctgtaagcattcattgctcggacagaaattcggcatacagagttacagaagaattacatcaaccatggcttaagagactattaatcggttttgcacgaacgtcagaagctaatggacccaggaagcctaacagctttccacatcctttaatccaagaaattgattcagaacttccagttgtgcagcctgcgcttcaactgacacacagaatatttggttcttgccctccaatgcaaagttttgacccagcaaagttgctcacggactctgggaagctgcagacacttgatatattattgaagcggcttcgagctggaaatcacagggtgctcctgtttgcacaaatgacaaagatgctgaacattctcgaggattatatgaactatagaaagtacaagtacctcaggcttgatggatcctccaccatcatggatcgccgagatatggttagggattttcagcataggagcgatatttttgtattcttgctgagcaccagagctggaggacttggtatcaacttgacggctgcagacactgtcattttctatgaaagtgattggaatcccaccttggatttacaagctatggacagggctcatcgtcttggacagacaaaagatgagacggtggaagagaaaattttgcacagggcaagtcagaaaaatacagttcaacagcttgttatgactggagggcatgttcagggtgatgattttcttggagctgcggatgtggtatctctgctaatggatgatgcggaggcagcacaactggagcagaaattcagagaactaccattacaggacaggcagaagaaaaagacgaaacgtatcagaatagatgctgaaggagatgcaactttggaagagttagaagatgttgaccgacaggataacggacaggaacctttggaagaaccggaaaagccaaaatccagtaataaaaagaggagagctgcttcaaatccgaaagctagagctcctcagaaagcaaaggaagaagcaaatggtgaagatactcctcagaggacaaaaagggtaaagagacaaacaaagagcataaacgaaagtcttgaacctgtattctctgcctctgtaacagaatcaaataaaggattcgatccaagtagctccgctaactaa

SEQ ID NO: 2364 - DNA, 1767 bp, Arabidopsis thaliana
  Clone ID: AT_T25N20.C1.o13.tg
atgtatcctcaccagcaagagggttttgagtttatctggaagaacttagccggtacaatcatgttgaacgagctcaaggactttgagaacagtgatgagaccggaggatgcatcatgtcacatgctcccgggaccggaaaaactcgtctgaccatcattttcctgcaagcctatcttcaatgcttcccagattgcaaaccagtgatcattgctcctgcgagcttgcttctcacatgggcagaggagttcaagaaatggaacataagcattccctttcataatctcagcagtttggactttactgggaaagagaactcggcggcgctgggacttttgatgcagaagaatgccactgcaagaagcaataatgagataaggatggtgaaaatatactcttggataaaatcgaagagcatactcgggatcagctacaatctgtatgagaagcttgcaggagttaaggacgaggacaaaaagacaaagatggtgagagaagtgaagccagacaaagaattagatgatatcagagagatacttatgggaaggcctggacttcttgttcttgacgaggcacacacacctcggaaccagagaagttgtatatggaaaacactatccaaagtggaaacacagaaacgaatcttgctctctggaactcctttccagaacaacttcctggagctgtgcaatgttttgggactcgcaagacctaaatatctggagaggctcacgtccacactcaagaagagtgggatgactgtaacgaagagagggaaaaaaaatttggggaatgaaatcaacaaccgtgggattgaagagctgaaggctgttatgcttccatttgtgcatgtccataaaggaagcattcttcaaagtagcctccctggtttgagagaatgtgttgtggtgttaaacccacctgagctgcagaggagagtcctagaatccattgaagtcactcacaaccggaaaacaaaaaacgtgtttgaaacagaacacaagctgtctttggtctcagtccatccttctctagtctctcgctgcaaaatttctgagaaggaacgtttgtccatcgacgaggctctgcttgcacagcttaagaaggtaagactcgatccaaatcaaagcgtgaaaacaagattcctcatggagtttgtcgagttatgcgaggtgataaaggagaaagtgttggtctttagccaatacatagacccattgaaactgataatgaaacatctggtctctcgtttcaagtggaatccaggggaggaagtgttgtacatgcacggcaaactcgagcagaaacaaagacaaacattaatcaacgaattcaatgatccaaaatccaaggccaaagtgttcttagcttcaacaaaagcctgctctgaagggatcagtctggtaggagcatcaagggtgattcttttggatgttgtgtggaatcctgcagtcgaaagacaagctataagccgtgcttacagaatcgggcagaagcggattgtttacacataccacttggttgcaaaagggactcctgagggaccaaagtactgtaagcaagcacaaaaggatagaatctcagagcttgtgtttgcatgttcttccagacatgacaaaggaaaggaaaagattgctgaagctgtgacagaggataaagtgttggacactatggtggagcattcgaagcttggggatatgtttgacaatcttatcgtgcaaccaaaggaagcagatttagttgaaggtttcagcatacttatgccatga

SEQ ID NO: 2365 - DNA, 3771 bp, Arabidopsis thaliana
  Clone ID: AT_T12K4.C1.o120.tg
atgaagagaaagcattactttgagtttaaccatccatttaatccatgtcctttcgaggtgttctgctgggggacatggaaggccgtggagtacttaaggatcgagaatggaacgatgacaatgcgtctcttagaaaatggacaagttttggatgatataaaaccatttcagaggcttcgaattagatcaagaaaggcgactttgatcgactgtacttcttttttaagacccggtatcgatgtttgcgttctttatcagagagatgaagagactccagaaccagtttgggtggatgcaagggttttatctatagagaggaagcctcatgaatctgaatgcttgtgtacgttccatgtcagtgtttatatagaccaaggctgcattggtttggagaagcatagaatgaataaagttccggtactcgtgggactcaacgaaatcgccatccttcaaaagttttgcaaggaacaaagcttggaccgttactatagatggagatactctgaggactgttcttcgttggtgaaaacaagactaaacttagggaagttcttgcctgatcttacatggttgcttgttacatcagttttgaaaaacattgtgtttcagattagaaccgttcacgagaagatggtttatcagattgtgacggatgaagattgcgaaggctctagtagctctttgagtgcaatgaacattacggttgaagacggtgttgtcatgtctaaggttgttttgttcaatccagctgaggatacttgtcaagatagtgatgtaaaggaggagattgaagaggaggtaatggagctgcgtcggtccaagagaagaagcgggcggcctgagagatacggagactctgagattcagccggattcgaaggatggatgggtaaggatgatgccatataggtacaacatatggaatgtttcaagtgatgatgatgatgaagaagaagattgcgaggatgataaagatactgatgatgatttatacttaccgttatcgcatttacttagaaagaaaggaagcaaaaagggatttagtaaggataagcagagagagatagttttggtagacaaaactgagaggaagaagagaaagaaaacagagggatttagtcgaagttgtgagctttcggttattcctttcactcctgtctttgaacctataccgttggaacagtttggtctcaatgcaaatagtttgtgtggtggtgtctctggaaatttgatggatgagatcgataagtatcgtagtaaagcagcgaaatacgggaagaagaagaagaagaagattgaaatggaagagatggaatctgatctaggttggaatggacctattgggaatgtggttcataaaagaaatggaccgcattctcgaataaggtccgtttctagggaaaccggagtttctgaggaaccgcagatttataagaagagaacgttgagcgcaggtgcgtataacaagttgatagactcgtacatgagtagaattgattctacaattgcagccaaggacaaagcaaccaatgttgttgagcagtggcaagggttaaagaaccccgcaagcttttcgatcgaagccgaagaaaggttgagtgaggaggaggaggatgatggcgagacttcagagaatgagattctatggagggaaatggaactatgcttggcttcttcttacattcttgatgaccatgaggtgagagtggataacgaggcgttccataaagcaacctgtgattgtgaacatgactatgaattgaatgaagaaatcggaatgtgttgcagattgtgtggtcatgtaggaactgagataaaacatgtttctgcaccttttgcgcggcacaagaaatggacgacggagactaagcaaatcaacgaagatgacattaatactactatagttaaccaagatggagttgagagccatactttcactataccagttgcttcctcagatatgccatcggctgaagaaagtgacaatgtctggtctttaatacctcagcttaagagaaaactgcatttgcaccagaaaaaagcttttgagtttctctggaagaacctagccgggtcagtggttcccgcgatgatggatccgagttcagataagataggtgggtgtgtagtttctcatactcccggagcaggaaaaacatttctaatcatagcttttctcgcgagctacttgaagatatttccgggtaaaagacctttggttcttgctccaaaaacaactttgtacacttggtacaaggagttcatcaaatgggagattccggtccctgttcacttgctccatggtcgtagaacctactgtatgtccaaagagaagaccattcagttcgagggaattccaaaaccaagccaagatgttatgcatgttcttgactgtttagacaaaatccagaaatggcatgcacagccgagtgttcttgtaatgggttacacatcgtttctaactttgatgagggaagattcaaagtttgctcatagaaagtacatggctaaagtactgagagagtctcctggattactggttctagacgagggacataacccgaggagtaccaagtcgagattacgaaaggccttgatgaaagttgatactgacttgaggattctgctttctggtacattgtttcagaacaacttctgtgagtacttcaacactttgtgcttggctagacccaagtttgttcatgaggttctagtggagttggacaagaagttccagaccaaccaagccgagcaaaaggcgcctcacttgcttgaaaatagagctcggaagttcttccttgacattatagccaagaagattgacacaaaagtgggcgatgagcgcttgcagggtctcaacatgttgaggaatatgacgagtggtttcatcgataactatgaagggagtggaagcggaagtggtgatgttctcccaggtttgcagatttacacattgttgatgaattccactgatgtacagcacaagagtcttaccaaacttcagaacataatgtcaacttaccatggatatccactcgagctcgagttactcataacgttagctgctatccatccttggttggtcaaaaccacaacctgttgcgccaaattcttcaaccctcaggagcttttagagattgagaagctcaagcacgatgcaaagaaaggatcaaaagtcatgtttgtgcttaatcttgtgttccgggtggtcaagagggagaaaatcctcatattttgtcacaacattgcgccgatccgcctgtttcttgagctgttcgagaatgtattcaggtggaagagaggccgagagctcctgaccttgacaggggatctcgagctgtttgaaagaggcagagtaatagacaaatttgaagagccaggaggccagtcccgtgttctgctggcttcgattacagcctgtgcagaaggcatcagtctaaccgctgcttcacgggtgatcatgcttgattcagagtggaatccttctaagacaaagcaagcaatcgcacgtgcattcagaccgggacagcagaaagtggtgtacgtttaccagctcttgtcgagaggaacacttgaagaagacaaatacaggaggacgacctggaaagaatgggtctccagtatgattttcagtgaagaatttgtggaggacccatctcaatggcaagctgagaagattgaggacgatgttcttagagaaatcgtggaggaagacaaagtcaaatccttccatatgatcatgaagaacgagaaagcttcaacaggtggctga

SEQ ID NO: 2366 - DNA, 2667 bp, Arabidopsis thaliana
  Clone ID: AT_F16F14.C1.o11.tg
atgggttttgtttacattgtgatgacagggtactataagaatgtgcataaaagaaagcaaaatcaagttgatgatggacctgaagcaaagcgggtcaagagttcagccaaagttattgattactctaacccatttgcagttagtaacatgcttgaagctttagatagtggtaaatttgggagtgttagtaaagagttggaagagatagctgatatgaggatggatttggttaagcgttctatttggttatacccgtcgctagcgtataccgtgtttgaagctgagaagacgatggataatcaacaggttgtggaaggtgttattaatttggatgatgatgatgatgatgatactgatgtggagaagaaagctctctgtgttgttccttcgtcgtctgagattgtgcttcttgattctgatgatgaagacaatgagaggcagaggcctatgtatcagtttcagtctactcttgtacagcatcagaagaatcaaggggatgtgactccattaataccgcaatgctctttcgaggaggtcgatttagggaggggcaaggagatgccttctgccattaaagccattgttgagggacaaacaagtagaggcaaagtccttcctatagaaaatggtgtggttaatgagaaaggtgtctacgtgggcgttgaggaggatgacagtgataatgagtctgaagcagcagatgaagatcttggtaatatctggaatgaaatggccttgtcaatagagtgttccaaggatgtagcaagggagacttcacataaggaaaaggcagatgtagtggaagattgtgagcactcatttattctaaaggacgatatgggttatgtttgccgtgtctgcggagttattgagaaaagtatactagagataattgatgtgcaattcactaaagcaaaacgaaacacaagaacatatgcctctgaaactagaactaaaaggtttggcgaatctgataatgaacttaagttttctgaagaagggttgatgataggtggacttgctgctcatccaacgcatgctgccgaaatgaagcctcatcaaattgagggatttcagttcctttgcagcaatttagtggctgacgatcctggtggctgtatcatggctcatgctccaggctctggaaaaaccttcatgatcatcagttttatgcagagctttcttgcaaagtatcctcaggctaagccattggttgttctcccaaaaggtattctgcctacttggaaaaaagagttcgtgagatggcaagttgaggacataccactgcttgatttctatagtgctaaagcagagaaccgggcacagcagctgtctattttgaaacagtggatggagaagaagagtatcttatttcttgggtaccagcagttctcaactattgtgtgtgatgatacaaccgactcactttcttgccaggagatactgctcaaggtaccttcgatcctcattttggatgaaggacacactccaaggaatgaggacacaaatttattgcagtcacttgcccaagtccaaacaccaagaaaagttgtcctctcaggaacgctttatcagaaccatgtaaaggaggttttcaacattctgaaccttgttcgacccaaattcctcaaattggatacctccaaatctgctgtgaagagaatcttggcttatactccatgcgatgtcagggggagacttactggaagtaattcagatatggcttcaatgttcaatgaaactgtggagcacaccctgcagaagagcgaggatttcacagtgaaaattaaagtaatccaagatttgcgggagatgacaaagaaagtgcttcattactataaaggagatttcctagatgagcttcctggacttgctgatttcactgtggttcttaatctgtctccaaagcagttgaacgaagtgaagaagttaagacgtgagaagagaaaatttaaggtttcggctgtgggaagtgcaatttaccttcacccgaagctgaaagttttctctgacaagtctgatgatgtttctgatacaactatggacgaaatggtagagaagctagatttgaatgaaggcgtcaaagcaaagttcttccttaacttgataaacctgtgcgactcagctggtgaaaagctcttggttttcagccagtatctcattccactaaagtttcttgaaagactagctgctttagctaagggatggaaactagggaaagaagtttttgttcttacaggcaataccagttctgagcagcgtgagtggtcaatggaaacgtttaacagttcgccagacgccaaaatattctttggttcgataaaagcatgtggagaaggtatctcgcttgttggagcatctcgcatactaatattggatgttcccctaaacccttctgtgacccgccaagctattgggcgagcgtttcgacccggacaaaagaagatggtgcatgcatatagattgattgctgggtcatcacctgaggaagaggatcacaacacttgtttcaaaaaggaagtcatctcaaagatgtggttcgagtggaacgagtactgcggatatcaaaactttgaggtagagacgatcgatgtggatgaagctggtgatacgttcctcgaaagtcctgccttaagagaagacataagagttctctacaaaaggtaa

SEQ ID NO: 2367 - DNA, 3864 bp, Arabidopsis thaliana
  Clone ID: AT_F11P17.C1.o13.tg
atgggtgaggaaggttcaatgtttggtctgggaggtgaatttccggttgatgattgtgatggtggttttgagtttgaagatgatgacgagactattgacatcgaaacgctttatcggattctagatgagaagcctgattctgctgaggtagttttctcggcttttgtgggtagccaagaaaacttatcaccagttggttcatctgctgacgagctcaaggattcacagttgctaaatggttcatttgatgaacatgtgaaaatggaagccgggctgagtccttcacctgctcatacttgctctgcaagtcttaaagattggttttcgttaagtcagggtgagcagcctgtggaaacatgtggagtatctcaatctgagatgactagttgtagtatatcgtctagtttctctgatcctgatggcaatatgatggccttcaatcctgtgaattgtgacgttgacactgtttccaagcaggatgataagataatcgattccaaatctatgttgactccatattttgacaacgtgactggatacggagtggggttgggagccaatcataattcgtctgccatgtctgttttttttaataattccaattccctcagtgacagtgcggataactatgtctcttctgcacaagattgctacaatacaagtggtacatccttgtcagaccatacccccaattctgttcagaatttcgcgtttgagttctttcctaataaagaagaagctgtaaatgatgttgagagtggagtaagtgagtctcagtcggatggtgccagccggatgatttttgatagacatggaagagtggataatggatctttagaaaggaaacctcctattgatttttctagtgcaagagggatcagtttcaagtttgaaagtaatccttcagtttctcctgcctgtgtcaaaccctacaacagttttgacagtcatttagctgatagtgaccttgaccggcctaataattattcatgcagttttcaggataataaaactgttcatgtgaaggttaaaccagaggctgaatcagagaaagttgtctacagttcagttccaggggaatttagtgtcagggatgatgcttatctttctggagaaaccaatcgttggtggtctggtgcatcaagctctgcagtctcctatcaaacagatattgaaaaaggatactcatatatggcaccgcaaacagctctacctagccaagacagtggcaagataagctccaatcatttttacgattcagatacatgtttgcaatatgttgtagaagatcccagcccagtgacacaaaacaatgagtataaagactttcaaattcaacaaggagaccgggaatatattcaaccgaggggcattgattctcaattctcaaatgccagctttgaatcagttcaaagccattcttcagaatgtatatccgatagtgatgatgattctgacgtctgcataatagaaccttatggtcaatctgcaatcccacatcgacctctagctatgaaaatgccggtagtttcttcagaatattctacagttagtcataattttaatcaatctggaggcctgaagcttcagtcaaataaagaaaatatgatctttcaagctgcattgcaggatctcactcagcctaattctgaagcaattctgcctgatggtgtcttgacagtcccgcttctgagacatcagcgaatcgcattgtcatggatggcccagaaggagacaagtggcttcccctgttcgggtggaattcttgctgatgatcagggtcttgggaagacagtttccactatagctcttatactgaaggaaaggtctaaacctgcccaagcatgtgaagaaagtacgaagaaagaaatttttgacctagaaagcgagactggagaatgtgcgcctttaaaacccagtggaagaagcaagcattttgaacactctcaattgctttccaatgaaaacaaagttggtggagacagtgtgggtaaagtgacgggaaggccagctgctggaacgcttgttgtatgtcccactagtgttatgcggcagtgggctgatgaattacataagaaggtgactagtgaagcaaatctctctgttctggtataccatgggtctagcagaacaaaggatcctcatgagttggctaaatatgatgttgttgttaccacattttctattgtaagtatggaagtgccaaagcagcctcttgttgatgatgaggatgaagagaaggatggtgtacatgatggtggaactgcagctactggcttttgctcaaacaagaaaaggaaatatcctcccgattctaaaaagaagggttcaaagaagaagaaagttgagtttctgtctggccctcttgcgaaagtttcatggtttagagttgttctagatgaggcacagagcattaaaaattacaaaacccaagttgcaagagcatgctggggccttcgtgctaaacggaggtggtgtttgtctggcactccaatccagaattcaatcgatgacctttacagctactttcgattcctcaaatatgatccttactcttcctacgtattgttctgtagcacgattaagaaccctataactaggaacccagtgaaaggatatcagaagctgcaggctatccttaaaacagtgatgcttcgccgaactaaaggttcacttcttgatgggaaacccataatctctttacctccgaagtccattgagttgagaaaagtggatttcactgtggaggaacgtgatttctactccaaactagaggctgaatctcgtactcaattcagggaatatgcagaagctggaacagtgaagcaaaattatgtaaatatcttgttgatgctcttgcgccttcgccaagcttgtgatcaccctcttctcgtgaatggtgaatacagttttacctgggaatcttctgttggattagctaagaagcagattcagtcagacgcttcattggcaatttgtggtatctgcaatgatgcacctgaagatgctgttgcttcagtttgcggtcatgttttctgtaaacagtgcatttatgaacgccttactggtgatagtaatcactgtccctttgcaaactgcaatgtcagactcaccatctcatcgttatcttccaaaacgagattggacgatgctatgcctgacatgcaggagcgtgctacttcgaatagccttagcccttgttctgatgaagatcttccatatggttcatctaaaatcaaggctgctctagagatcttacaatcactgcccaaagcacatgatttgacagattcaaatcagatctctgaaaacagagaatactccggtctttctataactcctgtgaagaatgagggtatgagcgttgatgttccgattaaggtagctggagaaaaagccattgttttttcccaatggacaaagatgctaaacctacttgaagcttctcttgtaagttcacatattcagtatagaaggctcgatggaacaatgtcagttgctgctagggataaagcagtgcaggatttcaacactctccctgaggttactgtaatgataatgtctctcaaggctgctagtctcggactgaacatggtggcagcttgtcatgttctgatgctggacttatggtggaacccaacaaccgaggatcaagcaatcgatagagcacatcgtataggacagacacgaccagtaacagtagttcgcttcacagtaaaagatacagtcgaagatcggatattagcccttcagcaaaagaagagaatgatggtagcctctgcatttggagaagatgaaaagggaagccgacagtctcacctcacagtagaggacttgagctatctgtttatggctgattcatga

SEQ ID NO: 2368 - DNA, 3399 bp, Arabidopsis thaliana
  Clone ID: AT_K7M2.C1.o9.tg
atggatatgactagttgtgttgctagaagaactcgttcgaggactgaatcttacttgaactcgattctcaataaatcaaaggggatttctggagaagaagaagatcagtctctgggttgtgtaaattcgaggactgagaagaggagagttaacatgcgtgatgcttgttcaccttctccgaggaagaagaaacgacggcggaggaaggatgatgacgacgatgttgtatttgttagaactgaatatcctgaaggtaagcgagatgatgagaatgttggttctacttctgggaatttacaatcgaaatcgtttgattttggtgatagggtttgtgattttgatgctgatgatcgtaatttgggatgtgaagagaaagcttctaattttaaccctatagatgatgatgatgatgttgttttcgttggaactgttcagagagagaatgatcatgtagaggatgatgacaatgttggttctgcttcggtgatttctcctagggtttgtgattttgatgaggatgatgctaaagtgagtggtaaagagaaccctttatctccggatgatgatgatgatgttgttttccttggaactatcgcgggagagaatcagcatgtcgaggatgtcaatgctggttctgaggtttgtgatattcttctggatgatgctaatttgaggggtgaggagaagacttatgtgtctgatgaggttgtaagtctaagttctagttctgatgatgaggaagaccctttagaggaattagggactgattcaagagaggaagttagtggcgaagatagagattctggtgagagtgatatggatgaagatgctaatgattctgactcatctgattacgtgggggaaagttcagattcttctgatgtagagagctctgatagtgatttcgtttgttctgaggatgaagagggtggtaccagagacgatgctacatgcgaaaagaacccaagtgaaaaagtataccatcataagaagtcgaggacttttcgtaggaagcataacttcgatgtaattaacctgctagctaaatctatgttggagagcaaagacgttttcaaggaagatattttctcctgggacaaaatagcagaggttgattctagagaagatcctgtagttagggagagctcaagtgagaaggtaaatgaacatgggaaaccaagggaacggaggagtttccatagggtgagggagaagaaccacttgaatggtgagagtttttatggtggcgaaaaactctgtgatggagaagagacaataaactactcgacagaagattcacctcctttaaacttgagatttggctgcgaggagcctgtgcttatcgagaaaacagaagaggagaaagaattagacagcttgtgggaagatatgaacgttgctctaacattggaaggaatgcactcatctacccctgataaaaatggagatatgctatgtagcaaagggacacacgactttgtcctggatgatgaaatcggtttgaaatgcgtccactgtgcgtatgtggctgtcgagatcaaagacatctcaccagccatggacaagtatcgtcctagtgttaatgacaataagaaatgtagtgatagaaagggtgaccctttacctaacaggcttgagtttgatgcttcagatcccagcagttttgtcgcccctttggataatatagaaggaactgtctggcaatacgtccctggcatcaaagatactttgtacccacaccaacaagaagggtttgaatttatttggaagaatttagctgggacaacaaaaattaatgagttgaacagcgtaggggttaagggaagtggcggatgcattatttcgcataaggctggaactggtaagacacgtttgaccgtcgtttttcttcagtcatacttaaaacggtttccaaatagccatcctatggtcatagctcctgcaactctaatgcgtacttgggaagacgaagtcaggaaatggaacgtaaacattccattttataacatgaatagtctgcagttatcagggtatgaggatgctgaagctgtctcacgtttagagggaaataggcatcataattccatccgtatggttaagctagtttcgtggtggaagcagaaaagcattcttggaattagctaccctctgtatgagaagctcgcggcaaataagaacactgaaggaatgcaagtgtttaggaggatgttggtagaattgccggggttgctggtccttgacgagggccacaccccgagaaaccagagtagtctcatttggaaagtgcttactgaagtcagaacagaaaagcgtatctttctttcagggacactgttccagaataatttcaaggaactttctaacgtcttatgcctggcaagaccagctgataaagatacgatttcttcgaggatacatgaacttagcaagtgtagccaagaaggagaacacggaagggtgaatgaggaaaacagaattgtggatcttaaggctatgattgctcattttgtgcatgtccatgaaggaaccatccttcaagaaagccttccaggtctaagagactgtgttgtcgtgttgaacccgccttttcaacagaagaaaattcttgacagaattgacacttctcaaaacacatttgaatttgagcacaagctttcagctgtttcagtacacccatctctgtatttgtgctgcaatccgaccaagaaggaagacttggttattgggccagcaacattaggaactctcaagaggcttagacttaaatacgaggaaggtgtgaaaacaaagttccttatcgacttcatccgcatcagtggaaccgtgaaagagaaagtgttggtgtatagccaatatattgacactctgaagctgatcatggagcagctcattgcagaatgtgactggactgaaggggaacaaattctcttgatgcatggtaaagttgaacaaagagacaggcagcatatgatcgacaacttcaacaaaccagacagtggatctaaagttctactggcatcaacaaaagcatgttctgagggtatcagtcttgttggcgcttcaagagttgtgattcttgatgttgtttggaacccttctgttgaaagccaagccataagtcgagctttcagaattggtcaaaagcgtgctgtgttcatttaccatctcatggtcaaagacacatctgagtggaacaagtactgtaagcaaagtgagaaacatcgcatatccgaactggtcttctcttctaccaatgagaaggacaagccgattaacaacgaagttgtttccaaagatagaatcctcgacgagatggttcggcacgagaagctgaaacacatatttgagaagatactttatcacccaaagaaatctgacatgaataccagcttcttctga

SEQ ID NO: 2369 - DNA, 3537 bp, Arabidopsis thaliana
  Clone ID: AT_MXM12.C1.o5.tg
atggaggtttccgaagagcaaaggcgaagagacgaagcgactcggttagcttttgcggagaaacgaaagcagtcgttcgattcttcggaaaacccacagcgacaacaagatttcaggttagctaaatgtcgaaagcttgacggtagtaacgatgtgtgtcctcaagaagggtatcggaactacgaaccggtacgagtattgagtactagtgtgccggaaaagtttcgcgtcaggctcgagatctgttctcctgattcgttttcggttacgccggttcaattgcaagggtttcgatgccctgaagaacaagagtgccttcgtcaattgagaaagattctatctgatgcgattcctttacactacactcaaaatgatgatggaggaaaagctggggtttataagattagagactacaataaggtctctggatgtcttaaaaggtccaagagcgttgaagttgaaggggtaccttggaaaacgttggctgttgttgagaaactttctcagtcatatatttccgggaaatggcaaccttgtttacctgaacattatacggaggagaaggttgaacaactgattgaaaccctgccaaggaaattggtgaatgcccttttgcctttccaacttgatggtctaagatttggtttacggagaggtggcaggtgtttcattgctgatgaaatggggcttggaaagacgcttcaggccatcgccattgccggttgcttcataagtgagggttccatacttgttgtctgtcctgctgttttgcgtttcacatgggcagaagaattggaacgttggttgccatcttgtttgccttctgacgtacatctcgtattcggtcatcaagataatcctgcctatttaccaagatggccaaaagttgtggttatctcatacaagatgcttcagcatctccggacgaccatgctagagcgagaatgggccctcttgatagtagatgaatctcatcatctacgatgttcgaaaaagaagtcagatccacctgagataaagacagtccttgatgttgctgaaaaggttaagcacataattctgttgtcaggaactccttctgtatcgaggcctggtttgctgggaaaagataagtatgagtttgcgaaaacctattgtgaagttgggcttgtcagaggtatccaagggaagattttccaggatttttccaagggtactcgcttactggagttaaacatactgctaaaccaaacagtgatgataagaagactgaagcagcatttgttaacacagttacccccaaaacgtaggcaaatcgtaaccatcttgctaaagaagtctgatatagctttagcaatggctattgtcagcgaggctaagaaacaaaaggatggtgctatagcagaagtcacagagaagtcacatgaacctgaccaaaatgctcgtggatcaaatgaagctggacatgtaaacgcagagaattctgatggccctaactctgacaaagagaatcaactatgtgggaaactttcctatcaacaacttggcattgcaaagctttctgcctttcgtgaatggttatctctacatccacttctatcaggattggattataccccagaagaaattgatggagacagaagctcaactaaaatggtcgtttttgcacatcaccataaggttctggatggaattcaggaatttatatgtgataaagggattggttttgttcgcattgatgggacgacattgccaagagatagacaattggctgtacagtcatttcagttttctagtgaggtaaaaattgcaataattggtgtagaagctggaggagttggactggatttttcagcagcacaaaatgttgtgttccttgaattgcctaaaacaccgtctctgttgcttcaggctgaggatagagcacataggcgaggccaaacaagtgcagtaaatgtatacatcttctgcgcgaaggatactatggacgagtcaaattggcaaaatctaaacaagaagttgcaccgtatttcatctaccactgatggaaaatatgatgggaagactgaaatcgaaattggaggagcatctattttcaagcctgctgaagaaagcagtgaaagagaagttcttgaagggcaaccatcagaatcaaatactgtagtagctgataagattgttgaaagctgtgacgatccgggaactgagacagatgtgtcaaatactattgatctcaaggacgacatgacttctcaattggaaatattagaagtctgtccttttgttgagaatggttccggctctggcatgaggtcttctggcaccatttctttgactatgttagcccaggaaaaccaagaaaatcataagcctaaaaatcttattgctgatgatgggcttgtgaaagaagttgattccagttccatttttccactcatagattctctgagatttgaggtgagccaaaacactggaagaattcatttatactcttgcattcctgggaaagatccaagaccaaggcctcatttccaaaacttccgtccagaggagattgaagcaagcaatccaagtcagggtaccacgaaagaaaaaaatcctgaatccattacggatgacccggttcatgtacttgctatcttagaatttatgaaagagtggaaatcgctacggccaatcgaaaagcggaaactacttggaaagcctttgcaactacctttatcactggagttgagctacctgagtgaaagtactagtcacaacagcgagggattgcttaggggagggagcaaaagacgaaacacaccgttttctgagatcagcattcctttacctgaaaatgcagtgtggataaaggtcaaccttcgaagtggtcaccaaagaaaggaaaaagaatacacccaagcttggagtatgagcaacgaaccactctgtaaactctgtcaaaagccctgcgcgggatacaacgccaaagagcctgagtatttagaggatcttttctgtgagcttgcatgctatgaagactaccggacaagaacaagcagcagatacattcgccagatagaacatggaatttgcacaaactgcaaattagactgccaccaacttgtcaaacggttaaggcctttaccactggaaaaacgacgtacatacataaacaaagctgctccagaattgtttgcccggaagaacttgcttgaaaccctggttaatgatccaacggagggaaatgcatggcatgcggatcatatcattccagtctaccaaggcggaggcgagtgccggctagagaacatgaggacactatgtgtggcttgccatgccgatgtcactgcagctcaatgtgcagaacgtaaactgatacggtccaaagccaggaagcaactcaaaaacactttaaacgaactcagaaacaatccgaagcaaaaagatctctcggctgacgagaacacaaaggagactgattcagctaccaatgaagaggaagatgaactaatgattgaagttcctggtagtgcctactccatagatcagaaaatcaatcatgatgcctcatag

SEQ ID NO: 2370 - DNA, 1431 bp, Arabidopsis thaliana
  Clone ID: AT_F27C12.C1.o6.tg
atggatgcaaagaggaaattatcacaagagaaagacatgtatcaaaacgacgataaaaggaaaaaggtcgtggcactagaaaatcaagaagctgggggaagttgtatcgatggaaatgtggctcattggttttcgaaaactaagttcaatgggttggtgaacgtaccaattgtgtatttggccttggaagaaaatatagttaagaatgatcttacattgagaagctcacttaaacatgtcatctttggcggtagcagcggaggcagtaacagtggtaaagggctagccaaggatttgtacttagatggaaacgaattggttgaagttcatgtgagaagtgatagagaaatcaatatgatgaaagacaaaggaaaagcaatattcgaccttaacgaagctgtttggccaagagatgaagcagtatcaaacacatttgaggatcatccgttgccacccggattcggatcaaatatctgcaaagatatcaagatgagagttccaaaagatggattttcaggaactggcattttcccacatcctttgcataaaatgattatgaaaccacatcacttcgagatattcaattttctctgcaagaacttggttgtggaaaactcaaatggatgcatcatagctcaaactcctttatctgaaaagaccttcttgatgatcagtttcatctatggttacttagaaaagcacccaaatagtaaacctctatttgtgcttcctaaatgggtgttgaacttttggaaaacaaagtttggtgaattgaaggtcaatgaccttgtgttgctagacttctactcggcaaaggcgagtacccgatctcagcagttagaggttctaaaccgatggatcaaaacccggagtattatcttcttaggcgccaaacaattctccaacataatatctgataacagtggtgcagaagcttcagattcttgtagggatatactcttaaacattccttcggtggttgttttcgacagaggaactgatccgaggaacgagatgatgagctttcttaaggttgttgctcgtatcaagacgccacataaggttctactcactggctcactataccaaaacaacattaaggaggttttcaacattcttgatgttgttttccctgagtttctgaagcataaccgaattggtaaaaatatcagaaaattccttaatgttgaagctgatggaccttcaacgaatttgaagatgcccttgtttgataaattggaagaagctttgcttagtcaagattctgatcatggagacaagattagttacttaaccgaactaaggatgttgacaaacaagtttatttacaatcacaaagaagagtttctccttgaggtcccgggattgatggacttcacggtggtcttaaaaccgacattaagccaaaagtcagcatgggagattgaatga

SEQ ID NO: 2371 - DNA, 3090 bp, Arabidopsis thaliana
  Clone ID: AT_MDJ22.C1.o17.tg
atgggaacgaaagtctcagacgatcttgtttccaccgtcagatcagtcgtgggttccgattactcagatatggatataatcagggctttacacatggcgaatcatgatccaacggctgctatcaatataatcttcgacactccaagtttcgccaaacctgatgtagccactcctaccccgagcggctctaatggagggaagcgagttgatagtggattaaagggctgtacttttggtgacagcggaagtgttggagcgaatcatcgcgtggaggaagaaaatgagagtgttaatggtggaggagaagagagtgtttcagggaatgagtggtggtttgttggttgttctgaattggctgggttatcgacatgtaaaggaaggaaattgaagtctggtgatgaattggtgttcacgtttccgcatagtaaaggattaaagcctgagactacgcctgggaagcgcggttttgggcggggaaggccagctttgcgtggtgcttctgatatcgttaggttctctacaaaggattcaggagagattggtagaataccaaacgagtgggctcggtgtcttctaccacttgtgagagacaagaaaattaggatagaaggcagttgcaagtcggcgcctgaagctttgagcatcatggatacaattcttctgtctgtaagcgtgtacattaatagttccatgtttcaaaagcatagtgcgacttcatttaagacagctagtaatacggcagaggaatcaatgttccatcctctcccaaatctctttcggttactcggtttgatcccctttaagaaggcagagtttactccagaggatttttactctaagaagcgacctttgagttccaaggatggttctgctattcctacttcgttgcttcaattaaacaaggtcaagaatatgaatcaagatgcaaacggagatgaaaatgagcagtgtatcagcgatggtgatcttgataacattgttggtgttggggacagttctggattaaaggaaatggaaactccacatacacttctgtgtgagcttcgtccataccaaaagcaggcacttcattggatgacccaactggagaaaggaaattgcactgatgaggcagcaacaatgcttcacccgtgttgggaagcatactgtttagcagacaagagggaactggttgtctacctgaattcttttactggtgatgctacaatacacttccctagcacacttcaaatggcaagaggaggaatattagcagacgcaatgggtcttggaaagactgtaatgaccatatcccttttgcttgcccattcttggaaagctgcatcaactgggtttctatgccccaactatgaaggagacaaagtgatcagcagttctgtagatgatctcactagtcccccggtgaaggcaaccaaatttctaggctttgataagaggcttcttgaacaaaaaagtgtacttcaaaatggtggtaacctgattgtatgtccgatgacacttttaggacagtggaagacagagattgaaatgcatgcaaagcctgggtctctatctgtctatgttcactatgggcaaagcaggccgaaggatgcaaaacttctttcccagagtgatgtggtaatcaccacatatggagttctaacatccgaattctcgcaagagaactcagcagaccatgaaggaatttatgcagttcgatggtttaggattgttcttgacgaggcacataccatcaaaaactcaaaaagccaaatttccttggctgctgcagctctggttgctgataggcgttggtgtcttacgggtactcctattcagaacaatctggaggatttatacagccttctacggtttttgaggattgaaccatggggaacttgggcatggtggaataaacttgtccaaaagccatttgaagagggtgatgagagagggttaaagctagtgcagtctatcttaaaacctatcatgcttaggagaacaaagtctagcacagaccgagaaggaaggccgattcttgttctaccccctgctgatgcacgggtcatttactgtgaactttcggagtctgagagggatttctacgacgcgctatttaaaagatccaaggtcaaatttgatcaatttgttgaacaaggcaaagttcttcataactatgcttcgatcctggaactgcttttgcgtcttcgacaatgttgtgatcacccatttttagtaatgagtcgaggggatacagcggaatactctgatctgaataagctttctaaacgtttccttagtggaaagtcttctggcttagaaagggaaggaaaagatgtaccgtcagaggcttttgttcaggaggtggtagaggaactgcgcaaaggagagcaaggagagtgtccaatatgccttgaagcacttgaggatgctgtattaacgccatgtgctcatagattatgtcgtgagtgtctcttggcaagttggagaaattctacttctgggttatgtcctgtgtgtaggaacactgtaagcaaacaagaactcatcacagcaccaaccgaaagtagattccaggttgacgtggaaaagaattgggtggaatcatcgaaaatcactgctcttctggaagagcttgaaggtcttcgttcttcaggctctaagagcattctctttagccagtggaccgctttcctcgatctcctccaaattcccctctctcggaataacttttcatttgtccgtcttgatggcacgctaagtcagcagcaacgagagaaggtccttaaagaattttccgaagatggcagtatcctggtactgttgatgtctctaaaagctggtggcgttgggataaatctaacagctgcgtccaatgcttttgtcatggatccatggtggaacccagcggtagaggaacaagctgttatgcgtattcatcgtatagggcaaactaaggaagtcaaaatcagaagattcatcgttaagggaacggttgaagagagaatggaggcggttcaggcgaggaagcagagaatgatctctggggctttaaccgatcaagaagtacgaagtgcacgtatagaggaactcaagatgttatttacctga

SEQ ID NO: 2372 - DNA, 984 bp, Arabidopsis thaliana
  Clone ID: AT_T8N9.C1.o103.tg
atgagagttcctaaagatggcttttcaggaactggcattttcccacatcctttccataaaatgattatgaaaccacatcacttcgagatactcaattttctctacaagaacttggttgtggaaaactcaaatggatgcatcatagctcaaactccattatctgagaagaccttcttgatgatcagtttcatctatggttacttagaaaagcacccaaatagtaaatctctatttgtgcttcctaagtgggtgttgaacttagaggttttaaagcgatggatcaaaacctggagtataatcttcttaggggccaaacaattctccaacatagtatctgataacagtggtgcagaagcttcagattcttgtagggatattctcttaaacattctttcggttgttgttttcgacagaggaactgatccgaggaacgagatgatgagctttcttaaggttgtttctcgtatcaagacgccacataaggttctactcactggctcactataccaaaacaacattaaggaggttttcaacattcttgatgttgctttccccgagtttctgaagcataaccaaattggtaaaaatttcagaaaactccttaatgttgaagctgatggaccttcaacgaatttgaagatgcccttgtttgataaattggaggaagctttgcttagtcaagattctgatcatggagacaagatttgttacttaaccgaactaaagatgttgacaaacaaggttatctacaatcacaaaggagagtgtctccttgaagttccgggattgatggacttcacggtggtcttaaaaccgacatcaagccaaaagtcagcatgggaggttgaaagaaagtccaatgggaaaggtttcaaaaagtactctaccttaagcggaatcatgcttcacccactgctatgtgctttctcagaccgggcaaaaggtcttcctgcccccaacgaggatgagatggatgagatgtag

SEQ ID NO: 2373 - DNA, 2028 bp, Arabidopsis thaliana
  Clone ID: AT_F11A17.C1.o28.tg
atggatgatttctgggatttgactgtggaagagatggatgctattgaaaacgaagctcttcagagaatcaaccagcaacgcaattcctcttcttcttcttcattgccaattcccaacgaggtttttccgcaatccctctctctctctctgggcgattttgttgcggttcatacttcgtctcaaggagccagaatcttaccttcaactctcgcccctaaaccgaacactgtgctagtctctgttccaatagatgctggctctaagccacaagagcaaaaggtctctgtcaaaattttgcttcattctagtggagttcttgctgcaaagttcccatataaccaggtggtggtggatgctgtgcgtaaaatccctaaggccatttggaatgctaaagaaagtccaggttatggacctttcctcattcttcactgtcttcagcagaaaatattctacgagaaatttccagcgttaaagttgaggcatagagtatgtcagccatatgtagtacctgtggtttttctttattaccaaatgagtagtaacttgctctggctgcctgatgacttttgcctcattattggtctccacctttctcgcaaggcaattgctgtgacaacatgcgttcaggaatcttggccggttctgattattgcaccatcttcattacgtttacattgggcaacagtaagcttacgatatttgaattctacttggacattgtttatgacactggagatgattcataatgctgctttcttgcagatgattcaccaatggctgcatgtgcctccgtcagacatagttgtagttttacctcaaccaggtggatcaaacaagtgcggatttactatagtttcctcaaacacaaagggcacaatccatcttgatggtgtcttcaatattgtttcctatgatgtggtcactaagctggacaaactcttaatggcattggactttaaggtcgttatagcagacgaatcacattttcttaaaaacggtcaagcaaagaggacaagtgcttgccttccagtcataaagaaagctcaatatgccatccttctgagtggaactcctgctttatctagaccaatagagctattcaaacagctggaagctctatatccagatgtttatagaaatattcatgaatacggtggcagatactgcaaaggcgtaagtccattgcacattgagaaactacctagaagttcatataagggattttttggaacatatcaaggcgcaagcaatcatgacgagttgcacaatttgatgaaggcaacagtcatgattagaagacttaaaaaggatgtcttaactgaacttccgtcaaagcgcaggcagcaggtcttcctagatttagctgcaaaagacatgaagcaaatcaacgctttgtttcatgagttaaaggtggtaaagtcaaaaattaaggattgcatatcagaagatgacattaaatctctgaaatttatagagaagaaccttattaacaagatttacactgattcggctgtagccaaaatcccagcagtgcttgactatctggaaaatgtgattgaggctggctgcaaatttctggtgtttgcacatcatcagtccatgcttgaggaattacaccagtttcttaaaaaaaagaaagtgggctgcatccggattgatggtagcacccctgcctcctctaggcaagccttggtttctgactttcaggataaggatgagataaaagcagcagtgctgtcaatacgagctgctggtgttgggataactttgacagccgcaagcactgttatctttgcagagttgtcatggactccgggtgacctgattcaggcagaagatcgtgcacataggattggtcaggtttcttcagtaaacattcactaccttttagcaaatgacactgttgacgacatcatctgggatgttgttcagagcaagctggataatctaggacaggtatactctttctcaatgtctctccacatggagagaaaatctcttggtgtcaaatacacatccattatatga

SEQ ID NO: 2374 - DNA, 363 bp, Arabidopsis thaliana
  Clone ID: AT_F15P11.C1.o20.tg
atgttcaagaaagccttggagctttcaactctgtgcaacatcgaagtctgtgtcatatattatggtcgtgacggagaactcttcaagacatggccggaggatgaatccaaggttcgagacatggcagagaggtttaccaaactaaacgagagagagcgacggaagaaaagaaccaatctttctctgtttctacgtaagaagatcctcgacgacaataagctctcagggaaagtcttagagatgaaggattcgttagaaaggggtctacgggtgctacaagataagcttctgttactacaacccgagaatcagaccaagtccctgactcgttctgtttctagtttagattatgtgttcgtttaa

SEQ ID NO: 2375 - DNA, 498 bp, Arabidopsis thaliana
  Clone ID: AT_F9L11.C1.o29.tg
atgcccatgaggaaggaagggataacgaagaaactttatgagttggcaactctctgcgacatcaaagcatgtgcgggtaagataagtgagcatcagtatggtgcaagggaccttcaagatttaagttttcatattgatcactatatcaatcagcttaattccagggtcaagatccttacaaacaatggtgagtcttcttcttccgttcctcctctacttcatacttcagttgcgggtgcgggtgcagctcctcttcctgttgcgggtgccgatcttccgatggatcagaatcagtatgagccgattcagctctatatccctattggtcttagttatcatattcaataccaacatgaaatctatgataatttcaagcatgcgcacatccttttcatgaacggaaactactacaactaccaccaaacaccaaccgttggtcttactaccaccggtcacatgccttccaacaacaacaccacccccaccaccgatgtgtga

SEQ ID NO: 2376 - DNA, 360 bp, Arabidopsis thaliana
  Clone ID: AT_T1G16.C1.o140.tg
atgaagaaagtacatgaactctcaactctatgtggcatcacatcgtgtgcgatcatctacagtccgtatgataccagtcatgaagtgtggccatcaaattctggtgtgcaaagagtggtttccgaatttaggacactcccggaaatggatcaacacaaaaagatggtagatcaagaaggttttctcaaacaaaggatcgcgaaaccgacagagaatttgaggagacaaagaaaggacaataaggagctcgagatgactgaagtcatgtttcgatgcttaattggaaacatggagatgcttaaatcagaatcacaatcagaatcaacaacaatggtttatgaaaatgatgaaccatcttga

SEQ ID NO: 2377 - DNA, 933 bp, Arabidopsis thaliana
  Clone ID: AT_T1P2.C1.o16.tg
atggcgactccgtcgtcgtctttctggaacacagcttcacgagaagccatgaaaagcggcgtgttactcgcgaaactctactgctttcttcatgtaacaacaaactatctcggattcatggcttatgcttatggtccgagcatgactccgacgcttcatccttcgggaaatgtgttattagcggagagaatctcgaagcggtatcagaaaccgagtcgtggagatatagttgtgatacgatctccagaaaaccctaataagactccaattaaaagagttattggtattgaaggtgattgtataagctttgtgattgattcaaggaagagtgatgaatctcaaaccattgtggttcctaaaggacatgtctttgttcaaggtgactatactcataactcacgagactcaagaaactttggtactgtaccttacggtcttattcaaggcagagtgctttggaggcgtcgaaatggtatctacactaaactcagtgagctttccattctctgtggtgctgaagttgcgtttctcgggtattcttgctctggaaaaccatacacattcggcagtccgtccttccaagccgtggcagagcggtttctcaacggcgaggcctcgtcgtcttcttcatcatcgttgcaacgatcggtcatgaatgctcatcagcaagcgaagattcaagagctttgcaaagtatacaatagattggtggaggagataacggtggaagaagtcaaattaaagaagacggctgcattggcggagatgatgcccatgaatgaggatgcgtggtggaaagtggatccaaatgacgtgaaggatcgcgaagaggtgaagaagatgatggagaagcatcaagagctctatgagaaactgtgcgaggaagctgcttcaaggatcaagagaggacatgatgagaataataacaaatga

SEQ ID NO: 2378 - DNA, 474 bp, Arabidopsis thaliana
  Clone ID: AT_F15P11.C1.o60.tg
atggattcttcaacgtctacgaagaagaataccaaattgtttgtaagaaaccaaacttgtttcaagaaatcgtctctgtcttcttccaatgcaaaaaagaccacgaatttgtcgatgagagaacagaccatgtttaagaaagccttggagctttcgactctgtgcgacatcgaagtctgtgtcatatactatggtcgtgacggaaaactcatcaagacatggccggaagatcaatctaagatcctccacgacaagaaattgtcggagaaagtcttagagatggaggattcgttagaaagtggtctacgggtactacaagataagcttctgttactccaacccgagaaaaaccagaccgagttaggtcagagctgtgcggtttattccacaacgtatccattgtcttctccttcgctgattgaggatcatcaacatcaacaacaatggacagaaccattgtcaaacacagagtaa

SEQ ID NO: 2379 - DNA, 1158 bp, Arabidopsis thaliana
  Clone ID: AT_MSN9.C1.o20.tg
atgactatgcgatcattacctttttcctcttcttcttattcactcgcttccacaagtttgagtaacagacttgagactatattcaagaaagcttcagagctttgcactctctgtgatatcgaagcgtgcgtcatctattacggaccagacggagaacttaagacatggcctaaggagaaagagaaagtgagagacattgctctgaggtatagtcaattaaacgaagccttgagaagcaagaaaagcgttaatcttcatgggttcctgaacaagaagaagaagaagaagaagaagggtttgaagaatccgaacaataagaggaagacttgtcttaagaagaacgtgaatgttttaaagtatccactcgctgatcattaccctcccgaccaagtttctcaactgactcagtccttaaaactccatgtctctaaattccaagaaaggcttcgatttcttgagtcgcagaaacagacaaaaccggatcatcagagtttaacaccatcctctttgaatcatcagacccaatctttgaaccctagacagttttcgctgtttatgtataaccatggagacaatactctgtctcagatctcagtctctgcatcaaatttcaatcagaattatttctcagcgttacttgaacaatctgagttgaagaatcagttaatgaagcaggatggttatgatcagaatcagaacatgaggatgggtgacatcaccaacaacaattttcaacttccttacttctcaaagaaagaagcggtacaagaatctgtgaactactttgggatgaatcagttgatgctgaaggagttatatggttgtgatcaaaacatgtgtatgggtaacatcaatagcaacagctttcaacatccttgcgtctcaaaggcacaacattactcggcggtagaaggatctgtcaataaccaacgacaatctgagttaatgcagcaggagctttgtggttatgagcagaacatgtgctttaccaacaacaattttcaagtctcaaacaaagaagcggttcaagaatctgtgactaattttgggttgatgcagcatgaactttatgggtgtgatcaaaacatgtctatgggcaacatcattaacaacagctttcaacagcgtctcaaacacagaacaagaatctgtgaataa

SEQ ID NO: 2380 - DNA, 993 bp, Arabidopsis thaliana
  Clone ID: AT_MEE6.C1.o27.tg
atgactatgcgatcatcttcaccttcgtcctcttcttcttattcactcgctttcacaagtttgagcaataggcttgagaccatcttcaagaaagcttcagagctttgcactctttgtgatatcgaagcctgcgttatctattacggaccagacggagaacttaagacatggcctaaggagaaagagaaagtgagagacattgctcttaggtatagtctattgaacgaagcattgagacgcaagaaaagcgttaatcttcatgggttcctgaacaagaagaagaacaagggtttgaagaatccgaacaagaagatgaagacgagtcttaagaacgtgaatattttaaagtatccactcgctgatcattaccctcccgaccaagtttctccactgattcagtccttggaactccatgtctctaaattccaagaaaggcttcgatttcttgagtcgcagaaacagaatcagacaaaaccggatcatcagagtttaacaccatcctctctgaatcattacacccaatctttgaaccctagccagttctcgctgtttatgtataaccatggagacaatactctgtctcagatcccagtctctgcatcaaatttcaatcaggattatttctcagcgttacttgaagaatctgagttgaagaatcagttaatgaagccggagatttgtggttatgatcagaatcagaacatgagcatgggtgacatcacaaacaacaaatttcaagatccttgcgtctcaaacaaagaagcggtacaagaatctgtcaacaactttgggttgaatcaattgatgtacaaggagttttatggttgtgatcaaaacatgtctatgggtaacatcaatagcaacagctttcaaaatccttgcgtctcaaacacacaacattactcggcggtagaagaatctgtgaagaacccctggttgaatcagttaatgcagaatgaactttacggttacggttatgcaggcttttgttaa

SEQ ID NO: 2381 - DNA, 1026 bp, Arabidopsis thaliana
  Clone ID: AT_MNA5.C1.o6.tg
atgaagcaagcttcttcttcttcttcgtcacgtaattcaacaagtttaacaaatagacttaaaaccatcttcaagaaagctgaagagctttcgattctctgtgctattgaggtttgcgtcatctattacggaccagacggtgaactgagaacatggcctaaggagagagagacagtgaaagacatggctttgaggtataaagaggccagaaaacgcaagaagagccgcaatcttcatgagttcctcgagaaggagaaggacaaggacaaggggaagacgaatttgaagaagaattggtatccaaactttgatcattactctcctcaacaactctctcaattgattcagtccttagaacggactctttctactctgcaagaaaggcttcgtattgttgaggcgcagaaactacagaacacaaacttggtgcatcagagtttaacaccatcgtatctgaaccagacccaacacttgaatcctagcaagttctcgctgtttatgtacaaccatggagatgctactctctcacaactcccactgtctgctccacactccaatcaactcatcaattaccagaatcacttgatgcagcatggttttggtcagaacatgtgttcggacaacatcaccaacaacaactttgaacatcctggcgtgtcaaacacacaagactactcaccgttactttcggtacaagcatctgcagtgaataactacgggttgaataatcacttgatgcagcaacaggatcagcttcatggttttgatcagaacatgtgtatggtgagtgaaatcatcaacaacaacaacggtctacaacatcctaatctctcaaacacggttccacatgaattctcttctgatttcaaccagaacccttatggtaatgcggtcggtaacattagcttctctcaagacatgttttcaagctatgatgcgagcagtctgctacagacatcttctctgccacctctccacaacattcctagcagttattgttttcctggcaactcaagacttctctga

SEQ ID NO: 2382 - DNA, 672 bp, Arabidopsis thaliana
  Clone ID: AT_F15A18.C1.o40.tg
atggattcttcaatgtcgacgaagaagaaaaccaaattgtctgtgagaaaccaaacttgtttcaagaaatcgtctctttcttcttcttctactgcaaaaaagaccacgaatttgtctatgagagaagagaccatgtttaagaaagccttggagctttcaactctgtgcgacatcgaagtctgtgtcatatattatggtcgtgacggagaactcatcaagacatggccggaagatcaatccaaggttcgagacatggctgagaggtttagcaaactacacgagagagagcgacgcaagaaaagaacaaacctttctctgtttctacgtaaaaagatcctcgacgacaataaattgtcggagaaagtcttagagatgaaggattcgctagaaagtggtctacgggtattacaagataagcttctgttactccaacccgagaaccagaccgagctaggtcagagccgtgcggtttcttccacaacgaatccattgtcttctcctgaggatcatcatcatcaacaatggacagaaccattggtgactggtgtgtcaaacacagagcaagacctatcgacgtcaccattgagtaaccatcagagcaaatattcagtctttgtctataaccatgacagcggaagcttctatcaagtccctgactcgatctgtttctag

SEQ ID NO: 2383 - DNA, 864 bp, Arabidopsis thaliana
  Clone ID: AT_F15P11.C1.o40.tg
atggattcttcaatgtcgacgaagaagaaaaccaaattgtctgtgagaaaccaaacttgtttcaagaaatcgtccctgtcttcttcttctactgcaaaaaagaccacgaatttgtctatgagagaacagaccatgttcaagaaagccttggagctttcaactctgtgcaacatcgatgtctgtgtcatatactatggtcgtgacggaaaactcatcaagacatggccggaggatcaatcaaaagttcgagacatggctgagaggtttagcagattacacgagagagagcgatgcaagaaaagaaccaacctttctctgtttctacgtaagaagatcctcgacgacactaaattgtcggagaaagtcttagagatggaggattcgttagaaagtggtctacgagtactacaagataagcttctgttactccaacccgagaaaaaccagaccgagtttggtcagacccgtgcggtttcttccacaacgaatccattgtctcctcctccttcgctaattgaggatcatcgtcatcaacaatggacagaaccattgatgagtggtgtgtcaaacacagagcaagacctatcgacgtcatcattgagtcaaaatcagagcagaatttcagtctttctctataaccatgacaaccgtagcttctatcaagtccctgactcagtttctagctttgaccaatcggctttacttggggaacaaggatctggtctaggaagtaactttgatcttcctcccatggtttttcctcctcagatgcagacacaaaccccacttgtcccctttgatcagtttgcggcatggaatcaagcaccgtcgtttgcagatccaatgatgttcccttataattag

SEQ ID NO: 2384 - DNA, 870 bp, Arabidopsis thaliana
  Clone ID: AT_F2P16.C1.o210.tg
atggattcttcaatgtcgacgaagaagaaaaccaaattgtctgtgagaaaccaaacttgtttcaagaaatcgtccctgtcttcttcttccactgcaaaaaagaccacgaatttgtctatgagagaacagaccatgtttaagaaagccctcgagctttcgactctgtgcaacatcgatgtctgtgtcatatactatggtcgtgacggaaaactcatcaagacatggccggatgatcaatcaaaagttcgagacatggctgagaggtttagcagattacacgagagagagcgatgcaagaaaagaaccaacctttctctgtttctacgtaagaagatcctcgacgacactaaattgtcggagaaagtcttagagatggaggattcgttagaaagtggtctacgagtactacaagataagcttctgttactccaacccgagaaaaaccagaccgagtttggtcagacccgtgcggtttcttccacaacgaatccattgtctcctcctccttcgctaattgaggatcatcgtcatcaacaacggacagaaccattgatgagtggtgtgtcaaacacagagcaagacctatcgacgtcatcattgagtcaaaatcagagcaaattttctgtctttctctataaccatgacaactgtagcttctatcaagtacctgactctgtttctagctttgacagtttgacgagtactggtttacttggggaacaaggatctggtctgggaagtagctttgatcttcccatggtttttcctcctcagatgcagacacaaaccccacttgtcccctttgatcagtttgcgccatggaatcaagcaccgtcgtttgcagatccaatgatgttcccttataattag

SEQ ID NO: 2385 - DNA, 1281 bp, Arabidopsis thaliana
  Clone ID: AT_MKD10.C1.o40.tg
atgacgaccattcgatcttcaccttcttcctctcgttgttccaattcgtcttcctcttcttcttattcactcgcttccacaagtttgtctaacagacttgagactatattcaagaaagcttcagagctttgcactctctgtgatatcgaagcctgcgtcatctattacggaccagacggagaacttaaaacatggcctaaggagcgagagaaagtgcgagacattgctctgaggtttaatcaattaaacgaagccttgagacacaagaaaagcgttaatcttcatgggttcctgaacaagaagaagaagaacaagggtttgaagaatccgaacaagaagaagaagacgagtcttaagaacgtgaatgttttaaagtatccactcgctgatcattactctcccgaccaagtttctcaattgactcagtccttagaactcaatgtctctaaattccaagaaaggcttcgatttcttgagtcgcagaaacagaatgagacaaaaccggatcatcagagtttaacatcaatatcttctctgaaccaatctttgaaccctagccagttctcgctgtttatgtataaccatggatataatactctgtctcagatcccagtctctgcatcaaatttcaatcaggattatatctcagcgttacttgaacaatctgagttgaagagtcagataatgaagcaggaggtttgtggttatgagcagaacatgtgcatgagtaaccatggagatgctacgctctctcaaatcccattctctgcatcaaatttcaatcaagatttttcagccaacaacaacttccaacattcttttgtctcaaacacacaagattactactctgttcaaaaatctgtgaataacaactatgggttgaagaatcagttaatgaagcacgatctttgtggttatgagcacaacatgtgcatgagtaaccatggagatgctaccttctctcaaatcccactctctgcatcaaatttcaatcaagatttttcagtctcaatacaagaagaatctggcttgatgcagcaggagctttgtggttatgatcagaatcagaacatgagcatgggtgacatcacaaacaacaattttcaagttacttgcgcctcagtactagaatctgtgaacaactttgggttgaatcagttgatgcacaaggagttttatggttgtcatcaaaacatgtctatgggtaacatcaataacaacagctttcaacatccttgggtctcaaacgcagaccatactcggcggtacaagaatctgtga

SEQ ID NO: 2386 - DNA, 855 bp, Arabidopsis thaliana
  Clone ID: AT_T2K10.C1.o9.tg
atggctcctcgtcagaagaaacctaacaagtccgatgatgatgatggtgatttgcataggaagaaacagagctttttcaaacagagatttccaggctttaagaagaaagcctcagagctctctgttctctgcggcaactctgtcggtttcatctgttacggtcccgacaacgatctccatgtttggcctcagtctcaagatcataacccacaagccctacatgagatcgtggccaagttcaatgccttgagtgatgagaggaggaagaatcatgcatgtgatctcaatgacttccctcatcatctcaagggtttgtctcgtgaggagttaaggaagcatctccttcaccttgactctcaattacttggagtcagggaacaaaagatagaaattcttaagaagacgctcacgggttcttccgaaaaagatggtgcaagggtttcagagaactcggccatctccgatcacaagttgaagatagagcctaatttgacggatatattgtcagaagatcatctaattagggtttcagataagaagctgggttcgtgtgatgtatttgacgagttggcttacgtggtccgcgggtcaaggaatttgaacgagaatgtttccaattacgaatcaaaagatgcagcttacacgggaatggatcatcttggcactttcggcggtaattatcttcaggaggcggcggcagaactttaccaaacttacaatctagggaatttttgtgatgatcatgtttgggatctggagtttgcctcaagactaccaccacttcatacatttagcgatcctctcatgaccaccaatacttgccaaacgatgagctccgatatgatttcaatttga

SEQ ID NO: 2387 - DNA, 852 bp, Arabidopsis thaliana
  Clone ID: AT_F23H11.C1.o13.tg
atggctcctcgtcagaagaaacctaacaagtctgatgatgatgatgatttgcgtaggaagaaacagagctttttcaaacagagatttccaggctttaagaagaaagcctctgagctctctgttctctgcggcaactctgtcggtttcatctgttacggtcccgacagcgatcttcatgtttggcctcagtctcaagatcataacccacaagccctacatgagatcgttgccaagttcaatgccttgagtgatgagaggaggaagaatcatgcatgtgatctcaatgacttccctcatcatctcaagggtttgtctcgtgaggagttaaggaagcatctccttcaccttgactctcaattacttggagtcagggaacaaaagatagaaattcttaagaagacgctcacgggttcttccgaaaaagatggtgctagggtttcagagaactcggccatctccgatcacaagttgaagatagagcctcatttgaaggatatattgtcggaagatcatctaattagggtttcagataagaagctgggttcgtgtgatgtatttgacgagttggcttacgtggtccgcgggtcaaggaatttgaacgagaatgtttccaagtacgaatcaaaagatgcagataacacgggactggatcatcttgtaactttaggcggtgattatcttcaggaggcggcagcagaactttaccaaacttacaatctagggaatttttgtgatgatcatgtttgggatctggagtttgcctcaagactaccactacttcatacttttagcgatcctctcatgaccaccaatacttgccaaacgatgagcaccgatatgatttcaatttga

SEQ ID NO: 2388 - DNA, 1068 bp, Arabidopsis thaliana
  Clone ID: AT_MKM21.C1.o40.tg
atggccattcgatctttaccttcttcctctcgctgttcctcttcttcttcttcttcttcttattcactcgcttcaacgagtctaagcaatagacttgagaccatcttcaagaaagcttcagagctttgcactctctgtgatatcgaagcatgcgtcatctattacggaccagacggagaactcaagacatggcctccggagcgagagaaagtggaagacatcgctctcaggtatagtcaattaaacgaagccttgagaaggaagaaaagtgttactctttatgacttcctgaacaagaagaaggacaagacgaacttggagaagaaagcaaagataacggacaatgatgacttgaagacttgtctgaagaacgtgaatattttaaagtatccactcgctgatcattactctcccgaccaagtttctcaactgattcagtccttagaacctcatgtctctaaagtccgagaaaggattcgttttgttgagtcgcagaaacacaaggagacaaaaccggatcatcagagtttagcatcatcctctctgaatcatcagacccaatctttgaaccctagccagttttcgctgtttatgtataaccatggagacaatactctgtctcagatcccagtctctgcatcaaatttcaatcaggattatttctcagcgttacttgaacaatctgagttgaagagtcagataatgaagcaggatctttgtggttatgagcagaacatgtgcatgagtaaccatggagatgctacgctctctcaaatcccactctctgcatcaaatctcaatcaagatttctcagccttactacaagacgaatctggcttgatgcaacaggagctttgtggttatgatcagaacatgtttatgaacaacaacaactttcaacattcttttgtctcaaacacacaagatcactctgctcctgtggtacaagaatctgtgaacaacaactatgggttgatgccgcatgttccttgtggttatgatcagaacctgttcacgagtgatattaccaacaacaaccttcttatcaacaactcgatgtttctctga

SEQ ID NO: 2389 - DNA, 990 bp, Arabidopsis thaliana
  Clone ID: AT_F8L21.C1.o40.tg
atgaagcaagcttcttcttcttcgtcatgtaatccaacaagtttaacaaacagacttaaaacaatctttaagaaagcagaagagctttcgattctctgtgctattgacgtttgcgtcatctattacggaccagacggtgatctgagaacatggcctaaggatagagagacagtgaaaaatatggctttgaggtataaagaggacagaaaacgcaagaagtgcctcaatcttcatgagttcctcgagaaagagaaggtgaaggacaaagacaagtataaggggaagacgaattatgtgaagaaccctaattggtatccaaactttgatcattactctcctcaacaactctctcaattgattcagtccttagaacgaacactttctactctccaaaaaaggcttcgtattgttgagtcgcagaaaaaacagaacacaaacttggtgcatcagagtttaacaccatcgtatctgaaccagacacaacacttggatcctagcaagttctcgctgtatatgtacaaccatggagatgctactctctcacaactcccactgtctgcttcacaatccaatcaactcatcaattaccagatgcagcatggttttggtcagaacatgtgtttggacaacatcaccaacaacaacaactttcaacatcctggcgtgtcaaacacacaagactactcaccgttactttcggcgaataactacgggttgaataatcacttgatgcagcaacaggatcagcttcatggttttgatcagaacttgtgtatgatgagtgaaatcatcaataacaacaacggtttacaacatcctaatctctcaaacactgttccacatgaattcccttatggtaacactagcttctctcaagatatgttttcgagctatgatgggagcagtttgctacagacatcttctctgccacctctccacaacattcctaacagctattgtttttctgacaactcaagacttctctgctaa

SEQ ID NO: 2390 - DNA, 990 bp, Arabidopsis thaliana
  Clone ID: AT_MKM21.C1.o100.tg
atggccattcgatctttaccttcttcctcaggctgttccaattcctcttcgtcttcttcttattcactcgcttcaacaagtttgagcaatagacttgagaccatcttcaggaaagcttcagagctttgcactctctgtgatatcgaagcatgcgtcatctattacggaccagacggagaactcaagacatggcctccggagcgagagaaagtggaagacattgctctcaggtatagtcaactaaacgaagccttgagacgcaagaagagcgttactctttatgacttcctgaacaagaagaagaacaagacgaacttggagaagaaagcaaagataaaggacaacgacttgaaaagactttccttagaacctcatgtctctaaagtccgagaaaggattcgttttgttgagtcgcagaaacataaggagacaaaaccggatcatcagagtttagcatcatcctctctgaataatcagacccaatctttgaaccctagccagttttcgctgtttatgtataaccatggagataatattctgtctcagatcccagtctctgcatcaaatttcaatcaggattatttctcagcgttacttgaacaatctgagttgaagagtcagataatgaagcaggaggtttgtggttatgagcagaacatgtgcatgagtaacaatggagatgctacgctctctcaaatcccactctctgcatcaaatttcaatcaagagttctcagccttactacaagaagaatctggcttgatgcaacaggagctttgtaattatgatcagaacatgtttatgaacaacaacaacttccaacattcttttgtctcaaacacacaagatcactctgctcctgcggtacaagaatctgtgaacaacaactatgggttgatgccgcatgttccttgtggttatgatcagaacctgtttacgagtgatattaccaacaacaaccttcttatcgacaactcgatgtttctctga

SEQ ID NO: 2391 - DNA, 681 bp, Arabidopsis thaliana
  Clone ID: AT_T8F5.C1.o14.tg
atggtgaaaaaaactcttggtcgtagaaaggtagagatagtgaaaatgactaaggaatcaaaccttcaagtcacattttccaagagaaaagctggtctttttaagaaggctagtgaattttgcacattatgtgatgcaaaaattgcgatgatcgtgttttcaccagctggaaaagtattttcttttggtcatccaaatgttgatgttctgcttgaccactttcgagggtgtgttgtaggacacaacaacacaaaccttgatgaaagctacacaaagcttcatgttcaaatgctcaacaaatcctacactgaggtgaaggcggaagtagaaaaagaacaaaagaataagcagtcgcgggctcaaaatgaaagagaaaacgaaaacgctgaggagtggtggagtaagtctccattagaactcaacttaagtcaatcaacctgtatgatacgtgttcttaaagatttgaagaagatagttgatgaaaaagcaattcaattaatccatcaaacaaacccaaacttctatgttggaagttctagcaatgctgctgctccagcaactgttagtggtggtaatatctccacaaaccaggggttctttgatcaaaacggaatgacgactaatcctactcaaacacttctgtttggatttgatattatgaatcgcacaccaggagtttaa

SEQ ID NO: 2392 - DNA, 897 bp, Arabidopsis thaliana
  Clone ID: AT_T21B4.C1.o40.tg
atgaagaaaggaacaaagcgcaaaatcgaaataaagaaacgagaaaccaaagagcaacgagccgtgacttgctctaaacgccgtcaaactgttttttccaaagccgccgatctctgtcttatctccggtgctaacatcgccgtcttcgtaacctctccctccgatagttccgatgttgtctattccttctccggttactcctctgcctacgaaatcgctgattgttacctaaatcgcaagcctccacccaagattgttaacccggccggatccaaactaggattttggtgggaagaccctgatctctaccattcgtgtgatgatctctctgagttaagcattatcgaggatcgtttacagagaatgaagaagcatgtgatggcttgccttgagaaggaagaaaaatctcaacttgtttctagtttcgaccaaaaccctaatagtacttgttctctcgacgtcgaggattgtgatggatcttcttattcgcaaattgcttctacttttactccaaactctgtcaacgagtattgcagcgatcaaaccttttcttctttccatggcgatcaaaaccctaacctctcgtctccgtcttttgatcaggactgttactcctctctctatcagatctgtggagaatcatcttcacaagttgcttcttttgatcaaaaccctagctccgagatccaaggatttgaaacagaggaagagattaaccaaatcaatctactactacaagaaacacaaacagaggccaatgtcaatttggatgatgagatctgcttttggaatgatctatccaacgatgatgtgtttggtctaaacagctacttcggtctcgataacaccaatgcaatgatcaacttcggagattccgactttagacgtcatgtctga

SEQ ID NO: 2393 - DNA, 834 bp, Arabidopsis thaliana
  Clone ID: AT_MDF20.C1.o13.tg
atgggtcgaaagatggtaaagatgacgaggataacgaacgagaaaacgaggataacgacttacaagaagaggaaagcatgtttgtataagaaagccagtgagttctcaacactctgcggtgtggacacttgtgtcattgtgtacggcccgagcagagcaggggacgaaatggtcatggagcccgagttatggccaaaggatgggagcaaagtccgtgaaatcttaaccaagtacagagacactgcgtcaagcagctgcaccaagacatacaccgtgcaagaatgcttggagaaaaacaacactaaggtggagaaaccgacgattgcgacaaagtatcctacatgggacaaaaagctcgaccagtgttctttaaatgacctctatgcggttttcatggcagtagaaaacaagatccaagaggctacgaataggaatcagacatttcctgacactagttgttggtctaatgaccaacttggtttatgcggttacaatcggcaatgttttgagcagtatcagttgtttcctctgcctactatggattacaacgggctctctttcttcccttttaataaccagatgacctcaaatactgcggaagtgtcttccttctcgaatgtgacagagccgatgatagcgaacgggcaaagcttgttttacgggagttgttcggatggtccatatggtccgatggtacagaggacagcttatatggagccaatacattggggtttaggaaacagtatgttcaacaatgtgaagcagttccaagattatcccttcaggtttgcacaagttaatgatttggaggattcaagtaaactttctatgtga

SEQ ID NO: 2394 - DNA, 654 bp, Arabidopsis thaliana
  Clone ID: AT_T13M22.C1.o2.tg
atgaaagatttgttcatggaaggagaaagagaaacttcatcgatgacttgcttgacgcccaaggattctgttcaaagccctaacatgttggttagacaaccaaaaaaggagacaacaacacaaacccctaaaacgacacgaggaagacagaagatagagatcaagaaaatcgaggaagagaccaagagacaagtaacgttctcgaaacgccgtcgtgggctgttcaagaaatccgctgaattgagcgttctcacgggcgcaaaaatcgccgtcataacgttctctaaatgcgataggatctacagatttggccatgtagacgcattgatagacaagtatcttcgtaagagtccggtgaagttggagggatattccggtgataacgcggcggatgaggaaagtaggagaccgtggtgggagcgtccggtggagagtgtgccagaagaggagcttgaggagtacatggcagcattgagtatgttgagagaaaatatagggaaaaagattgtggcgatgggtaacgatcggacggttgatatggttccggcatggccaatcaatgtgatgggatggaaaccaacgatggatatgcaaaaattggaaaatctgacggatggggttaatcgatgccgtgtaggtcaaaacggtgattga

SEQ ID NO: 2395 - DNA, 1020 bp, Arabidopsis thaliana
  Clone ID: AT_F27M3.C1.o17.tg
atgaggtcgaaaattaagttatcactcatagctaataagacctcaaggagaaccacattcaggaagaggaagggagggataacgaacaaactccatgagctaacaactctctgcggcgtcaaagcatgtgcggtaatctccagtccgtacgagaatccagtggtgtggccgtcaaccgaaggtgttcaagaggcggtttccatgtttatggagaggccggcgacagaacaatccaagctgatgatgagtcatgagacctacttgcaggacaaaattaccaaagaaacaaagaaactggagagtctacgtcgtgaaaaccgagaatctcagcttaggcaatttatgtttgattgtgttgaaggtaagatgagtgagcatcagtatggtgcaagggaccttcaagatttaagtctttatattgatcactatatcaatcagcttaattcaagtgtcatgctccttacaaacaatggtgcgtcttcttcttcctttcctcctccgcttcatacttcagttgcgggtgcgggtgcgggtgcgggtgctgctcctcttgttgttgcgggtgcgggtgcggctcctcttgctgttgcgggggcgggtgcgagtcctcttgctgttgcgggtgtgggtgcggctcctcttgctgttgcgggtgccggtcctcctatggctcagaatcagtatgagccgattcagccctatatccctactgcttttagtgataatattcaataccaagctcctgtggattttaatcatcagatccaacatggaatctatgataatctcagtttggatccaaatcatcagtatccgtttcaagatgatccattcatggagatgttgatggaatatccttatgaacaagtgggttatgctgcagagcatgcacacatccctttcatgaacggaaactactacaactaccaccaaccaccaaccgttggtcttactaccaccggtcacatgccttccaacaacgccaccaccaccaccaccaccaacaccaccgttgtgtga

SEQ ID NO: 2396 - DNA, 492 bp, Arabidopsis thaliana
  Clone ID: AT_F12K8.C1.o31.tg
atgggaagaagaaaagttacacaccaattgatttctgacaacgccactcgccgagttacattcagaaaacgcaaagatggtttattgaagaagatctatgaactgaccgttctatgtggtttacccgcttgtgccatcatctacagcgaatacaaagatggccctgagctctggccaaaccttaacgaggttcgttctattcttaacaggttaagcgaacttccggtagagaagcagaccaaatacatgatggaccagaaggatctcatgaacaagatgatccaagacgcagagaagaagttggagaaggagaagatgcatactcgtgcgatgaaacttgggttaatggctgggtctaatgatctaatcaccgatactgattgttcggaggaactggccagagcagctgatgtggttgataagaagctcaaagccatcagagagagaatcaaggctgttgaagcaggagcaccaatcatcaagagagactag

SEQ ID NO: 2397 - DNA, 984 bp, Arabidopsis thaliana
  Clone ID: AT_F21E10.C1.o10.tg
atggggatgaagaaggtgaagctatctttgatagctaatgaaagatcaaggaaaacatccttcataaagaggaaagacgggatttttaagaaactccacgagttgtcaactctgtgtggtgtccaagcttgtgctctcatctacagtccattcataccggttccagagtcatggccgtcaagggaaggtgctaaaaaggtggcttcaaggtttctggagatgccgccgacagcccgaaccaagaagatgatggatcaagagacttaccttatggagaggattaccaaagcaaaagagcaactaaagaacctggctgctgagaaccgagagttacaggttagacgatttatgtttgattgtgttgaaggcaaaatgtcccagtatcattatgatgcaaaagaccttcaagatttgcaatcttgtataaatctatatctcgatcagcttaacggaaggatcgagtccattaaagaaaatggtgagtcgttgttgtcttccgtctctccttttcctactagaattggtgttgacgaaattggtgatgagtcattttccgactctcctattcatgctacaactggggttgtagatactcttaatgctaccaatcctcatgttcttacgggcgatatgactccttttcttgatgcggacgcaactgcgaatatgaatcaggttcaataccaggctcctaataatctgtttaatcagattcaacgagaattctacaacataaatttgaatctgaatttgaatctgaattcgaatcagtatctgaatcaacaacaatcattcatgaatccgatggtggaacaacatatgaatcatgttggagggcgtgaaagcattcctttcgtggacggaaactgctacaactaccatcaactaccatccaatcaactaccagccgttgatcatgcttccaccagttacatgccttccaccaccggtgtctatgatccttacatcaacaataatctctaa

SEQ ID NO: 2398 - DNA, 240 bp, Arabidopsis thaliana
  Clone ID: AT_F10D13.C1.o25.tg
atgggtagagtgaagctaaagataaagaaactacagaacatgaatggacgtcaatgtacgtatacgaaaaggagacatgggattatgaaaaaggctaaggagttatcgatcttatgcgacatagatgttgtgcttctcatgttttctcccatgggaaaggcttcaatttgcataggcaaacacaggtctgatcacactttttttttaataccaaagtatctttcacattgttctgtttag

SEQ ID NO: 2399 - DNA, 636 bp, Arabidopsis thaliana
  Clone ID: AT_F21E10.C1.o9.tg
atgactttcatagaaaatgaaacagcaagaaaatcaacattcaagaaaagaaagaaaggtcttttgaagaaagctcaagagttgggaattctttgtggcgtcccgatctttgctgtcgtcaacagtccgtacgagctgaacccggaggtgtggccatcgagagaggctgcgaaccaggtggtgtcccaatggaagacgatgtcggtgatggacaagaccaagaagatggtgaaccaagagacctttctccaacagaggatcaccaaagcaaccgagtcttggaagaagttgcggaaagagaacaaagagttggagatgaagaacattatgtttgattgtcttagtggcaaaactttggtttctagtatcgaaaaaactgagcttcgagattttggttatgtcattgaacaacaactcaaagatgttaatcgtaggatcgagattctgaaaaggaacaatgaaccatcttccgccctcgttcctgttgctgcccctacaacatctagtgtcatgcctgtggttgagatgggttcttcttcggttggattttacgacaaggttcgagatcaaattcaaattactttgaatatgaaacagaccacaaatgatttggatctgaacaagaaacagtggtga

SEQ ID NO: 2400 - DNA, 729 bp, Arabidopsis thaliana
  Clone ID: AT_F15M7.C1.o3.tg
atggctcggaaaaaagtacgagctgcatggatccgtgacgataggatgaggagggcaagcctcaagaggaggttaacggggcttatcaaaaaagtgaatgaactgtccattctgtgcgatatgcgcgctagtgtggtcgttttcaatcgagaagaagaacaattgacggcgtggccatctcccgaggcagctaattcactcatcgacaacttttattctctaaccgaccatgaaaggaccatgaaggccgttgatccggagtcatacgtccagaccgttatcgaaaagattgagaagaaacgagccgatactcggaaggttatcacggagtttgagatggacgaactcatgttccaagtccaaaatggtcgtgaacttgctgatctctccccaaccgaggctgataaactaataccatatgcggataagaaacttatgtggttgagtaaacggatgggttctacgggggtcgacgccctgagggcttcgaatgttgcgtctgggtcaggtggaaatgggttaaacatgatggaaactggaagaagtttctattatgttgataaatgggtcttcgttgatccacaagtccaaaacccttgtgatgttgagactcatttacccacaatggtcagtggcttagacctaaacatggaaccatctgatgaagacttggggacctataaaggagagagcagcatggccggtggtgctgaagacgatgccgaatga

SEQ ID NO: 2401 - DNA, 1092 bp, Arabidopsis thaliana
  Clone ID: AT_F15F15.C1.o30.tg
atggggatgaagaaggtaaagctatctttgatagctaatgaaagatcaaggaaaacatccttcatgaagaggaaaaacgggatattcaagaaactccacgagttgtcaactctatgtggtgtccaagcttgtgctctcatctatagtccattcataccggttccagagtcatggccgtcaagggaaggtgctaaaaaggtagcttcaaagtttctggagatgccgcggacagcccgaaccaggaagatgatggatcaagaaacccatcttatggagaggattaccaaagcaaaagagcaactaaagaatttggctgctgagaaccgagaattacaggttagacgatttatgtttgattgtgttgaaggcaaaatgtcccagtatcgttatgatgcaaaagaccttcaagatttgctatcttgtatgaatctatatctcgatcagcttaacggaaggatcgagtccattaaagaaaacggtgagtcgttgttgtcttccgtctctccttttcctactagaattggtgttgacgaaattggtgatgagtcgttttccgactctcctattcattctacaactagggttgtagatactcctaatgctaccaatcctcatgttcttgcgggcgatatgactccttttcttgatgcggacgcaaatgcggtaactgctcccagtcgattttctgatcatattcaatatgaaaatatgaatatgagtcaaaatctgcatgaaccgtttcaacaccttgttcctactaacgtttgtgatttttatcaaaatcagaatatgaatcaggttcaataccaggctcctaataatctgtttaatcagattcaacgagaattctacaacataaatttgaatctgaatttgaatctgaattcaaatcagtatctgaatcaacaacaatcattcatgaatccgatggtggaacaacatatgaatcatgttggagggcgtgaaagcattcctttcgtggacagaaactactacaactacaatcaactaccagccgttgatcttgcttccaccagttacatgccttcaaccaccgatgtttatgatccttacatcaacaacaatctctaa

SEQ ID NO: 2402 - DNA, 549 bp, Arabidopsis thaliana
  Clone ID: AT_F3M18.C1.o10.tg
atgaatcccaagaaaaccaaaggaaaacaaaagattaacatcaagaaaattgaaaaagatgaaggcagatcggtcacattctctaagcgtctaaatggtatctacactaaaatcagtgagctttctattctctgtggtgttgaagttgcgtttatcgggtattcttgctctggaaaaccatacacttttggcagtccatccttccaagccgtggcggagcggtttctcaacggcgatgcctcgtcgtcttcttcatcatcattggtcatgaatgctcacaagcaagcgaagattcaagagctttgcaaaaaatacaatagattggtggaggagttaaaggtggacgaagtcaaagtcaagaaggcagctgcattggcggagacgagggtcgtgaataaggatgtgtggtggaaagtggatccaaatgacgtgaaggatcacgaaaaggcgaagaagatgatggagaagtatcaagagctctatgataaactgtgtgagcaagctgcttcaaggatcaagagaggacatgatgagaataataacaaatga

SEQ ID NO: 2403 - DNA, 840 bp, Arabidopsis thaliana
  Clone ID: AT_T8F5.C1.o11.tg
atgagggggaagatgaagttatcgttcatagaaaatgattcagtgaggaaaacaacattcaccaaaaggaagaaagggatgctgaagaaattcaacgagctagtaactctatgtggtgttgacgcatgtgcggtcatccgtagcccgtacaactcgatccaggagccttggccatcaagggaaggcgttgaagaagtgatgtcgaagtttatggagttttcggtgttggaccggaccaagaagatggtggatcaagagacgtttttacgtcaaaggatcgccaaagaaacagaacgtctccagaagctacgtgatgagaaccgtaattctcagattcgagatttaatgtttggttgtctcaaaggagaggtggacgtgtctcatcttcatggaagagatcttcttgatttgaatgtatttcttaacaagtatctcaatggtgttattcgtagggttgagatccttaaggagaacggtgagtcttcttcatctgtacctcctcctattggtgtagctcctactgttgtggatgcatctgtcccaatcggttttgatggtcgtatgattcaagatcaaaaccaaaatcagcaagagccggttcaattccaataccaggctctttatgatttttatgatcagattccaaagaaacttcatgattttaacatgaaaatgaatatagatccaaatcagagtatgaatttggatcttaatgatggagaggacgagggcattccttgcatggacaacaacaactaccaccccgaaatcgattgtctcgctaccgtcaccactgcccccactgatgtttgtgctcctaacatcatcaatgatctctag

SEQ ID NO: 2404 - DNA, 915 bp, Arabidopsis thaliana
  Clone ID: AT_F21E10.C1.o14.tg
atggggatgaagaaggtaaagctatctttgatagctaatgaaatatcaagggaaacatccttcatgaagaggaaaaatgggataatgaagaaactctacgagttgtcaactctatgtggtgtccaagcttgtactctcatctacagtccattcattccggttccagagtttctggagatgtcgccgacagcccgaacaaggaagatgatgaatcaagaaacgtatctaatggagaggattaccaaagcaaaagagcaactacagaacctggttggtgcgaaccaagagttacaggttagacgatttatgtttgattgtgttgaaggcaaaatgtcgcagtatcgttatgatgcaaaagaccttcaagatttgttatcttgtataaatctatatctcgatcagcttaacggaaggatcgagatccttaaagaacacggtgactcgttgccttccgtctctccttttcctactagaattggtgttgaagaaactggtgatgagtcgtcttccgactctcctattcttgctacaactggggttgtagatactcctaatgctacaaatcctcgtgttcttgtggccgatacgactcattttcttgatgcgaatgcaactgcgaatatgaatcaggttcaataccaggctcctcctaatgatatgtttaatcagattcaacgagagttctacaacattaatttgaatcagaaatcaaatcagtatatgaatcaacaacaaccattcatgaatccgatggtggaacaacatatgagtcatgttggagggcgtgagagcattcctttcatggacggaaactactacaactacaatcaactaccagtcgttgatcatggttccacaagttacatgccttccaccaccggtgtttatgatccttacttcaacaataatctctaa

SEQ ID NO: 2405 - DNA, 1161 bp, Arabidopsis thaliana
  Clone ID: AT_MVE11.C1.o1.tg
atggcttcttcttcgtcctcttctctttcgttttcaacatcgaagaagaacaaaacctttttcaagaaacctaattctgctttttcttcttcgagggccacaagtttgatcaaaagacaacagactgtctttaagaaagctaaagagctttcaattctctgtgacatcgatgtctgcgtcatctgttacggatcaaacggagagcttaagacatggcctgaagagagagagaaggtcaaagccatagctcgaaggtacggtgaattaagcgagacgaagcgtcgcaaaggaagcgttgatcttcacgagttcctcgagaagatgaacaaggatgatcccgagaaggaggagaagaagaagattaaagtgagacgtgtacccaaagtcaagtatccagtttgggaccctaggtttgacaattactctgtggagcaactcatgggactggttcagtccttggaacgaaacctaaccaggatccaacataggacttgcgctgttgttgaagctcaggggcagaggagggtacagtacacgaacatggctaatcaagaactgatgatggctaatacgatgaatcaacttcaacaacactcaaaccaggtttccatgtatctgtggaaccatggaaacggtgctttctcacaaatcccagtctcagcattggcttcaaaccaaacgcaatctctagctccgattccgcctgaactgatgatttacccgaattcggatgcgggaaattactcggggtctctcggggtacaaggaactgggatcaatgggcttcagaacatgaacatgttaacctataacaacatcaacagcgttaatgatttctcaaaacagtttgaccagaattccagagcggaaagttactctagcttacttggggtacacgaagacggaaacaatgagtttgagaaccctaacatgtccagccgcaacaacttcaatgttcaagactgtgcagggttacttgggatgcaaggagctggaactaacgggttgcagagcatgaacatgcatgactacagtaacaacaacagcattaactctaatggtctttcgcatcagtatgttcaatttccaacgtacaacagccaacatcaggaccgggttttcaatttggatcaaaacggaaacaatactaggtctctctaa

SEQ ID NO: 2406 - DNA, 1008 bp, Arabidopsis thaliana
  Clone ID: AT_F2E2.C1.o14.tg
atgggtcgggtgaaattagaaatcaagagaatagagaacacaacgaatcgacaagttacgttttcaaaacgtagaaatggtttgattaagaaagcttatgaattgtcgattctttgtgatatcgacattgctcttatcatgttctctccttctgatcgccttagccttttctccggaaaaactcggattgaagacgttttttcaagattcatcaatcttcctaaacaagaacgagagagtgctctatactttcctgaccagaatagacgcccagatattcaaaacaaagagtgtctactaaggattctgcagcaactcaagactgaaaatgacatcgctcttcaagtcacgaaccctgcagctatcaactctgacgtcgaggaacttgagcatgaagtttgtaggttacaacaacaactccaaatggcagaagaagaactaaggagatacgaaccggatccaataagattcacgaccatggaggaatacgaagtttctgagaagcaacttctcgacactctaacacatgttgtccaacggcgagaccatctcatgagcaaccatttatcttcgtatgaagcatctactatgcaaccaaacattggtggtccttttgtaaatgacgtcgttgaaggttggctacctgaaaatgggaccaatcaaacccatttgtttgatgcatcggcccattctaaccaactcagagaattatcatcggcaatgtatgaaccattgttgcaaggaagtagctcaagctcgaaccaaaacaacatgagtgaatgccacgtgacgaaccacaatggtgaaatgttccctgagtgggctcaggcgtattcatcctcggccttattcgcttctatgcagcaacagcatgaaggtgtgggtcccagtatagaagagatgatgccagctcagcagagtgatattccgggagtgacggcggagacacaagttgatcatgaagtctccgactatgaaacaaaggttcctcaactcagtagccaataa

SEQ ID NO: 2407 - DNA, 555 bp, Arabidopsis thaliana
  Clone ID: AT_T2E6.C1.o17.tg
atgggtcgtagaaaaatagagataaaatttattgaagatagcatcgaaaggaaagcgacgttttcaagacgccgaaatggcatttttaagaaggctgatgaactcgcgaagttgtgtaatgtagagattgctgtcttggtcatctcccccactaatataccatacacatacggttatccatgcttcaacgatgtggttgagcgtattcaaaatcctagtgcttcgtccaaactcaggagtctcatgaaagaattggaacaaatcaaagagtttcaggaggatttgaggaagaaacagcaaagaaaccttgaaaagtccaatatgaaagagaatgtagatctgaaattggaggacttagttgctttcaaggcgaaactcgaggcctatcaagcaggtttaaagaggaaacatgtagagatggaggatttgtcttctccatcgatactctcaaagaatacaaagaataagatgatgaggaccgagtattcgtctggacagagcaaaggaatgtatgagtttcgggctttcggcccaggatttcttggaactatttag

SEQ ID NO: 2408 - DNA, 576 bp, Arabidopsis thaliana
  Clone ID: AT_T7P1.C1.o6.tg
atgggaggcacaaaaagaaagatagagatgaagagaatcgaagataagaacgtgagagcagttgctttcacaaaacgcaaaagcggactcttccacaaagcttcagagctctgtctcctctctccggggactcaaatcgcaatcttagcaactcctctttcttcccactcccatgcttctttctactctttcggtcattcctctgtcgatcacgttgtctcctctctccttcacaatcagcatccatctcttcccacaaaccaagataacagatcagggttagggttttggtgggaagaccaagcctttgacagattggagaacgtcgacgagttgaaagaggcagtcgatgcggtttcgaggatgttgaacaatgtgaggctacgattagatgatgccgtgaagagcaatcaaagagatggaagtttagtgattcatcaggaggatgaggaggttcttcagcttggctacaaagacacaaatcaaattaccaaactcgaaggtgaaacttccgcttctgcaagtttgttaaagaacgtagtggataatctacacattgatgatcgttattactga

SEQ ID NO: 2409 - DNA, 366 bp, Arabidopsis thaliana
  Clone ID: AT_F2P16.C1.o130.tg
atgtttaagaaagccctcgagctttcaactctgtgcgatatcgaagtctgtgtcatactttatagtcgtgacggagaactcatcaagacatggccggaggatcaatccaaggttcgagacatggcagagaggtttagcaaactacacgagagagagcgacgcaagaaaagaaccaacctttctctgtttctacgtaagaagatcctcgacaacagtaagctctcggagaaagtcttagagatgaaggattcattagaaagtggtctacgggtactacaagataagcttctgttactacaacccgagaaaaaccagaccgagttaggtcagatccccgtcatcaacaatggacagaaccattggtga

SEQ ID NO: 2410 - DNA, 744 bp, Arabidopsis thaliana
  Clone ID: AT_F22L4.C1.o5.tg
atggcgagaaagaatcttggtcgtagaaaaatagagttggtaaaaatgaccaacgaatcaaaccttcaagttacgttttcaaaaagaagatctggtcttttcaaaaaaggcagtgaactttgcaccttatgtgacgcggaaattgcgataatcgtgttttcaccctcgggaaaagcatactcttttggtcatccaaatgttaacaagttacttgaccactctttagggcgtgttataagacacaacaacacaaactttgctgaaagccgcacaaagctccgtattcaaatgctcaatgagtctttaactgaggtgatggctgaaaaagaaaaagaacaagagaccaagcagtcaatagtccaaaatgaaagagagaacaaggacgctgagaagtggtggaggaactctccaacagaactcaacttagctcaatcaacttccatgaaatgtgatcttgaagctttgaagaaggaagttgatgaaaaagtcgctcaacttcatcatagaaacctaaacttctatgttggaagttctagcaatgttgctgctccagcagctgttagtggtggtaatatctccacaaaccatggtttctttgatcaaaacggaaactctacttctgctccaacactgccgtttggatttaatgttatgaatcgcacaccagctgggtacaacagttaccaactccaaaaccaggaggttaaacaagtccatcctcagtattgggctcgttactattag

SEQ ID NO: 2411 - DNA, 750 bp, Arabidopsis thaliana
  Clone ID: AT_F10A16.C1.o16.tg
atgacgaggaagaagctaaacctatcttacatcaccaatgagtcaatgagaaaagcaacattcaataagagaaagaaagggcttgtgaaaaaaatccacgagctttccgttctctgcggaatcgaagcatgtgcagtgatttatagtccgttcaactcaaaccctgaagtctggccatcgaattcagaagttaaaaatgtaatggaaaattttgagatgttgacaaagttggagcaagagaagaaaatggtgagccacgaaggttttatcagacaaaacatctcaaaaactatggagagtaacaacaaaaagatgatcgataatgcggagaggacgatgaaagaagccatgttccaacttcttagtggaaaaggggagaagcttaatttgactgatagaaaccgtgaagatttgtgtaagtacattgatcaatatcttaaagaactttatcaccacaaaaacaaaaccataaatcaatcacatattgaacctggagaatcttcgggagctacaaatgccatgacaccaacatctgttgttgaaaatccaaattttaatcatcttagtcataatcaatatcaatatcaacaacagtttggatatccgattttggttcaagatggaatttacaatccgagtcaaattcagaatcaacatgaggaatggctggatgatcatatgatgaatcattctaaggaaataagtcatcctttgatggatgataacaacttttactaccaacaaccctag

SEQ ID NO: 2412 - DNA, 966 bp, Arabidopsis thaliana
  Clone ID: AT_K15N18.C1.o16.tg
atgacaagaaagaaagtgaaacttgcttacatttccaacgattcttcaagaaaagcgactttcaaaaaaagaaagaagggtttgatgaagaaggtacacgaactctcgactctttgtggcatcactgcatgtgcgatcatctacagcccgtatgataccaaccctgaagtgtggccatcaaattccggtgtgcaaagggtggtttcagaatttaggacactcccagagatggatcaacacaaaaagatggtagatcaagagggttttctcaaacaaagaatcgcgaaagcgacagaaactttgaggagacaaagaaaggatagtagggagctagagatgactgaagtcatgttccaatgtttgattggaaacatggagatgtttcatttgaatattgtggatcttaatgatttgggttatatgattgagcaatatcttaaagatgttaatcgcaggattgagattttacgaaattctggtacggagattggtgaatcttcttctgttgcggtagctgcttctgaagggaatataccaatgccgaatttggtcgctacaacagctcccaccactacaatttatgaggtgggttcttcttcctcatttgcggctgtcgcgaattttgttaatcctattgatcttcaacaatttcgtcatccggcggctcaacatgttggacttaatgagcaacctcaaaatctaaatctgaatttaaatcagaactataatcaaaatcaagaatggtttatggaaatgatgaaccatcctgagcaaatgaggtatcagacagagcaaatgggatatcaattcatggatgataaccaccacaaccacatccatcaccagccacaggagcaccaacatcagatccatgacgaatcttccaacgctcttgatgccgccaactcaagcagcatcatccctgttactagttcaagtattaccaataaaacatggttccattag

SEQ ID NO: 2413 - DNA, 486 bp, Arabidopsis thaliana
  Clone ID: AT_T22H22.C1.o17.tg
atgaagacagattggtcacattatctaagcgtcgaaatggaatctacaataagcaatgagctttccattctctgtggtgctgaagttgcgtttctcggatactcttgctcaggaaaaccatacacattcggcagtccgtcttttcaagccgtggcagagcgatttctcaatcgtgaggcctcatcatcgttgcaacgatcggtcatgaatgctcaccaacaagcgaagattcaagagctttgcaaagtatacaatagaatggtggaggaggcaaagacggaagaagccaaagtaaagaaggcagctgcattagcggagacaatgcccgtagatgaggatgcgtggtggaaagtggatccaaaggaggtggaagatcacgaagaggcgaagaagataatggaaaagtgtgaagggctctatgagaaactgtgtaatgaagctgctgcaaggatccaaagaggagatgctgagaataataacaaatga

SEQ ID NO: 2414 - DNA, 825 bp, Arabidopsis thaliana
  Clone ID: AT_T8F5.C1.o8.tg
atgaagttatcgttaatagaaaacagtgtatcgaggaaaacaacattcaccaaaaggaagaaagggatgacgaagaaactaaccgagctagtcactctatgtggtgttgaagcatgtgcggtcgtctatagtccgttcaactcgatcccggaggcttggccgtcaagggaaggcgttgaagacgtggtgtcgaaatttatggagttgtcggtgttggaccggaccaagaagatggtggatcaagagacttttataagtcaaaggatcgccaaagaaaaagagcagctgcagaagctacgtgatgagaaccataattctcagattcgggagttaatgtttggttgtctcaaaggggagacgaatgtgtataatcttgatggaagggatcttcaagatttgagtttatatattgataagtatcttaatggtcttactcgcaggattgagatccttattgagaacggtgagtcttcttcatctttacctcttcctattgttgcgaatgcagctgcaccagtcggatttgatggtcctatgtttcaatatcataatcaaaatcagcaaaagccggttcaattccaatatcaggctctttatgatttttatgatcagattccaaagaaaattcatggttttaatatgaatatgaataaggattcgaatcaaagtatggttttggatttgaatcaaaatcttaatgatggagaggacgagggcattccttgcatggacaacaacaactaccaccccgaaatcgattgtctcgctaccgtcaccactgcccccactgatgtttgtgctcctaacatcaccaatgatctctag

SEQ ID NO: 2415 - DNA, 1215 bp, Arabidopsis thaliana
  Clone ID: AT_F6A14.C1.o14.tg
atgggaagggttaagttgaagattaaaagacttgagagcacaagcaacaggcaagttacatacacgaagagaaaaaatgggattttgaagaaagccaaagagttatcgattttgtgtgatattgatattgtccttcttatgttttcccctaccggaagagctactgctttccatggagaacacaggtataattatcaaaatcattcttatgcattgaagaaaacttttaagaaactggatcatgatgtaaatatacatgactttttaggagcaaggaatcaaactattgaggtatggatcgaccatcttcggttcatgaattttcttggatactttttaatctctttgagtcaaattgctaaagtctgtgttaacattaccacacgacagggtctaagtaaccaagtagccatttaccaagctcagctaatggagtgtcataggaggttgagttgttggacgaacatcgatagaatagaaaacactgagcacctcgatttattggaagaatcattgaggaaatccattgaaagaatccagattcacaaggaacattacagaaagaaccaactcttgccaatagaatgtgcaacaacacagtttcacagcgggatacagttgcctatggcgatgggaggtaatagtagtatgcaagaagctcactccatgtcttggcttcctgataatgatcaccagcaaacaatcttacctggtgattccagttttcttccccatagagagatggatggttcgattcccgtttactcaagctgcttctttgagtctacgaaaccagaagatcagatatgcagcaacccgggacaacagtttgagcagttagaacaacaaggaaacggttgtttggggttacaacaacttggagaggaatattcatatcctacaccgtttggtactactttgggaatggaagaagatcaagagaaaaagataaaatctgaaatggaattgaacaacttgcaacaacagcaacagcaacaacaacaacaacaacaacaagatccttcaatgtatgatcccatggctaataataatggtggctgctttcagattcctcatgatcagtccatgtttgtcaatgatcatcatcatcatcatcaccaccatcatcaaaattgggttccagattcaatgtttggtcagacttcttacaaccaggtttgtgtgttcacacctccattggaactatctaggtag

SEQ ID NO: 2416 - DNA, 885 bp, Arabidopsis thaliana
  Clone ID: AT_k19m22.C1.o90.tg
atggttccgaaagtggtcgacctacaaaggatagcgaacgataagacaaggataacaacttacaagaagaggaaagctagtctttacaagaaggcacaagagttctcaactctctgcggcgtcgagacatgtctcatcgtctacggtcccacgaaggctaccgatgtggtgatttccgagccagagatatggccgaaggacgagaccaaagtcagggccatcatacgcaagtacaaagacacagtgtcgaccagctgcaggaaagaaaccaacgtggagactttcgtcaacgatgtagggaaaggaaacgaggtggtgactaaaaagagagtgaagcgtgagaataagtattctagttgggaggagaagctagacaagtgttcacgagagcaactacatgggattttctgtgccgtggatagcaagttaaatgaagctgtaacgagacaggagcgtagtatgtttagggttaatcatcaagccatggacacaccattcccgcagaatttaatggaccaacaattcatgccacagtattttcatgagcagccacagtttcaaggcttccctaataatttcaataatatgggtttctcgttgatttcacctcatgatggtcagattcaaatggacccaaatctcatggagaagtggaccgacttggctttgactcaaagcttgatgatgtcaaagggaaacgatggtactcaattcatgcagaggcaagaacaaccatactataatcgtgaacaggttgtatcgaggtctgcaggtttcaatgttaacccgtttatgggatatcaagtcccgtttaatattcctaattggagattatcgggaaatcaagttgaaaattgggagctttcagggaagaaaacgatatga

SEQ ID NO: 2417 - DNA, 375 bp, Arabidopsis thaliana
  Clone ID: AT_F28K19.C1.o16.tg
atgggtcgggttaaattggagttaaagcgtatagagaagagcacgaaccgacaaattacgttctcaaaacgtaaaaaaggtttaataaaaaaggcttatgaattgtcaacactttgtgacatcgatcttgccctcctcatgttctctccctctgatcgactatgtctcttttccggtcaaacaaggatcgaggacgttttggcgaggtacatcaatcttcctgatcaagaaagagaaaacgccatagttttccctgatcagagcaagcgccaaggtatccaaaacaaagagtatttgttaaggactttggaaaaactcaaaattgaggatgacatggctctccaaatcaacgaacctcggtttattcctcattaa

SEQ ID NO: 2418 - DNA, 558 bp, Arabidopsis thaliana
  Clone ID: AT_F3M18.C1.o11.tg
atgaatcccaagaaaaccaaaggaaaacaaaagattaacatcaagaaaattgaaaaagacgaagacagatcggtcacattgtctaagcgtctaaatgctatctacactatgatcattgagctttccattctctgtggtgttgaagttgcgtttatcgggtattcttgctctggaaaaccatacacattcggcagtccgtccttccaagccgtggtggagcggtttctcaacggcgaggcctcgtcgtcttcttcatcatcgttgcaacgatcggtcaagaatgctcacaagcaagcgaagattcaagagctttgcaaaagatacaatagattggtggaggagttaaaggtggacgaagtcaaagtcaagaaggcagctgcattggcggagacgagggccgtgaataaggatgcgtggtggaaagcagatccaaatgacgtgaaggatcacgaaaaggcgaagaagatgatggagaagtatcaagagctcaaagagaaactgcgtgaggaagttgctttaaggatcaagagaggacatgatgagaataataacaaatga

SEQ ID NO: 2419 - DNA, 1395 bp, Arabidopsis thaliana
  Clone ID: AT_F27M3.C1.o16.tg
atgaggacgaagactaagttagtactcatacctgatagacactttcggagagccacattcaggaagaggaatgcagggataaggaagaaactccacgagctgacaactctctgtgacatcaaagcatgtgcggtaatctacagtccgttcgagaatccaacggtgtggccgtcaaccgaaggtgttcaagaggtgatttcggagttcatggagaagccggcgacagaacggtccaagacgatgatgagtcatgagactttcttgcgggaccaaatcaccaaagaacaaaacaaactagagagtctacgtcgtgaaaaccgagaaactcagcttaagcattttatgtttgattgcgttggaggcaagatgagtgagcaacagtatggtgcaagggaccttcaagatttaagtctttttactgatcaatatcttaatcagcttaatgccaggaagaagttccttacagaatatggtgagtcttcttcttctgttcctcctctgtttgatgttgcgggtgccaatcctcctgttgttgcagatcaagctgcggtaactgttcctcctttgtttgctgttgcgggtgccaatcttcctgttgttgctgatcaagctgcggtaactgttcctcctctgtttgctgttgcgggtgccaatcttcctgttgttgcagatcaagctgcggttaatgttcctactggatttcataacatgaatgtgaaccagaatcagtatgagccggttcagccctatgtccctactggttttagtgatcatattcaatatcagaatatgaacttcaatcaaaaccaacaagagccggttcattaccaggctcttgctgttgcgggtgccggtcttcctatgactcagaatcagtatgagcccgttcactaccagagtcttgctgtcgcgggtggcggtcttcctatgagtcagttgcagtatgagccggttcagccttatatccctactgtttttagtgataatgttcaatatcagcatatgaatttgtatcaaaatcaacaagagccggttcactaccaagctcttggtgttgcaggtgccggtcttcctatgaatcagaatcagtatgagccggttcagccctatgtccctactggttttagtgatcattttcagtttgagaatatgaatttgaatcaaaatcaacaggagccggttcaataccaagctcctgttgattttaatcatcagattcaacaaggaaactatgatatgaatttgaaccagaatatgaagcatgcacacatccctttcatggacggaaactactacaactaccaccagccaccaaccgttggtcttacttccaccggtcacatgccttccaccaccaccaccaccaccaacaacaacaacaacaacaatgtgtga

SEQ ID NO: 2420 - DNA, 858 bp, Arabidopsis thaliana
  Clone ID: AT_K6M13.C1.o3.tg
atgagattcgttccttatttatacgagattgagagattatggctttcacttgtcaattatctttctccacgcaaaaacaaaaaccgtcgctgtggtgaaatagataaaatcagaatggtgaaaaaaggaggtacgaagaggaagattgcgattgagacgatacagaagagcgattaccttagggttacttgcaccaaacgtcgtgaaggtctctttagcaaagcttctcagctttgtcttctctccgatgcacagatcgctatcttagcgactcctcctacttctgaatccaacatctccttctactctttcggtcactcctccgttgatgccgttgtctcttctttcctctccgggcaacgttgtgttcctcttcaggaggataccaaagagatgagagaggacgttgctatttgcttgtctcgtacaaatctagggttagggttttggtggaacaacgagagcctcaacaaatcggagaatcctcaagagattagtgacgctatcaactctatgttaacgctcttgagtaatctcaaggaattgagtggggaggaagctttagttaacgatcacaaggacttgaagaagaatgagaggagcgatgttgttttacaacacggaactcaatatgaaaccctaaatcctaactccaacactactacaatttgttgcgtccctgatgaattacctgccaattccaacgagattgttggaatctcaccaaatcctttgattatgctagaaaagaagaaatcacaaattgaagaaaagtttgagaaggaatggcaagtttcagttactcgaattgaaaatgaagccacgagttcttatgcaaaacgaagaagaagtatatga

SEQ ID NO: 2421 - DNA, 1305 bp, Arabidopsis thaliana
  Clone ID: AT_K24M9.C1.o4.tg
atgaacaacaacattttcagtactactaccaccatcaatgacgactacatgttattcccttataatgaccattattcctcacaaccattgctcccttttagcccttcttcttccattaacgacatcttgattcactccacctctaacacatcaaacaatcatcttgaccatcatcatcaattccaacaaccttctcctttttctcacttcgaatttgccccggactgcgccctcctcacctctttccacccagaaaacaatggccatgatgataaccaaaccatcccaaacgacaatcatcatccatcacttcactttcccttgaacaacaccattgtagaacaacccactgagccctcggaaactataaaccttatagaagattcccagagaatctcaacttctcaagacccaaaaatgaaaaaagccaagaaacccagcagaacggacaggcacagcaagatcaaaacggccaaagggacacgagatcgtaggatgagactctcgctagatgtcgccaaagagttgtttggcttacaagacatgcttggatttgacaaagccagcaaaaccgttgaatggttgcttacacaagcaaaacctgagatcataaagatcgcgacaaccctttctcaccatggctgcttcagcagcggcgatgagtctcatatccgaccggtgttaggatccatggacacatcttctgatctatgtgaacttgcatccatgtggacggtcgacgatagaggcagcaatactaacacgaccgaaacaagaggaaacaaggtcgatgggagatcgatgagagggaagagaaagaggccagaaccgcgaacgcccattttaaagaagttgtccaaggaggagagagcgaaagctagagaaagagcaaagggtagaacaatggagaaaatgatgatgaagatgaaaggaagatcacaattagtgaaagttgtggaagaagacgctcatgatcatggtgagataataaagaataataatagaagccaagtgaatcggagttcttttgagatgacacactgcgaagacaagatcgaagaactttgcaagaacgatcgttttgcagtttgcaacgaatttatcatgaataagaaagatcacatttcaaatgaatcttatgacttagtcaactacaaaccgaactcatcattcccagtgattaaccaccatcgcagccaaggagcagctaattccattgaggtaccttatttatatctacgagtcacatttataatttttatgagtttttttccaatggttttatctaaagctatacacagttaa

SEQ ID NO: 2422 - DNA, 567 bp, Arabidopsis thaliana
  Clone ID: AT_T1J8.C1.o18.tg
atgatttttcagaatgtgtgcagaaatgagtccaacttcaacgctatagcttccgaatcgcgttcccaaacgcagttcggtgtttcgaaatcctcctcgagcggcggcggatgtatctccgccaggactaaagaccgtcacacgaaggttaacggacgaagccgtcgagttacgatgccggctctcgccgccgctaggattttccagttaacgcgtgagctcggtcacaaaactgaaggagaaaccatcgaatggcttcttagtcaagctgaaccgtcgattattgccgccactggctacgggactaagctcatttcgaattgggttgatgttgcggcggacgattcctcgtcgtcgtcgtcgatgacgtcgccgcaaacgcaaacgcaaacgccacaatcgccgagttgtaggttggatctttgtcagccaatcggaattcagtatccggtgaatggttacagtcatatgccgttcacagcgatgcttttagagccgatgaccacgacggcggaatctgaggttgagatcgcggaggaggaggaacgtagacgccgtcaccattag

SEQ ID NO: 2423 - DNA, 1026 bp, Arabidopsis thaliana
  Clone ID: AT_F15O4.C1.o35.tg
atggagtcccacaacaacaaccagagcaacaacaacaccactggttcggcccatctggtcccatccatgggaccaatctccggttcagtctcattaaccaccactgctccaaactccactaccaccaccgtcaccgccgctaaaacacccgcaaaacgaccgtccaaggaccgtcacatcaaagtagacggacgtggccggaggatacgtatgccggctatctgcgcagcacgtgtcttccaactaacacgtgagttacaacacaaatcggacggcgagactatagagtggctgctccaacaagcggagccagctatcatcgcagccaccggaactggaaccataccggcgaatatctctactttgaacatctctcttcgaagcagtggctctactctttcagctccactgtctaaatctttccacatgggaagagcggctcaaaacgctgccgtttttgggttccagcaacagctttatcatcctcatcatatcacgacagattcttcttcttcttctcttcccaaaacattccgtgaagaagatctttttaaagatcctaattttctagatcaagaacccggttcaagatcacctaaaccgggatccgaagctcctgatcaagatccgggttcgacccggtcaagaacacaaaatatgataccgccgatgtgggcactagcgccaacgccagcctccacaaacggaggtagtgctttttggatgttaccagtcggaggaggaggaggtccggctaacgttcaggatccatcacagcacatgtgggcgtttaatccgggtcattacccgggtcgaatcgggtcggttcagctagggtctatgttagtgggaggtcaacagttagggttaggtgttgcagaaaataacaatttggggctattttccggcggaggaggagacggtggtcgggttggtctcggaatgagtcttgagcaaaagcctcaacatcaagtgagtgatcatgctactagagaccaaaatcctactatagatggttctccttga

SEQ ID NO: 2424 - DNA, 1434 bp, Arabidopsis thaliana
  Clone ID: AT_F1P2.C1.o170.tg
atggacggtggagacagcgtcggaggaggaggaggagatgatcaccaccgtcacctccaccatcaccaccgccctactttcccttttcaactactcggaaaacacgaccccgacgacaaccatcaacaacaaccttccccttcctcctcctcctctctattttctctccatcaacaccaacaattatctcaatcgcaacctcaatcgcaatcgcaaaagtcacaaccgcagacaacgcaaaaagagttattacaaacgcaagaggaatctgcggtggtggcagctaaaaagccaccgttgaaacgagcgtcgacgaaagaccgacacacgaaagtagacggaagagggaggagaataaggatgccggcgttatgtgcagctagggtttttcagctaacgcgagagctaggtcataaatccgacggtgagacaatagagtggcttcttcaacaagctgaaccatctgtaatcgccgccaccggaaccggaacaatcccggcgaatttcacttctttaaacatctctctccgttcttcaggctcttccatgtctcttccttctcatttccgctccgccgcttccacttttagccctaataacatattttctccggcgatgcttcaacaacaacaacaacaacaacgtggtggtggtgttgggtttcatcatccccatctacagggacgtgcacctacgtcgtctttgtttcctggtattgataacttcacaccaacgacgtcgtttttgaactttcataatccaacaaagcaagaaggagatcaagattctgaagagttaaactcggagaagaaaagaagaatccaaacgacgtcggatttgcatcaacaacaacaacaacaccaacatgatcaaatcggaggatatacacttcaatctagcaacagtggatctacagccaccgcagccgccgcgcaacaaataccgggaaatttctggatggttgcggcggctgcggctgcaggtggtggtggtggtaataacaaccaaacaggtggtcttatgacagcttctattggtactggtggcggcggtggagagcctgtttggacgtttccttccattaacacggcagcggcagcgttatatagaagtggcgtttcgggcgttccaagcggcgcggtttctagcggtttacattttatgaatttcgcagcgccaatggcatttcttactggacaacaacagctagcaacaactagtaatcatgagattaatgaagatagtaataataatgaaggaggaagaagtgacggtggtggtgatcatcataatacacagagacatcatcatcatcaacaacaacatcatcataatattctctccggcttgaaccagtacggacggcaagtttccggcgactctcaagctagtggatcacttggaggtggtgatgaggaggatcagcaagattag

SEQ ID NO: 2425 - DNA, 1083 bp, Arabidopsis thaliana
  Clone ID: AT_MSL3.C1.o90.tg
atgagatcaggagaatgtgatgaagaggagattcaagcaaagcaagaaagagatcaaaatcaaaatcatcaagtaaacttaaaccacatgttgcaacaacaacagccgagttcggtatcatcttcaaggcaatggacttcagcttttaggaatccaagaatcgttcgagtctcaagaacattcggtggcaaagacagacacagcaaagtatgtacagtccgtggtcttcgagaccggaggataaggttgtccgtacctacagctattcaactctacgaccttcaagatcgattagggctgagtcagccaagcaaagtcattgattggttactcgaagcagcaaaagatgacgtagacaagctacctcctctacaattcccacatggatttaaccagatgtatccaaatctcatcttcggaaactccgggtttggagaatctccatcttcaactacatcaacaacgtttccaggaaccaatctcgggttcttggaaaattgggatcttggtggttcttcaagaacaagagcaagattaaccgatacaactacgacccaaagagaaagttttgatcttgataaaggaaaatggatcaaaaacgacgagaatagtaatcaagatcatcaagggtttaacaccaatcatcaacaacaatttcctctgaccaatccgtacaacaacacttcagcttattacaaccttggacatcttcaacaatcgttagaccaatctggtaataacgttactgtcgcaatatctaatgttgctgctaataataacaataatctcaatttgcatcctccttcctcgtctgccggagatggatctcagctttttttcggtcctactcctccggcaatgagctctctattcccgacatacccttcgtttcttggagcttctcatcatcatcatgtcgtcgatggagccggtcatcttcagctctttagctcgaattcaaataccgcatcgcagcaacacatgatgccgggtaatacgagtttgattagaccatttcatcatttgatgagctcgaatcatgatacggatcatcatagtagcgataatgaatcagattcttga

SEQ ID NO: 2426 - DNA, 978 bp, Arabidopsis thaliana
  Clone ID: AT_T6C23.C1.o11.tg
atggatccggatccggatcataaccatcgacccaacttccctctccagcttcttgattcttctacctcctcctcttccacttccttagccatcatctctactacttccgaacctaactccgaacctaagaagcctcctcctaaacgaacctctactaaagaccgacacaccaaagtcgaaggccgaggccgtcggatccgtatgcctgccatgtgtgctgcacgtgtctttcagctcacacgtgagcttggtcacaaatccgacggtgaaactattgagtggctactccaacaagcagaaccagcggttatagccgctacagggactggaaccattccggctaacttcacttctttaaacatctcacttcgtagctcaagatcttctctctctgctgctcatcttcgtacaactcctagtagctattactttcattcaccacatcagtccatgactcatcatcttcaacatcagcatcaggttcgtcccaagaacgagtcacattcttcgtcttcttcttcttcacagcttttagatcacaaccaaatgggtaactatctagtacaatcaactgctggatctttacctacgagtcagagtcctgcaacggcaccgttttggagtagtggtgacaacacacagaatctttgggcttttaatattaatcctcatcattccggtgttgtcgccggagatgtttacaaccccaacagtggtggtagtggcggcggtagtggagttcatttgatgaattttgcagctcctattgctttgttttctggacagcctttggcttctggttatggaggaggaggaggtggcggtggagaacatagccattatggagttttagcggcgttgaatgctgcttaccgaccggtggcggagacggggaaccataacaacaaccagcaaaaccgtgacggagatcatcatcacaaccatcaagaagatggaagcaccagtcatcattcctag

SEQ ID NO: 2427 - DNA, 1080 bp, Arabidopsis thaliana
  Clone ID: AT_F1N21.C1.o8.tg
atgtcgtcttccaccaatgactacaacgatggtaataacaatggagtgtaccctctctctctttacctttcttcactctctggccatcaagacatcattcataatccctacaaccatcagttaaaagcatctccgggccatatggtatcagcagttcctgaatctctgatcgattacatggcgtttaagtcaaataatgttgtgaatcaacaaggctttgagtttcctgaggtgtcaaaggaaatcaagaaggtggtgaagaaggaccgacatagcaagattcaaacggcacaagggattagagacaggagggttaggctttctattgggattgctcgccaattctttgatcttcaggatatgttggggtttgataaagctagtaaaacgttagactggctgctcaagaagtcaagaaaagccatcaaagaggtcgtacaagcaaaaaacctcaacaatgatgatgaagattttggaaacattggaggcgatgtagaacaagaagaggagaaggaggaggatgacaatggcgataagagcttcgtgtatggtttgagccccgggtacggtgaagaagaagtggtatgtgaggccacgaaggcagggataagaaagaagaagagtgagttgagaaacatctcatcaaaggggctaggagccaaagctagaggaaaagcaaaggagcgaacaaaagagatgatggcctatgataatccagagactgcctctgatattacacaatctgaaatcatggacccattcaagaggtctatagtcttcaatgaaggagaagatatgacacaccttttctacaaggaaccaatcgaggagtttgataatcaagaatctatcttaaccaatatgactctaccaacgaagatgggtcaaagttacaatcaaaataatgggatacttatgttggtagatcagagttctagcagcaactataatacatttctgcctcaaaatttggattatagttatgatcaaaacccttttcatgaccaaaccttatatgtagtcaccgacaaaaatttccccaaaggtaaagtttggattcaagactcttttgtaaactaa

SEQ ID NO: 2428 - DNA, 1128 bp, Arabidopsis thaliana
  Clone ID: AT_F28P5.C1.o10.tg
atgaatcagaattcctctgttgcggaggcgacgcttcagcttaattccggtgaaaaaccatcgccgggatcgattccgtttatctcctctggtcaacacggaaacataagcacttcagcgacgagttcgacaagcacaagctcaggtagtgctcttgccgtagttaaatccgccgtgaaaaaaccaactaaagatcggcatactaaagtcgatggtcgtggacggcgaattcgtatgccggcgatgtgcgccgctagagtttttcagttaacaagagagttaggtcataaatctgatggagaaaccatcgagtggcttctccaacaagctgagccagctatcatcgcttctactggtactggtacgatcccggcgaatttctcaacacttaacgcttctttacgcagtggtggtggctccaccttgttttctcaggcgtcgaaatcttcttcttcgccactctcgtttcatagcactggaatgtctctttatgaagacaataacggtactaacggatcatcggtagatccttctaggaagttactgaattcagccgcaaacgcggctgttttcggttttcatcatcagatgtatccaccaataatgtcgacggagagaaatccgaacactttagtgaaaccttatagagaagattactttaaggagccgagttctgcagcggaaccaagcgagagttctcagaaagcgagtcagtttcaggagcaagagttagctcagggtcgtgggacggctaatgtggtgcctcaacctatgtgggcggttgcgccagggactacgaatggaggtagtgcgttctggatgcttccgatgagcggttcgggtgggcgggagcagatgcagcagcagcctggtcaccaaatgtgggcgtttaatccagggaattatccagttgggacaggacgagtagtaactgcaccaatggggtcaatgatgttgggaggtcaacagctaggattaggagtggcagagggcaacatggcggctgcaatgcgtggcagtagaggcgatggtttggccatgactctagatcaacatcagcatcagctccaacatcaagagccaaaccagagtcaagctagtgaaaatggtggtgatgacaaaaagtga

SEQ ID NO: 2429 - DNA, 1086 bp, Arabidopsis thaliana
  Clone ID: AT_T16B12.C1.o12.tg
atgggacttaaaggatatagcgtcggagaaggaggaggagagatagttgaggttcaaggcggtcacataatccgagccactggacgcaaagaccgtcatagcaaagtgttcacatcaaagggtccacgtgaccggcgcgtgagactctcagctcacacggcgattcaattctacgatgtgcaagaccggttaggttatgaccggcctagcaaagccgttgattggctcatcaagaaagccaaaaccgctattgataagcttgaactcggggagactactactactactactcgtcaagaaccggtgaatactaaaccggaatctcccactttggttttccaaagagagaacaatgaccaaacgcagttcgtggcggccaatcttgatcctgaagacgcaatgaaaacgtttttcccggcgacgacaacaacaaacggtggtggtggtacaaacatcaatttccaaaactaccctcatcaggatgacaacaacatggtctcaagaacaacaacaccaccaccaaaccttagccaagatcttggtctctctcttcacccatttcaagggaacaacaacacagtcgtagttcccgagaccaacaatttcaccacgactcatttcgacacgttcgggagaatctctggatggaatcatcacgacttaactatgacgtcatcatcctcatcagaacatcaacaacaagaacaagaagaaaggagtaatggtggtttcatggtgaatcatcatcctcaccatcatcatcatcaaccgtcgatgatgacattgcttaatagtcagcaacaacaagtgtttcttggtggccaacaacaacaacaacaaaggggtacccttcagtccagtttattccctcattcgtttcgttcttgggatcatcatcaaacgacgtcggatcatcatcatcatcagaatcaagcttcttcgatgtttgcttcatcatcacagtatggttctcatgggatgatgatgatgcaaggccttagtttccccaacactacaagactactccacggagaagaagctactcaaccaaactcttcttcttctcctccaaactcacacctctaa

SEQ ID NO: 2430 - DNA, 1068 bp, Arabidopsis thaliana
  Clone ID: AT_F1C9.C1.o6.tg
atgaatatcgtctcttggaaagatgcaaacgacgaagttgcaggcggcgctacgacaagacgtgaaagagaagtaaaagaggatcaagaagaaaccgaagtcagagccaccagtggcaaaaccgtaattaaaaagcagcctacatcgatctcttcttcttcttcttcgtggatgaaatccaaggatccgaggattgttagggtttcacgcgcctttggaggcaaagaccgtcacagcaaagtgtgtacgttacgtggactacgtgacagacgcgtgagattatcagtcccaacggctattcagctctacgatcttcaagaacggctcggtgttgaccagcctagcaaagccgttgactggttgcttgatgcagctaaagaggagatcgacgagctacctccgttacctatctcgccggaaaatttcagcatcttcaaccatcatcagtccttcttgaatcttggtcaacggcccggtcaagatccgacccaactcgggtttaaaatcaatggatgtgtacaaaagtctactactactagccgcgaagaaaacgatagagagaaaggagaaaacgatgtcgtttacacaaacaatcatcatgttgggtcttatggaacttatcacaacctggaacatcatcatcatcatcaccaacatttgagtttacaggcagattatcatagtcatcaactacatagtcttgtcccatttccatcacaaattttggtatgtccaatgacgacatcaccaacaactacaactatacaatctttgtttccatcatcatcgtcagctggttcagggactatggagacattagatccgaggcaaatggtaagccattttcaaatgccattaatgggtaattcttcatcttcgtcttcccaaaacatttcgacattatattcgttgttacatggtagtagtagcaacaatggtggtagagacattgataatcggatgtcgtcggtccaattcaaccgaactaatagcactacaacggctaacatgtcgaggcatctaggctcggagcgttgtacaagtagaggaagtgatcaccatatgtga

SEQ ID NO: 2431 - DNA, 975 bp, Arabidopsis thaliana
  Clone ID: AT_F12P21.C1.o11.tg
atggaggttgacgaagacattgagttacaaaaacatcaagaacaacaaagcagaaagctacaaagattctcagaggacaacactggactaatgaggaattggaacaatccatcgtctcgtatcattagggtttcacgagcttctggtggcaaagatagacatagcaaagtgttaacatcaaaaggtttaagagatcgaagaatacgtctctcagttgctacagcaatccagttctatgatcttcaagatcgtcttggatttgatcagccaagtaaagctgttgaatggttaatcaatgcagcttctgattcaatcactgatcttcctttgcttaacacaaattttgatcatcttgatcagaatcagaatcagaccaaatctgcttgtagtagtggaacatctgagagttcgctgttgtcgttatcaagaacagagattcgtgggaaagcaagagagagagctagagaaagaacagctaaagacagagataaagatttgcagaatgctcatagctcattcactcagcttctcactggtggttttgaccaacaaccgagtaaccggaattggaccggtggttctgattgctttaacccggttcagctgcaaataccaaactcttcctctcaagagccaatgaatcacccattctcctttgtacctgattacaactttggaatctcttcttcttcttctgccattaatggtggttacagtagtagggggacccttcagtccaattcacaatctctctttctgaataacaacaacaacattactcaaaggtcatcgatttcttcgtcttcttcttcctcttctccaatggatagtcaaagcatttcctttttcatggctacacctccacctcttgaccaccataaccaccagcttccggagacttttgatggtcggctatatctttattacggcgaaggaaaccggagctctgatgacaaggcaaaggaaaggagatag

SEQ ID NO: 2432 - DNA, 882 bp, Arabidopsis thaliana
  Clone ID: AT_MJM18.C1.o6.tg
atggaatcgaatcacgaaggcaacgcgatacaagtgattgaccaagtaacaaccatgacccatctgtctgacccgaatccgaaaaccaaaccgggtatgatgctcatgaaacaagaagacgggtatttgcagccggtgaagactaaaccggctccgaagagaccgacttctaaagaccgtcacacgaaagtagaaggacgaggtcggaggatccgaatgccggcgggttgcgctgctcgggtctttcaattgacccgtgaacttggtcacaaatccgacggagaaacgatacggtggttattggaacgagctgaaccggcgataattgaagcaaccggaaccggaactgtaccggctattgctgtatcggttaacggaactttaaaaatcccgacgagctctccagtgttgaatgacggcggccgtgacggtgacggtgacctaataaagaaacggaggaagagaaactgtacgagcgatttcgtagacgttaatgacagctgtcatagctccgttacttctgggttagctccgataacggcgtcaaactacggcgttaatatcctgaacgttaatacacaggggtttgtgccgttttggcctatgggtatgggtactgcgtttgttactggtgggccggatcaaatgggccaaatgtgggctattcctaccgttgctacagctccgtttctgaatgttggtgctagaccggtgtctagttatgtctcaaacgcttcagacgctgaggcggagatggaaacgagcggtggcggaacgacgcaaccgctgagggatttttcgttggagatttatgataagagagagcttcagtttttgggtggctcagggaactcatctccgtcttcatgtcatgagacttaa

SEQ ID NO: 2433 - DNA, 498 bp, Arabidopsis thaliana
  Clone ID: AT_T14D3.C1.o90.tg
atggattcgaaaaatggaattaacaacagccaaaaggcaagaaggactccaaaagaccgccatttgaaaattggtggccgtgatcgtcgcattcggatcccgccgagtgttgctccccaactatttagattgacaaaagaactcggctttaaaaccgatggtgaaactgtcagttggctcctccagaatgccgagcctgccattttcgcagccacgggacatggtgtcaccaccacctccaatgaagatatccagccaaataggaattttcctagttacacctttaatggtgataatattagtaataacgttttcccttgtacggttgtaaatactggtcatcgtcagatggtgtttccggtttctacaatgacagatcatgcaccttcaactaattacagtactattagtgataattacaattccacctttaatggtaatgctaccgccagtgatacaacatcagcagcaacaacaacagccacaaccacagtttga

SEQ ID NO: 2434 - DNA, 753 bp, Arabidopsis thaliana
  Clone ID: AT_MKD15.C1.o14.tg
atgtctattaacaacaacaacaacaacaacaacaataacaacgatggtcttatgatctcatcaaacggagctttaatcgaacaacaaccatcagtcgttgtgaagaaaccaccggcgaaagatcgacatagcaaagtcgatggaagagggagaagaatccgtatgccgattatatgtgctgctcgtgtttttcagctaacgagagagcttggtcataagtcagatggccaaacaattgaatggttacttcgtcaagcagagccttctattatagctgcaacaggaactggtacaactccagcgagtttctcaactgcttctgtctctatccgtggagccaccaattctacttctttagatcataaacccacttctttacttggtggtacgtcaccgtttatacttgggaaacgtgttagagctgatgaggatagtaataatagtcataatcatagttctgttggtaaagatgagacctttacgacaacaccagctgggttttgggctgttccggcgaggccggattttggacaagtttggagttttgctggagctccacaagagatgtttttacaacaacaacatcatcatcagcaaccattgtttgttcatcagcaacagcaacaacaagctgcaatgggtgaagcttctgctgctagagttgggaattatcttccgggtcatcttaatttgcttgcttctttatccggtggatctcccgggtcggatcgaagagaggaagatccacgttaa

SEQ ID NO: 2435 - DNA, 732 bp, Arabidopsis thaliana
  Clone ID: AT_MEE6.C1.o10.tg
atggtcatggagcccaagaagaaccaaaatctaccaagtttcttaaacccatcacgacagaatcaggacaacgacaagaagaggaaacaaacagaggttaaaggtttcgacattgtggtcggcgaaaagaggaagaagaaggagaatgaagaggaagaccaagaaattcagattctttatgagaaggagaagaagaaaccaaacaaagatcgtcaccttaaagttgaaggaagaggtcgtagagttaggttacctccactctgtgcagcaaggatttatcaattgactaaagaattaggtcacaaatcagatggtgagactcttgaatggttgcttcaacatgctgagccatcgatactctctgctactgtaaatggtatcaaacccactgagtctgttgtttctcaacctcctctcacggctgatttgatgatttgtcatagcgttgaagaagcttcaaggactcaaatggaggcaaatgggttgtggagaaatgaaacaggacagaccattggagggtttgatctgaattacggaattgggtttgatttcaatggtgttccagagattggttttggagataatcaaacgcctggacttgaattaaggctgtctcaagttggggttttgaatccacaggtttttcaacaaatgggtaaagaacagttcagggttcttcatcatcattcacatgaagatcagcagcagagtgcagaggaaaatggttcataa

SEQ ID NO: 2436 - DNA, 1263 bp, Arabidopsis thaliana
  Clone ID: AT_K15M2.C1.o17.tg
atgtctgacgaccaattccatcacccgccgcctccttcttcaatgaggcaccgttctacgtcggatgcggcggacggcggctgcggcgagattgttgaggtgcaaggtggtcacattgttcggtctaccggaagaaaagaccgccacagcaaagtctgcacggctaaagggccacgtgaccggcgcgtgagactctctgctcacacggcgattcagttttacgatgttcaagacaggcttggtttcgaccgacctagcaaagccgttgattggcttatcaaaaaggctaagacttccattgacgagctcgctgagcttcctccctggaatcccgccgatgcaattcgcctagccgctgctaacgctaaacccagaagaaccaccgccaaaacccaaatctctccgtctccgccaccgccgcaacagcaacaacaacaacaacagcttcagttcggtgttggcttcaacggaggaggagcagagcatccgagtaacaacgagtcgagttttctcccgccgtcaatggattcagattcgatagctgacactataaagtcgttttttccggtgattggctcttcaacggaggctccttcgaatcataaccttatgcacaactatcatcatcagcatccgccggatttgctttctcgaactaatagccaaaaccaagatctccgtctctcgctgcaatcgttcccggatggtccaccgtcgcttctgcaccaccaacatcaccaccacacctctgcttccgcctccgagcctactctgttctacggacagagcaatccgttagggtttgacacatcgagttgggagcagcagtcgtcggaattcggaaggattcagagactagtggcttggaacagcggcggtggcggcggagcaaccgatacaggaaacggaggagggtttctgttcgctcctcctactccttcaacgacgtcgtttcagccagttcttggccaaagccaacagctttattctcagaggggtccccttcagtccagttacagtcccatgatccgtgcttggtttgatcctcaccatcatcaccaatccatctccaccgacgatctcaaccaccaccatcaccttcctccaccggttcaccaatcagcaatccccggaatcggattcgcctcaggtgaattctcttcgggttttcgcataccagcacggtttcagggccaagaagaggagcagcacgacggtctcactcacaagccgtcctctgcttcctctatttctcgccattga

SEQ ID NO: 2437 - DNA, 945 bp, Arabidopsis thaliana
  Clone ID: AT_MOJ10.C1.o9.tg
atggatcccaagaacctaaatcgtcaccaagtaccaaatttcttgaacccaccaccaccaccgcgaaatcagggtttggtagatgatgatgctgcttctgctgttgtttccgacgagaatcgcaaaccaacaactgagattaaagatttccagatcgtggtctctgcttccgacaaagaaccaaacaagaagagtcagaatcagaaccagcttggtcctaagagaagctctaacaaagacagacacactaaagtcgaaggtagaggtcgacgaattcggatgcctgctctttgtgctgctaggatttttcaattgactagagaattgggtcataaatctgatggtgaaactatccagtggctgcttcaacaagctgagccatcgattattgcagctactggttcaggaactataccggcctctgctttagcttcttcagctgcaacctctaaccatcatcaaggtgggtctcttactgctggtttaatgatcagtcatgacttagatggtgggtctagtagtagtggtagaccattaaattgggggattggtggcggtgaaggagtttctaggtcaagtttaccaactgggttatggccaaatgtagctgggtttggttctggtgtgccaaccactggtttaatgagtgaaggagctggttatagaattgggtttcctggttttgattttcctggtgttggtcatatgagttttgcatctattttgggtgggaatcataatcagatgcctggacttgagttaggcttgtctcaagaagggaatgttggtgttttgaatcctcagtcttttactcagatttatcaacagatgggtcaggctcaggctcaagctcaaggtagggttcttcaccatatgcatcataaccatgaagaacatcagcaagagagtggtgagaaagatgattctcaaggctcaggtcgttaa

SEQ ID NO: 2438 - DNA, 954 bp, Arabidopsis thaliana
  Clone ID: AT_F14K14.C1.o9.tg
atgtttccttctttcattactcacattcaaagccctaattctcaccatcactactcttcgccttcttttcctttctcttccgattttcttgagagttttgatgaatccttcttgataaaccaattcttgttacagcagcaagatgtagcagcaaatgttgttgaatctccttggaaattttgcaagaagcttgagcttaagaagaagaatgagaagtgtgttgatggaagcacctcacaagaggttcaatggagaaggacggtcaaaaaaagggacaggcatagtaagatctgcacggctcaaggtcctagagaccggaggatgaggctgtctcttcagattgctcgcaagtttttcgatcttcaagacatgttgggtttcgacaaggcgagcaagacgattgaatggcttttctccaaatcaaagacttccatcaaacaacttaaagaaagagtggctgcatcggaaggaggaggaaaggatgaacatctccaggttgatgaaaaggaaaaggatgagacactgaagttgagagtctcaaagagaagaacaaagactatggagagctcttttaagactaaagagtcgagagagagagctagaaagcgagcaagagagagaacaatggcaaagatgaagatgagattatttgagacctcggaaacaatttcagatcctcatcaagaaactagagagatcaagataaccaatggtgtacaattactagaaaaggaaaataaagaacaagaatggagtaatactaatgatgttcacatggtagagtatcaaatggattctgtgagcatcatagagaagtttcttggactaaccagtgactctagctcctcttccatttttggtgactccgaggaatgttacacaagtcttagttcagtaagaggtacaatttcagcagcaggtaacagcaatgtgttaactaaaaaccctaattga

SEQ ID NO: 2439 - DNA, 1137 bp, Arabidopsis thaliana
  Clone ID: AT_T6A23.C1.o24.tg
atggagagtgatttgattgatttgttcgagggagctaagaaggcagccgatgcggcggctcttgacggtgttacctcttcaggtcctgaggtttctcaatgtatcgatgcccttaaacagctcaagaagtttcctgtcacatacgataccctcgttgcgactcaggtgggaaagaagctgaggtctcttgcaaaacatcctgttgaagatatcaaaagcgtagctactgatctgcttgagatatggaagaaagttgtcattgaagagacagccaaagctaagaaaaccgaaggcactaacggttgtaaagaggctaaggtgaataagatggatgttgagaagccttcaaatcctgctcctgttaaagttcagaaacttcagaggggtgattcggctaagagtatcaaggttgagagaaaggaacctgacaataaagttgttaccggtgtcaagatagagagaaaggtacctgacatcaaagtcaccaatggaaccaagatagattatcgtggtcaggctgtgaaagatgaaaaggtctcaaaggacaaccaatcaagtatgaaagctccagctaaagcagctaatgctcctccaaaactaactgcaatgctcaaatgcaatgatcctgtgcgtgacaaaatccgtgagttgcttgtggaggcgttgtgcagggttgctggagaagctgatgactatgagagagagtcagtaaatgctagtgatcctttacgtgttgctgtctcagtggaatcactgatgtttgagaaattgggtcgctcaactggagctcagaagcttaagtacagatctataatgttcaacctgagggatagtaacaacccggacttaagaaggagggttctcactggggagatttcaccagagaaactcataacattgtctgccgaagatatggcaagtgacaagaggaaacaagagaacaaccagatcaaagagaaagccctgtttgattgtgagcgtggtcttgctgcaaaagcatctaccgaccagttcaagtgcgggcggtgtggtcagcgcaaatgcacctactatcagatgcaaacaagaagtgctgatgagccaatgacgacttatgttacatgtgttaactgtgacaaccactggaagttctgttga

SEQ ID NO: 2440 - DNA, 276 bp, Arabidopsis thaliana
  Clone ID: AT_MPE11.C1.o9.tg
atggagaaatctagagaaagcgagttcttgttctatatcatcgacaaggaaatagcttacacagtttctgctgaggatatcagaagagaactaggaatatcattgtttggtgaaaaaacgcaggcagaagctgagctaccaaagatcaaaaaggcatgcgagaaatgccagcatcctgagcttgtatacacaaccagacagacgagatcagctgatgaaggacagacaacatattacacttgccccaattgtgctcatagattcacagaaggttga

SEQ ID NO: 2441 - DNA, 321 bp, Arabidopsis thaliana
  Clone ID: AT_F6F3.C1.o9.tg
atggagttttgtccaacatgtgggaatctgttgcgatacgagggaggtggcaattcgagattcttctgttccacatgtccatacgtcgcctacatccaaagacaggtggagataaagaagaagcaacttctggttaagaaatctatagaagctgttgtgactaaagatgatatacccacagctgctgaaactgaagccccatgtccaaggtgtggccacgacaaggcatacttcaaatcaatgcagattcgttcagcagatgagccagaatcaagattttatagatgcttgaagtgcgagttcacttggcgtgaggaatga

SEQ ID NO: 2442 - DNA, 1803 bp, Arabidopsis thaliana
  Clone ID: AT_F3L24.C1.o23.tg
atggtatggtgtaaccattgcgtgaagaatgttcccggaatacgcccttatgatggtgcattggcatgtaatttatgtgggaggatattggagaatttccatttttctaccgaagttacattcgttaagaatgctgctggacagagccaagcatcaggtaacatagtgaggagtgttcaaagtgggattacaagctcacgtgaaaggagatttagaatagctagagatgagcttatgaatttgaaagatgcattggggattggtgatgagagagatgatgtgattgtcatcgcagctaaattctttgaaatggcagttgagcagaatttcacgaaaggccgcagaactgaactagtacaggcttcctgcctctacttgacgtgcagggaattgaacattgcgttgcttcttattgatttctcaagctaccttcgagttagcgtttatgagttaggttctgtatacttacaactctgtgaaatgctgtaccttgtggaaaatcggaattatgaaaagcttgttgatccttcaattttcatggatcgattctcaaacagcttattgaaaggaaaaaataataaagatgttgtggcaacagctagagacattatagctagtatgaagagagattggatacagaccggccggaagcctagtggaatatgtggagcagcactttacacagctgctctttctcatggtatcaagtgctctaagacagatattgtaaacattgtgcatatatgtgaagcaactctcaccaaacgattgattgagtttggcgatacggattctggaaatttaaatgttaatgagctcagagaaagagaatcgcataaaagatcttttaccatgaaaccaacctcaaataaagaggcggtgctctgtatgcatcaggatagtaaaccttttggttatggactatgtgaagactgctacaaagatttcataaatgtttctggtggacttgttggtgggtccaatcctcctgctttccagcgcgcagagaaagagcgaatggaaaaagcagctagagaagaaaacgagggaggaattagtagcctaaaccacgatgaacaactatatcacttgagaatctatttgggctgtgtcgcagagaaaggtgaaaaagataaagatggggctgaagaacatgctgatacttcggatgaatcagacaacttttctgacatcagtgatgatgaggtaaatggctatatcaacaacgaggaggaaacgcactataagacgatcacatggacagaaatgaacaaagattatcttgaggagcaagctgctaaggaagcagctctgaaggcggctagtgaagctttaaaagctagcaactctaattgcccagaagatgcaagaaaggctttcgaagctgccaaagctgatgcggcaaaatctagaaaggaaaagcaacaaaaaaaagctgaggaagcaaagaacgcggctcctccagccacagcagtggaggcggtacgccgaacgcttgataaaaagagacttagttcggtgatcaactacgatgttttggagtcgctatttgatacatccgcacctgagaaatcacccaagaggtcgaaaacagagacagacattgagaagaagaaggaagagaacaaggaaatgaagagtaatgaacatgagaatggtgaaaatgaagatgaagatgaagaggatgaagaagaaggcaatgtagaatcatacgacatgaagacagattttcaaaacggcgagaaattctatgaagaggacgaggaagaagaagaggatggtaatgattttggattgtattga

SEQ ID NO: 2443 - DNA, 3966 bp, Arabidopsis thaliana
  Clone ID: AT_F26G16.C1.o9.tg
atggatagcggcgacattgaagaagccggcgggaatggcgaagaggaattccggtcaggaccacgtctcggcggtagcaaatacagaccggtggtggcgcacgatagagcggttgttgagatgtcctccatcgatcctggatcttcctcttccaccctcaagaacataaaagtagttgcaccaggagacgtgggcgctggtgtaaggggaccagaagatggagtcaatggccatcagaaggaatccaagctggaattatttggtttcgactctcttgtgaatattcttggcttgaagagtatgacgggggagcaaattcaggcaccatctagccctagagatggggaagatatctccatcacgcaagggcacccaaagcctcctgctctcaagatgggtacaatgatgggagttttcgttccctgcttgcaaaacatattaggaattatatattatatccgtttcacatggattgttggcatggctggtatcggacaaggcctagtattggtatttctttgtggcttatgtacattcttgacgacaatatctttgagtgctattgcaacaaatggtgcaatgaagggtggaggaccatattacctcattggtcgcgctcttggtccggaagttgggattagcataggtttatgcttttttcttggcaatgcagttgctggagctctgtatgttttgggtgctgtggagacttttctaaaagcattccctgctgctgggatttttagagaaactatcacaaaggttaacggaacagcagtttccgaatcaatacaaagcccgaactcacatgacttgcaggtttatggaattgttgtgacgatccttctttgcttcattgtgtttggtggcgtgaagatgatcaatcgggttgcacctgctttcctcgtacccgttttgctctctatcttctgcatattcatcgggatatttttggcaaagacagatgatcctgacaatggaattacgggcttgcgcttaaaaagctttaaagacaactggggttctgcttatcaaatgacaaatgatgcgggaattcctgatccaactggagggacgtactggagtttcaatgagctggtgggtctattttttcctgctgtaacaggaattatggctggttcaaatcgatcagcttcacttaaagatacacaaaaatcaattcctgttggtacattggctgccactctgaccacaacctcactatatttgatttctgtgttgttttttggagctgttgcgacccgtgacaaacttttgactgataggctacttactgctacaattgcttggcctttccctgccattgttcacgttggaatcatcctttcaaccttaggtgctgctctccagagtttgacaggggcaccaaggttacttgccgctatagcaaatgatgatattctccccatcctgaactatttcaaagttgcagatactagtgaacctcatatagcgactctcttcacagcatttatctgcattggatgtgttgttatcggaaatctggatcttatcacacctactgtgaccatgttttatcttttgtgctattcgggagtaaacttgtcttgtttcctgctcgatcttcttgatgctccaagttggcgtccacggtggaaatatcatcattggagcctttcctttgttggagcctcactttgcatagtgatcatgttcttgatatcttggtcattcactgtggttgccattgcacttgcaagtcttatatacaaatacgttggcctaaaaggaaaggctggggactggggggatggtttcaagagtgcatattttcagttggcccttcgtagtctcaggtcactcggagcgaatcaagtgcacccaaagaactggtacccaattccccttgtcttctgcagaccgtggggacagctcccggaaaatgttccatgtcaccctaagctggctgattttgctaactgtatgaagaaaaaaggtcgtggaatgtcgatctttgtctcaattttagatggtgactactatgaatgtgctgaagaagcaaaggaagcttgcaaacaattagccacctacattgagtataagcgttgtgaaggtgtagctgaaatcgttgtagccccaaacatgactgaagggttccgtgggatcatccagacgatgggactcggaaacctcaaacccaacattgtggtaatgaggtaccctgagatctggcgcagagaaaatctaacagagattccatccacatttgttgggataatcaatgactgcataacagcaaacaaagcagttgtcatcatcaaagggttagacgagtggccaaacgagtaccaaagacagtatggaacaatcgacttgtactggattgtgagagatggtggtctcatgcttcttctctcacagcttcttctgacaaaagaaagcttcgaaagctgcaaaatccaactcttctgcatagctgaagaggattcagacgcggaagcactcaaagctgacgtgaagaagttcctctacgatctcagaatgcatgcagaagtaatcgtggtcacaatgaaatcatgggacataagatccgaaggaaacagccaagaagattcattggaagcttttgatgctgcacagagacgaatctcagattacttgggagagatcaagagacaaggttcgaatcctttgttggctaatgggaaaccgatggtggtgaatgagcaacaagtggagaagtttctttacacaatgctgaaactgaactcaaccattctgagttattcgagaatggccgcagtggttctggttagtctcccgccacctccgttgaatcacccggcgtatttctacatggaatatatggatttgctggtggagaatgtgccaaggatgttgatcgtaagagggaaattcgactttgcgcttcttcttattcatttttcaagctactttcgtgttagcgtttacgagttaggttctgtgtatttgcaactctgtgacatgctctaccttacagaaaaccgcaagtatgagaaccttgttgatccttcaactttcattcctcgattctcaaacaagttattgaaaggtgcacacaataagcaagtcgtggaaacggctacacacattatagctagtatgaagagtaactggatgcagaccggacggaaaccaagtggaatatgtggagcagcactctatacagctgcactttctcatggtatcaagtgctctaagacagatatcaccaacattgtgtatatatgcgaagcaactctaactaaaagattgattgagtttggaaataccgaggctgcaagttttactgctgatgagctcagtaaacctgaaagagaaagagaaaaagaaagagaagaagaaagagaattgcgtacaaggaacccgaattcttacaagaaaggactagtgctctgtggctcggatcctccctccttccagcgagcagagaaagagagaatggaggaaaaagcttctacagaagaaaacgacaaacaacaaaattcggatgaatcaagcactttgtctgacctcgatgatggagagttggattgttattttcggaacccgaaagaagtgcacctggttgagattatctttgatcacgaaaaccccggatatgatgagaaggaagcagcagctttaaacgcttgcaataatgcaagcaaccttttcgaagcttctaaagcagcggcggcgaaatctagaaaagataaacgacaacaacgtgctgaggaagaaaagaacgcgcctcctccagctacagccatggaagctgttgatagcatggtcaagagaaagaaatttcccgatactaactgcgattatttggaggagcttcttgatacttcagctcagaaagcatccaagagattgaaaaccgagacagtgatggagaagaacaaggaagagcatgagattgttgaaaacgaacaggatgaagaagattacgcggcatga

SEQ ID NO: 2444 - DNA, 1083 bp, Arabidopsis thaliana
  Clone ID: AT_F28O9.C1.o220.tg
atgacgatgaagtggggtcacagttgcaggagatgtaagcagatcaatgtcgtgactgatcacgttacgaggaggacacgatgcttcgggtgtggtcttgaatttaaatatcgcccgatcggagatctttcccctgtagcagagaacgatactgttcgtctccctgatccgacgaacacacttttaagcaatactgatctctccattgtcaccaccgagcacaagaatggttctttcgatgattccttgtcccttaatcttggaaattcgtcaaaacctcgcttggatccagtctctatagccaccgccaagctgatgaatgggtcctccaatgatttcttgtcccttggaacttcacagaattcagagacgattactgcttcttccgatgaattcttgttctctgatcttggacatttgcagaaatttagcttcgatcccctctcaatggcctccaccaagccgaataaagctctgtccatcgtctccatcgaagctatttccaatgggttgaaacttcctgcgacaatcaagggtcaggctaatgagatctttaaggtagtggagagttatgccagaggaaaggaacgaaacgtcctttttgctgcttgtatctacattgcttgtcgagacaatgatatgactcggactatgcgtgaaatatctagatttgccaataaagcctcaatttcggatattagtgagacagttgggttcatagctgagaaactggagatcaacaaaaattggtatatgagtatcgaaactgcgaactttataaagcggttttgttctatatttagattggataaagaagcagttgaagctgctctagaagctgcggaaagttatgattatatgactaatggccgtagggctcctgtatcagttgcagcaggaatcgtatatgtcattgctcgactttcttatgagaagcatctgctcaaaggtctaatagaagccactggagttgcagaaaacacgataaaaggaacatacggggacttgtatccaaatctgccaacaatagtacccacgtggtttgccaatgcaaatgacctgaaaaaccttggagctccttag

SEQ ID NO: 2445 - DNA, 549 bp, Arabidopsis thaliana
  Clone ID: AT_T4F9.C1.o140.tg
tgaaagaagacggaatttgcttggagtgcaagaggccaacagaaaccgtggttaactacaagaacggagatacaatctgcattgagtgtggccatgtcatagagaataacatcatcgatgacctagacggtgcttcgaccaaccctaatctcaaatccggccatctccccactatcatcttcaaacttagcggaaaatcttcctcccttgcctcaaaattgcgccgaacacagaatgaaatgatcaaaaacaagcaggaagaagatgtaatcaagatagcctatgcggaaatcgagaggatgaccgaagcgctagggttaactttcggtatcagtaatacggcgtgcaagattctttcgaaactggataaaaagaacttacgcggagggaagagtttgagagggctttgcgcggcctctgtatcaagggcatgtcgccaagtgaatataccaaaaacattgaaagagatctcggcagtagccaacgtggatatgaaggagataaacaaagcggtgaagcttcttggagattctttcggtactatttgaa

SEQ ID NO: 2446 - DNA, 936 bp, Arabidopsis thaliana
  Clone ID: AT_F4P9.C1.o32.tg
atggctctggaacagttaggattaggagtgagcgccgttgacggtggagagaacagtagcgcgccgtcaaatgacggtggagatgacggcgttaagacggcgagacttcctcgttggacgagacaagagattctggttctgattcaagggaagagagtggcggagaacagagtccggcgagggagagcggcgggtatggctctcgggtcgggtcaaatggagcctaaatgggcttctgtttcgtcttactgtaaacgtcacggtgtaaatcgtgggccggttcagtgccggaaaagatggagcaatctcgccggagattataagaagattaaagaatgggagtctcagattaaggaagagactgagtcctattgggttatgaggaatgatgttcgtagagagaagaagcttcctggttttttcgataaggaggtttatgatattgttgacggtggtgtgattcctccggcggttccggttctttcgcttggattggctccggcgtcagacgagggattgttgtctgatttagatcggagagaaagtcctgagaagttgaattctactccggtggctaaatcagttactgacaaagagaagcaagaagcttgtgtagcagatcaaggtagagtgaaagagaaacagccagaagcagcaaacgtggaaggtggatcgacatcacaagaagagaggaagcgtaaacggacatcttttggtgaaaaggaagaggaagaagaagaaggagaaacaaagaagatgcagaatcagttgatagagatactagaaagaaacgggcagttgttggcggcacagcttgaggttcagaatttaaacttaaaactagacagagagcaaagaaaagatcacggtgatagcttagtcgctgttctcaataagctcgctgatgctgtggcaaaaatcgcggataagatgtag

SEQ ID NO: 2447 - DNA, 1158 bp, Arabidopsis thaliana
  Clone ID: AT_F7O12.C1.o4.tg
atggaaggaaattgctcgcaaggacgctttgattctcaagtttcttctatgagagatcttcgtccaaatgctataaatcagaatcagaaacaacaccatccaaattctcgacaagactcaggctttaacaatactatggatacacgtcacaacaatgtcgacagaggaaagaaatcaatgagtgaagatgatgaactatgtttgttaagtagtgatggtcaaaacaagtccaaggaaaactctccttggcaacgtgtgaaatggatggataagatggtgaagctaatgataactgctctttcttatatcggtgaagactctggttctgataagaaatttgcagttttgcagaagaaaggtaagtggagatcagtttctaaagtcatggatgaaagaggttatcatgtttcgccgcagcaatgtgaagataagtttaatgatcttaataagcggtataagaagcttaatgagatgcttggtagaggaacttcttgtgaggttgttgagaatccttcactcttggataagattgattacttgaatgagaaagagaaagatgaagttaggagaatcatgagctctaaacatcttttctatgaagagatgtgttcttatcataacggaaacagattgcatttgcctcatgaccctgcggtacagagatctcttcacttgattacgcttggaagccgtgatgatcatgataatgatgaacatgggaaacaccaaaacgaagatcttgatgatgatgatgactatgaggaagatcatgatggagctttaagtgaccgtcctttgaagaggttaagacaaagccagagccatgaagatgttggtcatccgaataagggttatgatgtcccttgcttgcctcgttcccaagctgatgtgaatcgaggaatatcgctagatagtaggaaagctgctggcttacagaggcagcagattgagtctaagtctttagagttagaaggacgaaagcttcagattcaagcggagatgatggaactggagagacaacaattcaagtgggaggtgtttagtaagagaagagagcagaagcttgcgaaaatgagaatggaaaacgaaaggatgaaacttgagaatgaaaggatgagtcttgaactgaaacgaatagagttgggtgctaaattgtga

SEQ ID NO: 2448 - DNA, 1332 bp, Arabidopsis thaliana
  Clone ID: AT_F16F4.C1.o10.tg
atggatgggaattttccacaaggaggtgtagttcgtagtggagcttcatcttatggaggatttgatttacaaggttctatgagagttcatcaccaagactccatgaatcagcagcatcgacacaatcctaattctagaccacttcatgaaggtcttccctttactatggttacaggtcaaacctgtgatcatcatcagaatcagaacatgtctatgtctgagcaacagaaagctgaaagagagaagaattcagtgagtgatgatgatgaaccaagtttcacagaggaaggtggtgatggtgttcataatgaagctaatagatcaactaaaggatctccatggcaacgagtgaaatggactgataagatggtgaagttgttgattactgctgtttcttatataggagatgattcgagtatagatagtagtagtagaagaaagtttgctgttttgcagaagaaagggaagtggaaatctgtttctaaagttatggctgagagaggttatcatgtttcgccgcagcaatgtgaggataagttcaatgatttgaataaacggtataagaagcttaatgatatgcttggtagaggaacatcttgtcaagttgttgagaatcctgcgcttttggattcgattggttacttgaatgataaagagaaggatgatgttaggaagattatgagttctaaacatcttttttatgaagagatgtgttcgtatcataatgggaataggttgcatttgcctcatgaccttgctttgcagcgttcgttacagttggcgcttagaagcagagatgatcatgataatgatgattctaggaaacatcaaatggaggatcttgatgatgaggatcatgatggtgatggtgatgaacatgatgagtatgaggagcaacattatgcgtatggagattgtagggtaaatcattatggaggtggtggtggtcctttgaagaagataagaccaagccttagccatgaagatggagatcatccgagtcatgtgaattctctggagtgtaataaagtctctttacctcaaataccgttttctcaagctgatgtgaatcaaggtggggcggagagtggaagagcaggttcggtgcagaagcagtggatggagtcgcggactctccagctagaagagcagaagcttcagatccaagttgaattgctggaattggagaaacagagattcaggtggcagaggtttagcaagaaaagggatcaagaactcgagagaatgagaatggagaatgaaaggatgaaacttgagaatgatcggatgggattggagttgaaacaaagggaattgggtgttgaattataa

SEQ ID NO: 2449 - DNA, 1257 bp, Arabidopsis thaliana
  Clone ID: AT_T22K18.C1.o13.tg
atgttgagcttagaaatgccgcaaaatccaccaaatccccaaaattcaattcagttccagcatcctcatccttacaccacctccggcgaccaacaaactcagccgccgataaaatccttatacccatacgcctcaaaacccaaacaaatgtcacccattagcggtggcggttgcgacgacgaggatcgcgggtcgggttccggatccggttgcaaccctgaagacagcgcgggaactgacgggaagaggaaattgtcacaatggcatagaatgaaatggacggatacaatggttaggcttttgatcatggcggttttctacatcggtgacgaagctggtttaaacgatccagtcgacgccaagaaaaagaccggcggtggcggtggcggcggaggaggaggagggatgttgcagaagaaagggaagtggaaatcagtgtcgagagctatggtggagaaaggtttctctgtgtcaccacaacaatgtgaagacaagttcaatgatttgaacaagaggtacaagagagttaacgatattcttggtaaaggaatcgcttgtcgtgtcgttgagaatcaaggattgttagagagtatggatcatttgactccgaagttgaaagatgaagtcaagaagttgcttaattctaagcatcttttctttagagagatgtgtgcttatcataatagttgtggtcatcttggtggtcatgaccaacaaccaccgcaacagaatcctatttcgattccgattccgagtcagcagcagaactgttttcacgcggcggaagcagggaaaatggcgagaattgcggagagggtggaggtggaggaggaagtagagtctgatatggcggaggattcggagtcagagatggaggaatcagaggaagaagagacgaggaagaagcggaggatatcgacggcggtgaagaggttgagggaagaagcggcaagtgtagtggaagatgttgggaagagtgtgtgggagaagaaagagtggataaggagaaagatgttggagattgaggagaagaagattgggtatgagtgggaaggagtggagatggagaagcagagagtgaagtggatgagatataggagcaagaaagagagagagatggagaaggctaagcttgacaatcagagacggaggcttgagacggagaggatgattctcatgttacggcggagtgaaattgagttgaatgagttacagtcttcgggtacacgggttgacccgagttccgctaaggggtga

SEQ ID NO: 2450 - DNA, 1563 bp, Arabidopsis thaliana
  Clone ID: AT_T22K18.C1.o15.tg
atggcgtcgtgtgatgacgatttctctctacttggagacgatcagtcaaaccctaatcaacatcaccaccaccaccaagttcttcatcacacgccctacgctcctagacgattcaacccgaaaccatcgaatcagatccttttaccgcatcaccagaggaacggcgacgaggacgacgagaacgatgtcgttgtagaagcgtcttctgctttccacggtcacggtgttaatcctttcacggcggacgaaaattcgaatccgtatgatgataataacgcagctgtagacgaagacgaagacgaagatctcggtgccaacagatctagaatcggaggtgttcgtgttgagaagaggcagagtcaggaggagctaagtgacggaggaacaacaaatggcggtgagattactccctacggtagcttcaagagaccgaggacttcgtcttcctcagctggtgagtataggaaggatagagaagagtggagtgatgcggcgattgcgtgtttgttagatgcgtattcggataagttcacacagcttaatcgagggaatctccggggaagagattgggaagaggttgcttcatcggtgagtgagaggtgtgaaaagctgagtaagagtgtagaacagtgtaagaacaagattgataatctcaagaagaggtataagcttgaaaggcatagaatgagcagtggtggaacagcagctagtcactggccttggtttaagaagatggaagatattgtgggcaattcattagccttgaaaggcgcgtctgatgaagatagaagcggaagctcaatggggaatactgtgaagccagctagaaggtatcctctggtaacatataacccaggagttcagattaataacgtcaaatcaaaggctacatcaaaccctagatggcgaagagtggttctaaaaatcagtggtgcagctcttgcctgcaccggtcctaataacattgatccaaaggtaatcaatctgattgcaagagaagttgcaatggcttgtcgtcttggtgtagaggtagcgatagttgttgggagtcggaactttttttgtggcagcacatgggtaactgccactggtttggatagaaccactgcatatcatataagtatgatggcgtctgtgatgaactctgctttacttcaatcgtccctggagaaaataggggtgcaggcacggttacaaactgcaatatcggttcagggtgtcggggagccttacaatcgtcaacgagccacccggcatctagataagggaagagtggtaatatttggtggcatcggtgccacgcttggaaatccacttttatcatctgatgcatctgcagcccttcgagctatagacatcaatgcggaggcagtggtgaaaggaacaaacgttgatggtgtttatgactgtcattcacaagatagtaacgtgacatttgagcacatatcatttcaagatttggcttctagaggtcttacgtcaatggatacaatggcccttaacttttgtgaagagaacagcattccaggtcgagattcttcttctctctcttatcatgtttag

SEQ ID NO: 2451 - DNA, 1152 bp, Arabidopsis thaliana
  Clone ID: AT_F15I1.C1.o30.tg
atggaggacgacgacgagattcagtcaattccatctccgggagattcttccctttcaccacaagctcctccttctccgccgattttgccaacaaacgacgtgacggtggccgtcgtgaagaaaccacaaccggggctttcttctcaatctccgtccatgaacgctttagcgttagtggttcatactccttctgtaaccggtggtggtggtagcggaaacagaaacggacgaggaggaggaggaggaagcggtggtggtggaggaggaagagatgattgttggagcgaagaagctacaaaggttctaatcgaagcttggggagatcgattctctgaaccaggtaaaggaactttgaagcaacaacattggaaagaagtagctgagattgtgaacaagagtcgtcaatgcaaataccctaaaactgatattcagtgtaagaacagaattgatacggtgaagaagaagtataagcaagagaaagctaagattgcttctggtgatggacctagtaaatgggttttcttcaagaagcttgagagtttgattggtggtactacaacattcattgcttcttcaaaagcttcagagaaggctcctatgggaggagctcttgggaatagccgttcgagtatgtttaaacggcaaactaaaggtaatcagattgtgcagcaacaacaagagaagagaggctctgattcgatgcggtggcattttaggaaacgtagtgcttctgagactgagtctgagtctgatcctgaacctgaggcttctcctgaggaatctgctgagagtctcccacctttgcaaccgattcaaccgctttcgtttcatatgccaaagcggttgaaggtggataagagtggaggtggagggagtggagttggagatgtggcgagggcgatacttggatttacggaagcttatgagaaggcggaaactgctaagcttaagttaatggcggaactggaaaaggagaggatgaaatttgctaaagagatggagttgcagagaatgcagttcttgaaaactcaattggagataacacagaacaatcaagaagaggaagagaggagcaggcagcgaggagaaaggaggatcgttgatgatgatgatgatcgcaatggcaagaataacggcaatgtaagtagctga

SEQ ID NO: 2452 - DNA, 1149 bp, Arabidopsis thaliana
  Clone ID: AT_T19E23.C1.o14.tg
atggctgaccaaagtggtgggttggttatgatgagagagtacagaaaaggcaactggacgttgaatgagacgatggttctcattgaggccaagaggatggatgatgagaggaggatgcggcggtccatcggccttccaccgccggagcagcaacaagatatccggagtaataaaccggcggagctacggtggaagtggatagaagattactgttggagaaaaggttgtatgagaagtcagaatcagtgcaatgacaaatgggacaatctcatgagagactacaaaaaagttagagagtacgagagacgaagggtagaatcgtctattaccgccggtgagtcgtcttcatcttcagctccagctggagaaacggcgtcgtactggaagatggagaagagtgagaggaaagagagaagcttaccaagtaatatgttacctcaaacataccaagctttgtttgaagttgttgagagtaaaacgcttccttcttctaccgccgtaaccgctgtaaccgctgcagttgcggctgctgctgctgctattagtagtggaaacggttcaggcggtggacaaatccaaaaagtgatacaacaaggtttaggatttgttgttcctaaagtacatcaaatcattcagcagcaacctgttttgttaccacttcagccaccgccgccaccaccaccgtctcagccgttaccacgaccactactactgccaccgcctccaccgccttcttttcatgctcagccaatactgcccacagatagtagcacagattctgatacaagtgagtattcagacacatctccggcgaagagaaggagaacaatgccgacaaccacaaccgccggtcccagcggcggcggtgtagatgtggaggaggttggacgtagtaagagagatgaagagacgacagtagcggctgcgttatcaaggagtgtgtcagtgatcgcaaacgcgattagggagagtgaggagagacaagatcggagacataaagaagtgatgaacgtacaagagaggagactcaagatcgaagaatctaatgttgagatgaatagagaaggcatgaatggattagtggaagccattaataagctagctagctccattttcgctctggcttcttcttctcgccataataattag

SEQ ID NO: 2453 - DNA, 1197 bp, Arabidopsis thaliana
  Clone ID: AT_MNJ7.C1.o25.tg
atggaacttctcgccggcgactgtcggaaacgagtcggcgacgactttgaggaagatattaacccattcgatggttcggacggtggttgcgggtggatgtacggtacccgtcaaatgggttctaacggaaacgacgacgctttggctacgctcgcagacttggcttcgcctcctcagaaattgaaacctataaggtgtggcgttaagcttccgtcgtcgtcggaggatcgacatcctcttgatattctcgccggaaccctagataggctgccggagatgggttttggctgcttcgaagctcctttgggatcgaagattgctgacgtggaggaaagtggtcaattgactcgtgggttttcaaaggaagaggatgattctcttcctcctcttcaaatggagtttcaagctcgaaatcgcatctcttgggatggtctctctctcagctcctctgttgatagcagcgatagtgactcatctccagacgttcgcaagaccgtcacgggtaaaagaaagcgggaaacaagggtaaagctggagcatttcttggagaagcttgtggggagtatgatgaagcggcaggagaagatgcataatcagttgattaatgtgatggagaagatggaagtggagagaatacgccgtgaggaagcttggaggcaacaggaaaccgagaggatgacacagaatgaagaagcacggaagcaagagatggcacgcaacttgtctctcatctctttcatcagaagtgttactggtgacgagatcgagatccctaaacagtgtgaattcccgcaaccactccagcagattcttccggaacaatgtaaagacgagaaatgtgaatccgctcagagagaaagagagataaagtttaggtactcaagcggcagtggcagcagtggtagaaggtggccgcaagaggaagtgcaggcattgataagttcgagaagcgatgtggaagagaagacggggatcaacaagggagcgatttgggatgagatatcagcaagaatgaaagaaagagggtacgaaagatctgcgaaaaagtgtaaggagaagtgggagaacatgaacaagtactataggagagtgacggaaggtgggcagaaacagcctgagcacagcaagactcgctcatactttgagaaacttggaaatttttacaagaccatttcctcgggagagagggaaaaatga

SEQ ID NO: 2454 - DNA, 1242 bp, Arabidopsis thaliana
  Clone ID: AT_F13B4.C1.o9.tg
atgttcatttccgacaaatctcgtcctactgatttctacaaagacgatcatcacaattcctccaccaccagcaccacacgcgatatgatgatcgatgtactcaccactaccaacgaatcagtagatctacaatctcaccaccaccacaatcaccacaatcatcatctccaccaatctcagccacaacaacagattctcctcggagaaagcagtggagaagatcacgaagttaaagcaccaaagaaacgagcggagacatgggttcaagacgaaactcgtagcttaatcatgttccgtagaggtatggatggtttattcaatacatccaaatctaataaacatctctgggaacagatttcgtctaagatgagagaaaaagggtttgatcgatctccgactatgtgtactgataaatggaggaatctgttgaaagagtttaagaaagctaagcatcatgatagaggaaatggatcggcgaagatgtcgtattacaaagagattgaagatattcttagagagaggagcaaaaaagtgacaccaccacagtataataagagccctaatacaccacctacatcagccaaagttgattcctttatgcaatttactgataaaggttttgatgatacgagcatttcttttggatccgttgaagctaatggcaggccagccttaaaccttgaaaggcgtcttgatcatgatggtcatcctcttgcaatcactacagcagttgatgctgttgcagcaaatggagttactccttggaattggagagagactcctggaaacggtgatgatagtcatggtcagccttttggtggtagggtcataacagtgaaatttggtgactatacaagaagaatcggtgttgatggtagtgcagaagcaatcaaagaggtaatcagatctgcttttgggttaagaactcgaagggctttttggttagaagatgaagatcagattattcgctgtcttgaccgagacatgcccttagggaactatctactccgtctggatgatgtatgcaaaacccatcttgcaggactggccattagggtttgccattatgatgaatccaaccaattaccagtccattcagaagagaaaatcttctacactgaagaagactaccgcgagtttctggctcgacagggatggtcaagcctgcaagttgatggttttaggaacatagaaaacatggatgatcttcaacctggtgctgtgtatcgaggtgtgagatga

SEQ ID NO: 2455 - DNA, 1728 bp, Arabidopsis thaliana
  Clone ID: AT_F7O12.C1.o6.tg
atgtctggaaactcagaaggactgttagagagctcaggcggcggcgtgggaggttccgtcgaggaggaaaaagatatgaagatggaggaaaccggtgaaggagccggcagcggaggaaaccggtggccaagaccagagactttagctctattgagaatacgttcagagatggataaagcttttcgtgactctactctcaaagctcccttatgggaagaaatttccaggaaaatgatggagcttggttacaagagaagttcaaagaaatgcaaggagaagttcgagaacgtgtacaagtaccacaaacgtaccaaagaaggtcgtaccgggaaatccgaaggcaaaacttaccggtttttcgaagagttagaagctttcgagactctcagttcctatcaacctgaacctgagtcgcaacccgcgaaatcttctgcagtgatcacgaacgcgcccgcaacctcttccttgataccatggattagctctagcaatccatcaaccgaaaaaagttcttcaccgttgaaacatcatcatcaggttagtgtacaacccatcaccacaaaccctaccttcctcgccaagcaaccatcttccacgacgccttttcctttttatagcagcaacaatactactactgttagccagccgccaatttcaaatgacttgatgaacaatgtttcatcgctgaatcttttctcgagctcaacttcttcatctactgcatctgacgaggaagaagatcatcatcaggttaagagctcgagaaagaagaggaagtattggaaagggttgtttacgaagttgacaaaagagttaatggagaaacaagagaagatgcaaaaaaggttcttggaaacactggagtatcgtgagaaagagagaatctcaagagaagaagcttggagggtccaagagatagggagaatcaacagagaacacgaaacattaatccatgagaggtccaatgctgcagctaaagacgctgcaatcatatccttcttacacaaaatctcaggaggacaaccacaacaaccgcaacaacataatcataaaccatcacaaaggaaacaatatcaaagcgatcattcaataacgtttgagagtaaagagccgagggcggttctattggatacaacaataaagatggggaattacgataacaatcattcggtgtctcctagttcttcaagatggcctaaaaccgaggtcgaggccttgataaggataagaaagaatcttgaagctaactatcaagaaaacggtactaagggaccattatgggaagagatctctgcagggatgagaagattgggatacaatagaagcgcgaaacgctgcaaagagaagtgggaaaacatcaacaagtactttaagaaagtcaaagaaagcaacaagaaacgtccccttgattccaagacttgcccttattttcaccagctcgaagctttgtacaacgagaggaacaaaagtggggcaatgccattgccattgcctctaatggtgactccacagagacagttgcttctctcgcaagaaacccagaccgagtttgagactgatcagagggaaaaagttggtgataaagaagatgaagaagaaggagagagtgaagaagatgaatacgatgaagaagaagagggagaaggagacaatgagacaagtgagttcgagattgtgttgaacaaaacatcttcacctatggacattaacaataatcttttcacctaa

SEQ ID NO: 2456 - DNA, 993 bp, Arabidopsis thaliana
  Clone ID: AT_MLE2.C1.o6.tg
atggagatcatgcgtccaggggtctcagaaaacactttgaaaggaaaaataagaatcacaacgcggtgcatgtggcttgacaaaggaagacttttagatgcacttcacaaagcagctcatgctgctctatcaagttgtcctgtgacatgtcccttgtctcacatggaaagaacagtctccgaagtcctgaggaagattgtaaggaagtacagtggtaaaaggcctgaagtcatcgctatagccactgagaatccaatggctgtccgagctgatgaggtcagtgcgagactgtctggtgatccaagtgttggttctggagttgcagctttaaggaaagttgttgaaggaaatgacaaaagaagtcgggcgaagaaagcaccttcacaagaagcttcccccaaagaagtagatcgcactttggaagatgatatcattgatagtgcaagactactggctgaagaagaaactgcggcatcaacatacacggaagaagttgatacgcccgttgggagttcttcagaagagtcagacgatttttggaaatcattcatcaatccatcatcgtcaccttcaccgagtgaaacagaaaatatgaataaggtagctgatacggagcctaaagcagagggtaaggaaaacagcagagacgacgatgaattagctgatgcttcagattctgaaaccaagtcatcaccaaaacgtgtgaggaagaacaaatggaaaccggaggagataaagaaggtaatcagaatgcgaggagagctgcacagtagatttcaagtggtgaaaggtagaatggcattgtgggaagagatctcttcaaatctatcagctgaaggaatcaatcgaagcccgggacaatgcaaatctctctgggcatcacttattcagaaatacgaggagagcaaggctgatgagagaagcaagacgagttggccacattttgaggatatgaacaacattttgtcagagctaggcacacctgcgtcttaa

SEQ ID NO: 2457 - DNA, 2010 bp, Arabidopsis thaliana
  Clone ID: AT_T9L6.C1.o14.tg
atggagcaaggaggaggtggtggtggtaatgaagttgtggaggaagcttcacctattagttcaagacctcctgctaacaacttagaagagcttatgagattctcagccgccgcggatgacggtggattaggaggtggaggtggaggaggaggaggaggaagtgcttcttcttcatcgggaaatcgatggccgagagaagaaactttagctcttcttcggatccgatccgatatggattctacttttcgtgatgctactctcaaagctcctctttgggaacatgtttccaggaagctattggagttaggttacaaacgaagttcaaagaaatgcaaagagaaattcgaaaacgttcagaaatattacaaacgtactaaagaaactcgcggtggtcgtcatgatggtaaagcttacaagttcttctctcagcttgaagctctcaacactactcctccttcatcttccctcgacgttactcctctctccgtcgctaatcccattctcatgccttcttcttcttcttctccatttcccgtattctctcaaccgcaaccgcaaacgcaaacgcaaccgcctcaaacgcataatgtctcttttactcctactccaccacctcttccacttccttcaatgggtccgatatttaccggtgttactttctcgtctcatagctcatcgacggcttcaggaatggggtctgatgatgatgacgacgatatggacgttgatcaggctaacattgcgggttctagtagccgaaaacgcaaacgtggaaaccgcggtggaggcggtaaaatgatggaattgtttgaaggtttggtgagacaagtaatgcaaaagcaagcggctatgcaaaggagtttcttggaagctcttgagaagagagagcaagaacgtcttgatcgtgaagaagcttggaaacgtcaagaaatggctcggttagctcgagaacacgaggtcatgtctcaagaacgagccgcctctgcttctcgtgacgccgcaatcatttcattgattcagaaaattactggccataccattcagttacctccttctttgtcatctcaaccgcctccaccgtatcaaccgccacccgcggtcactaaacgtgtggcggaaccaccattatcaacagctcaatctcaatcacaacaaccaataatggcgattccacaacaacaaattcttcctcctcctcctccttctcatcctcacgctcatcaaccagaacagaaacaacaacaacaaccacaacaagagatggtcatgagctcggaacaatcatcattaccatcatcatcaagatggccaaaggcagagattctagcgcttataaacctgagaagtggaatggaaccaaggtaccaagataatgtacctaaaggacttctatgggaagagatctcaacttcaatgaagagaatgggatacaacagaaacgctaagagatgtaaagagaaatgggaaaacataaacaaatactacaagaaagttaaagaaagcaacaagaaacgtcctcaagatgctaagacttgtccttactttcaccgcctcgatcttctttaccgcaacaaagtactcggtagtggcggtggttctagcacttctggtctacctcaagaccaaaaacagagtccggtcactgcgatgaaaccgccacaagaaggacttgttaatgttcaacaaactcatgggtcagcttcaactgaggaagaagagcctatagaggaaagtccacaaggaacagaaaagccagaagaccttgtgatgagagagctgattcaacaacaacagcaactacaacaacaagaatcaatgataggtgagtatgaaaagattgaagagtctcacaattataataacatggaggaagaggaagatcaggaaatggatgaggaagaactagacgaggatgagaagtccgcggctttcgagattgcgtttcaaagccctgcaaacagaggaggcaatggccatacggaaccacctttcttgacaatggttcagtaa

SEQ ID NO: 2458 - DNA, 1491 bp, Arabidopsis thaliana
  Clone ID: AT_T22K18.C1.o19.tg
atggaggatcatcaaaaccatccacagtacggtatagaacaaccatcttctcaattctcctctgatctcttcggcttcaacctcgtttcagcgccggaccagcaccatcgtcttcatttcaccgaccatgagataagtttattgccacgtggaatacaagggcttacggtggctggaaacaacagtaacactattacaacgatccagagtggtggctgtgttggtgggtttagtggctttacggacggcggaggaacagggaggtggccgaggcaagagacgttgatgttgttggaggtcagatctcgtcttgatcacaagttcaaagaagctaatcaaaagggtcctctctgggatgaagtttctaggtctcattttttaaccctaattttttccagctttattttcccaaaatcccctttccttgaacatggatacactaggagtggcaagaagtgtagagagaagttcgagaatctctacaagtactataaaaaaacaaaagaaggcaaatccggtcggcgacaagatggtaaaaactatagatttttccggcagcttgaagcgatatacggcgaatccaaagactcggtttcttgctataacaacacgcagttcataatgaccaatgctcttcatagtaatttccgcgcttctaacattcataacatcgtccctcatcatcagaatcccttgatgaccaataccaatactcaaagtcaaagccttagcatttctaacaatttcaactcctcctccgatttggatctaacttcttcctctgaaggaaacgaaactactaaaagagaggggatgcattggaaggaaaagatcaaggaattcattggtgttcatatggagaggttgatagagaagcaagatttttggcttgagaagttgatgaagattgtggaagacaaagaacatcaaaggatgctgagagaagaggaatggagaaggattgaagcggaaaggatcgataaggaacgttcgttttggacaaaagagagggagaggattgaagctcgggatgttgcggtgattaatgccttgcagtacttgacgggaagggcattgataaggccggattcttcgtctcctacagagaggattaatgggaatggaagcgataaaatgatggctgataatgaatttgctgatgaaggaaataagggcaagatggataaaaaacaaatgaataagaaaaggaaggagaaatggtcaagccacggagggaatcatccaagaaccaaagagaatatgatgatatacaacaatcaagaaactaagattaatgatttttgtcgagatgatgaccaatgccatcatgaaggttactcaccttcaaactccaagaacgcaggaactccgagctgcagcaatgccatggcagctagtacaaagtgctttccattgcttgaaggagaaggagatcagaacttgtgggagggttatggtttgaagcaaaggaaagaaaataatcatcagtaa

SEQ ID NO: 2459 - DNA, 1812 bp, Arabidopsis thaliana
  Clone ID: AT_F7O12.C1.o5.tg
atgatgcaactgggtggtggtactccgaccactacagcggcggctacaaccgtcacaactgctacagcaccaccgccacaatcaaacaacaacgattcagcggcaacagaagcagcggcagcagcggttggggcgtttgaggtgtcggaagagatgcacgaccgtgggtttggaggaaatcgttggccgcggcaggaaacgctagcgttgttgaaaatacgatctgacatgggaatagcgtttcgagacgctagcgttaaaggtcccttatgggaagaggtttctaggaaaatggcggagcatggttacataagaaacgcaaagaaatgcaaagagaaattcgagaacgtttacaaataccacaaacgaaccaaagaaggtcgtaccggaaaatccgaaggcaaaacttatcgcttctttgatcaattagaagctctcgagtctcaatctacaacctcactccaccatcatcaacaacaaacgcctcttcgaccacagcaaaacaacaacaacaacaacaacaacaacaacaacagctccatattttcaactcctcctccggtaacgacagttatgccgacgcttccttcttcatcaattcctccgtatactcagcagattaatgtaccttcgtttccaaacatctccggtgattttctatcggataattctacatcgtcttcgtcttcttattcgacttcttctgacatggagatgggtggtggaactgcgactacaaggaagaaaaggaagaggaaatggaaggtgtttttcgagcggttgatgaaacaagtagttgataaacaggaagagcttcaacgcaaattcttggaagctgttgaaaagcgagaacacgagagattggttagagaagagtcttggagagttcaagagattgccagaatcaaccgcgagcacgagatcttagctcaagaacgctctatgtccgctgcaaaagacgctgctgttatggcctttcttcaaaaactgtcagagaaacaaccgaatcagccacaaccgcagcctcagccgcaacaagttcgaccatcaatgcagcttaataacaacaatcagcagcaaccgcctcaacggtctcctccaccgcaacctcctgctccgcttccgcagccaattcaagcggttgtgtcgacgttagacacaacgaaaacggacaatggtggtgatcagaatatgactcctgcagcttcagcgagctcgtcgcggtggccgaaagtggagatagaagcattgataaagctgaggacgaatcttgattcgaaatatcaagaaaacggaccaaaaggaccattgtgggaagagatatcagcgggaatgagaaggttaggattcaacaggaactcaaagagatgcaaagagaaatgggaaaacataaacaaatacttcaagaaagtcaaagagagcaacaagaaacgtcccgaagattccaagacttgcccttactttcaccagcttgatgctttatatagagagaggaacaaattccacagcaacaacaacattgcagcttcttcttcatcttccggtcttgttaaaccggataattctgttcccttgatggtccaaccagagcagcaatggcctccggctgtaacgactgcgacaactactcccgcagcggctcagcctgatcagcaatctcagccgtcggagcagaactttgatgatgaagaaggtacagatgaagagtacgacgatgaagatgaggaagaggagaatgaagaagaggaaggaggtgagttcgagcttgtgcctagcaataacaacaacaacaagacgacgaataatctgtaa

SEQ ID NO: 2460 - DNA, 1641 bp, Arabidopsis thaliana
  Clone ID: AT_F19K23.C1.o22.tg
atggacagaggatggtctggtctcactcttgattcatcttctcttgatcttttaaaccctaatcgtatttctcataagaatcaccgacgtttctcaaatcctttggcgatgtctagaattgacgaagaagatgatcagaagacgagaatatcaaccaacggtagtgaatttaggtttccggtgagtctctcaggtattcgtgatcgtgaagatgaagatttttcatctggcgttgctggagataatgaccgtgaagttcccggcgaagtggatttcttctccgacaagaaatctagggtttgtcgtgaagacgacgaaggatttcgtgtgaagaaggaagaacaagatgatcgaacggacgtaaattgtggacgtgtcataatttggtttacatttgaaatatcaaataaaaataccaaattttgtttcatttttttttttttgataaagaccggtttgaatcttcgaacaactggtaatacaaagagtgatgagtcaatgatcgatgatggagaatcttccgaaatggaagataagcgtgcgaaaaatgaggtaagtttattggtgaaattacaagatgagttgaagaaaatgacaatggataatcaaaagcttagagaattgcttacacaagttagcaacagttacacttcacttcagatgcatcttgtttcactaatgcagcaacagcaacaacagaacaataaggtaatagaagctgctgagaagcctgaggagacgatagtaccaaggcaatttattgatttaggccctacgagagcagtaggtgaggccgaggatgtgtcaaattcttcatccgaagatagaactcgttcggggggttcttctgcagccgagaggcgtagtaacgggaagagacttgggcgtgaagaaagccccgaaactgagtccaacaaaattcagaaggtgaattctactaccccgacgacatttgatcaaaccgctgaagctacgatgaggaaagcccgtgtctccgttcgtgcccgatcggaagctccgatggttcaacgttgcgcggaagacagatcaattctgattacaacctacgagggaaaccataaccatccgttgccgccagccgcggtagccatggcttctaccaccacggcggcggctaacatgttgctatccgggtcaatgtctagtcacgacgggatgatgaaccctacaaatttactagctagggctgttcttccttgctccacaagcatggcaacaatctcagcctccgcgccgtttccaaccgtcacattagacctcacccactcacctccgcctcctaatggttccaatccttcctcttccgcggctaccaacaacaaccacaactcactgatgcagcggccgcaacaacaacaacagcaaatgacgaacttacctccgggaatgctacctcatgtaataggccaggcattgtataaccaatccaagttctcggggctgcagttctctggtggctctccctcgacggcagcgttttctcagtcacacgcggtggctgatacaataacggcactcacagctgacccgaatttcacggcggctcttgcagccgttatttcttctatgatcaatggtacgaaccaccacgacggcgaaggaaacaacaaaaatcaatag

SEQ ID NO: 2461 - DNA, 549 bp, Arabidopsis thaliana
  Clone ID: AT_F1M23.C1.o8.tg
atgaagaggctctgttgttgggtggaactaaggctacaagtgatgaagaagctgaagttgaagatagagggttgcagttttgatgacatgtattttgtgttgcagatacgaaaccatggagaaattattacttgcaccagcagaggagatatcctatcaagaaaaagaaaaactttgaccacatctctgattccattactagtgattaccgtttgcgcacttagatgcatagaggtagtagaaaaggtcaaggtgcatcctttatggcaagcgactcccatggttcagagaagtgtggaggatcagtccgtgttagttgcaacttatgagggtgaacacaaccatccaatgccatcgcaaatggattcaaacaatggcttaaaccgctacatctctcatggtggttctgcttcaacacccgttgcagccaacaaaagaagtagcttgactgagccgactgatagaccgttaatagtatactcaatgaagaagagaagagaggcacgtgcgactgagatggcagatgaggagcacgtgagtggcagttga

SEQ ID NO: 2462 - DNA, 1956 bp, Arabidopsis thaliana
  Clone ID: AT_MXK3.C1.o3.tg
atgaatatctctcaaaaccctagccctaattttacgtacttctccgatgaaaactttattaatccgtttatggataacaacgatttctcaaatttgatgttctttgacatagatgaaggaggtaacaatggattaatcgaggaagagatctcatctccgacaagcatcgtttcgtcggagacatttaccggggaaagcggcggatccggcagcgcaacaacgttgagtaaaaaggaatcaactaatagaggaagtaaagagagtgatcagacgaaggagacgggtcatcgagttgcatttagaacgagatcgaagattgatgtgatggatgatggttttaaatggaggaagtatggcaagaaatctgtcaaaaacaacattaacaagagactaagattgtaccgggaaggaaatgtgaaaaaagcaacttgtaaaaaaagcctgtgtgacagctctgtaacttgtaagcgtcaacgagatttattcgaggaggaagacgaaccctacttgattgatttaggaggtggagagatctttctgaacaagtttgattctgttgcaaaaatgaagttttggagggaacgtgaaagggaaaataaggagcagatcttagcgccattatgtgggcaagttcgagtgttggtagttggtgactcaggtgttggaaaaacatcacttgtacacctcatcaacaaaggttcttctattgttcgcccacctcaaacgattggatgcactgttggtgtcaagcacataacctacgggagtccagctagttcttcaagtagcattcaaggtcccggtggtcttcctgttccatacattgtagttggcaacaaagcagatattgctgcaaaagaaggaacaaaaggaagcagtggaaatcttgttgatgcagctcgtcattgggttgagaagcaaggtttgcttccttcttcaagtgaggatctccctctctttgaaagctttcctggtaatggcggtctcatagcggctgccaaagaaaccagatacgataaggaagctttgaacaaatttttccggatgttgataagaagaagatatttctcagatgaactgccagcagcttcaccatggtctatttcgccggttccaacgtcatcatcgcaacggttagacgagattacaagtgatgatgatcaattttacaagcgaacaagtttccatggagatccatacaagtacaacaacacaataccaccacttccagcacaacgcaacctaactccgcctcccacgctctatccgcaacaaccagtgtccacccctgataactacaccattccgagatactctctttccagtgtacaagaaacaaccaacaatggcagtgccaggctactacaatcagctgaaaaaaaccctaattcagtctctctttctcgtcgtgcaaaaaccctaaaccctgggaattatttagatttctgttttcaattccgtttctgttccgaaattgttcaaggtgaaaaattcaacctcaaaggaaagatcaattttgtttgcaatgcgcagtgtaaaattcaagtcttaaagaagagaaaaatggtggaggtgtggtggtcactgataggagcagcagtgcctgcactaattgctggtcaagcttggaggataaagaagagacatggcgaagaagagaggatcaagagtgctcgaggaagagagaaaagctctgatgaaatctttgtctgtgaaagagtttgcacttccaaaagaatgctgaaaaaagttggagctttctctaaagatcctatccccgacacttgtgttactgtctgcggtgtatctgagctcgacgcttgctctgatgcttgtgctcgaactgtttgcgttaaccagcatcaagttgctaattggaatgacatttgtctcagaagatgtcaaagtgaatgtcttaagctctcttcttcttcttcttcttctcgctattcttga

SEQ ID NO: 2463 - DNA, 942 bp, Arabidopsis thaliana
  Clone ID: AT_T22B4.C1.o50.tg
atggaaatgatgaattgggagcggaggagtttgctaaacgagctaattcatggactaaaagcggccaagcagcttcagggttcgtcttctccatcgttgtcagcttcttcttcatatttgacgacggagataaaggagaatctcttacataacatagtttcttccttcaaaaaagctattttgatgctcaacggatccaccacacaacacaatccaacgatagagcttgcgcctgatcccctagctcatcccggaaaggttccaggatctccagcatcgatcaccggaaatccgagaagcgaagagtttttcaatgtaagatcgaaagaattcaacttaagttctaaaaagaggaagatgttgccaaagtggacagagcaagtgagaattagcccagagagaggcttagaaggacctcatgacgatatcttcagctggagaaaatatggccagaaagacattttgggcgccaaattcccaaggagttattacagatgcacatttcgtaacacacagtactgttgggctacgaaacaagtccaaagatcggacggtgatccaacgatcttcgaagtaacatacagaggaacacacacttgttcacaggggatcccacttccagagaaacgagaaaccaaaccaaaacacacagtagcagtaaattaccagaatctcagggccagtcttaccgtacgtaccggcggacttggaagcgaagctttctcattccccgtcacgtcgccgttatacacttacgagtccatcaacggtggtggaacgttttaccaccacgtgggaagttctggtccgtcggatttcactggattgatctcaacaaatacttccacaggaagttctccaatcttcgacgttaattttcaatttgatccaacggctgagattaacacaggcttccccacttttttccacaattcgatttaa

SEQ ID NO: 2464 - DNA, 1470 bp, Arabidopsis thaliana
  Clone ID: AT_T15B16.C1.o12.tg
atggaagaacatattcaagatcgccgtgaaattgcgttcttacactcaggagaatttctccacggagattctgactcaaaggatcatcaaccgaacgagtctccggtggaacgtcatcacgagtcgtctatcaaagaagttgatttcttcgctgctaaaagtcagccgtttgatcttggtcatgtgagaacaacgacgatcgttggatcatctggttttaatgatggattaggtttggtaaattcatgtcatggaacatcaagcaatgatggcgatgacaaaaccaaaactcaaattagtagactgaagttggagctagagaggcttcacgaggagaatcacaaactgaagcatttattagatgaggtcagtgagagttacaacgacctccaaagaagagttttgttagcaagacaaacacaagtggaaggtcttcatcataaacaacatgaggatgtacctcaagctggttcctcacaagctctagagaacagaagaccaaaggatatgaaccatgaaactccggccaccaccttgaaacgacggtctccagacgacgtggatggtcgtgatatgcaccgaggatcaccaaaaactcctcgaatagaccaaaacaagagtactaatcatgaagaacaacaaaaccctcatgatcaattaccctatagaaaagctagggtttccgttagagctagatctgatgccactacggtaaatgacggatgtcaatggagaaaatacggtcagaaaatggcgaaagggaatccatgtcctcgcgcttattatcgttgcaccatggccgttggatgtcctgtccgtaaacaggtccaacgatgcgcggaggatacaactatcttgacaacaacgtacgaaggaaaccataaccatcctcttcccccgtcagccacagccatggctgcaaccacctccgccgcagcagccatgctcttatcaggctcctcctccagcaacctccaccaaacactctctagcccctccgccacgtcatcatcatccttctaccataacttcccatacacctccacaatcgcaacactctctgcctcagctcctttccccaccataaccttagacctcaccaacccacctcgaccgctacaaccgccaccgcagtttctaagccagtatggtcccgccgcgtttttaccaaacgctaatcaaattaggtctatgaataataataaccagcagttattaatacctaatttgtttggcccacaagccccaccacgtgaaatggtcgattcagttagggctgcgattgcgatggatccgaacttcacggcggcacttgcggccgcgatctcaaacattatcggaggaggtaataacgacaacaataataatactgatattaatgataacaaggttgatgcaaaaagtggagggagtagtaacggagattcgccacagcttcctcagtcttgcaccactttctctacaaactaa

SEQ ID NO: 2465 - DNA, 1875 bp, Arabidopsis thaliana
  Clone ID: AT_F28M20.C1.o10.tg
atgggttcatttcaaattttcgtatttcagaagaaggaggtctcagttttggcttctactcacttaaagaggaaatggttggagcaagacgagagcgcaagtgagttacgagaggagctaaacagagttaattcagagaacaagaagctaacagagatgttagctagagtctgtgagagctacaacgaactacataatcatttggagaagcttcagagtcgccagagccctgaaatcgagcagaccgatataccgataaagaaaagaaaacaagacccggatgagttcttaggctttcctattggactcagtagtggaaaaactgagaacagctccagcaacgaagatcatcatcatcatcatcagcaacatgagcagaaaaatcagcttctttcatgtaaaagaccagtcactgatagcttcaacaaagcaaaagtttcgactgtctacgtgcctactgaaacatcggacacaagcttgagacaaatgactaagcagagtgtaactctgcagacagttaaagatggatttcaatggaggaaatacggacaaaaggttacaagagacaacccgtcacctagagcttactttagatgctcgtttgcaccgtcttgtccagtaaaaaagaaggtacaacgcagcgcagaggatccatctttacttgtagcgacatacgaagggacgcataaccacttgggtccaaatgcttctgaaggggatgctacaagccagggtgggtcaagcacagtgactttggatctggttaatggctgtcatagactagcgttggagaaaaacgaaagggataatacgatgcaagaggttctgattcaacaaatggcgtcatcgttaacaaaagattcgaaatttacagctgctcttgctgctgctatatctgggaggagattcgtgggccggtggctttcggggttgagaagttccaaggggaagagagatgcaggggaggaacaagaagatgacaccagaaggtatcaattagcgcctataaggtgttcgacgagtttaaatcagctggtaatgcaggacaataagcagaactgccgcctgaataagagtaaagagccggagactaatacatttgagtcacaaagcagagagtcacctttggaagtgggaattggttcttttttgctctatcttgttgttgcaagtaaaaccgagcttgataagatgacaaacctgcgaatgcaaatggagatgtttcttcttaatgcaaaagaacaactacagaagaaggatacacctatgtcttcaaatgaagcaagcggtttccagttttctcctcaagaattctcgaatttggcgtcatccattttccaagagtcatcatcgagtgttcttcaagaggagtacaccgaattcgaggtctcagagccagaggattatcgtcgaggaacagactgcaactcaaaactccaggctgaggtaggtaggttacctctgggtgaaaaagcagaggatagacaaacaaagcatcagattcagagacaatgcaaacttaaagacaatgaggtcacaaagagtcatataccagagatggtggtgtcagatgaaagatatggagtgtgtccgtacgaactagacaaaaagctgcatgaactactggagacaaggcaacaagaagagttagtgaagcttgagactgctctgaatcgtgttgaacgcagactacaagagaaagaaaccgaggtttcatggtggaaagacgcagcccgcctgcttgcccagcgtgttcctgaatcttctcggtctggactagaatggtgcaacccagactcttccacatgttcagagcgatctgttccaagatcttatgaagcatgttcgatacaccgcaccagtttttctagatga

SEQ ID NO: 2466 - DNA, 1716 bp, Arabidopsis thaliana
  Clone ID: AT_T15N24.C1.o90.tg
atgaaccctcaagctaatgaccggaaggagtttcagggagattgttcggcgacgggagatctcacggcaaagcacgattcagctggaggaaacggaggtggaggtgctaggtataagctgatgtcaccggccaagcttccgatctcgaggtcgactgatatcacgattcctcctgggttgagtccgacttcgtttttggaatctcctgttttcatctccaacatcaagaagactgttttttttaaaacatcatgtttattgatagatcagccagaaccttcccctactactggttctttgttcaagcctcgaccagtgcacatttctgctagctcaagttcttatacaggcagggggttccatcagaacacctttactgagcagaagtccagtgaatttgagttcagacctcctgcatcaaatatggtatatgcagagcttggcaagattagaagtgagccaccagtacattttcaaggccagggccatggatcctcacactcaccttcttcgatcagtgatgctgcaggttcctcaagtgagctaagccggccaactcctccttgtcagatgacaccaacgagctcagatattccggctggatctgatcaagaggaatcaatccagacttcccaaaatgactccagaggaagcactccatccatcttggctgatgatggttataactggagaaaatatggtcaaaagcatgtcaaagggagtgaatttccccggagctattataaatgtacacatcctaattgtgaagtgaaaaagttatttgaaagatctcatgatgggcagatcaccgatattatatacaagggtacacatgaccatcctaaacctcaacctggtcgccgaaactctggtggtatggctgcacaagaagaaaggctagacaagtatccttcttcaactggccgagatgagaagggatctggcgtctacaacttgtctaaccccaatgaacaaactggtaaccctgaagtacctcctatctcagcatctgacgatggtggagaagcggcagcgtcaaataggaataaagatgagccggacgatgatgatccattctcaaaacggaggaggatggagggtgcgatggaaataactccactagtgaaacccatccgggagcctcgggttgttgttcaaactctgagtgaggttgacattctggatgatggttatagatggcgcaaatatgggcagaaagtcgtaagggggaacccaaatcccaggagctactacaaatgcacagctcatggatgcccagtgagaaaacacgtggagagagcatcacatgatccaaaagctgtaataacaacatacgaaggcaaacacgatcatgatgttcccacttcaaagtctagcagcaatcacgaaatccagcctcggttcagaccagatgaaacagacaccatcagcctcaatcttggtgttggaatctcatctgatggacctaaccacgcttccaacgaacatcagcaccagaatcaacaacttgtcaaccaaactcacccaaatggagtcaatttcaggtttgttcatgctagtcccatgtcatcctactatgctagcttaaatagcggtatgaatcagtacggccagagagaaacaaagaacgagactcaaaatggtgacatctcgtccttgaacaattcatcttacccatatccgcccaacatggggagagtacaatcgggtccgtaa

SEQ ID NO: 2467 - DNA, 993 bp, Arabidopsis thaliana
  Clone ID: AT_F7O18.C1.o30.tg
atggaggaagttgaagctgctaacagatcagctatagaaagctgtcatggagtgttaaatctcttgtcacaacgaaccagtgatcccaaatccttaacggttgaaacaggagaagtagtttccaagttcaaaagagtagcttctctgttaactagagggttaggccatggaaagtttaggagtaccaacaagtttaggtcatcttttcctcaacacatcttcttagagagtcctatttgctgcggtaatgatctaagtggtgattacactcaagttcttgcaccagagccacttcagatggttccagcttctgctgtttataatgaaatggagccaaaacaccaattgggtcatccttcattaatgcttagtcacaaaatgtgtgttgacaagtcgtttctggagttaaagccacctccttttcgtgctccttatcagttaatccacaaccaccagcagatagcttactccaggagtaatagcggtgtaaaccttaagtttgatggatctggtagtagttgctatactccgagtgtatcaaacggatcaagatcatttgtgtcatctcttagcatggatgctagtgtaacagactacgataggaactcgttccatttgaccggattgtcccgtgggtctgaccaacagcatacccggaagatgtgctctggtagtttgaaatgcggaagtcgaagcaaatgtcactgttccaagaaaaggaaactgagggtaaaacgatcaatcaaggtgcctgcaatcagtaacaagattgcagacattcctccagatgagtattcttggaggaagtatggacagaaaccgataaagggttcaccgcatccacggggatactataaatgcagcagtgtgagaggttgtccagcaaggaagcatgtggagcgatgtattgatgaaacttcaatgttaattgtaacttacgaaggcgagcataaccattcaagaatattgtcttcacaatcagctcacacttga

SEQ ID NO: 2468 - DNA, 930 bp, Arabidopsis thaliana
  Clone ID: AT_T28J14.C1.o40.tg
atgggctcttttgatcgccaaagagctgttccgaaattcaaaacagcaacaccgtcaccgctccctctttctccttcgccttacttcactatgcctcctggccttactcccgccgactttctcgactctcctcttctcttcacttcctccaacattttgccgtctcctacgacaggcacatttccagcgcaatctctgaactataacaataacggtttgctcattgacaaaaatgaaatcaaatatgaagacacaactcctcccttgttcctaccatctatggtaactcagcctttacctcaactggatttattcaaatccgaaatcatgtcgagtaacaaaacctctgatgacggctacaattggcgcaaatacgggcagaagcaagtcaaaggaagcgaaaacccgaggagttacttcaaatgcacgtatccaaattgtctcacaaagaagaaagtagagacgtctcttgtgaagggtcagatgattgagattgtctataaaggaagccacaatcatcccaagccccaatccacgaagcgatcatcttccaccgctatagcagcacatcagaacagcagtaatggagacggtaaagacattggtgaagatgaaacagaggccaagagatggaaaagagaagagaatgtgaaggagccaagagtggtggttcagacaacaagtgatatagacattcttgacgatggctacagatggagaaagtatggtcagaaagtcgtcaagggtaatccaaatccaaggagctattacaagtgcacatttacaggatgttttgtaaggaaacacgttgaaagagcatttcaagatcccaagtcagtgatcacaacttacgaaggaaaacacaaacaccaaatcccgaccccaagaagaggtccagttttaaggttacttggaaaaacagagacataa

SEQ ID NO: 2469 - DNA, 708 bp, Arabidopsis thaliana
  Clone ID: AT_T21F11.C1.o8.tg
atgtctcttgagattgatgcgaaggctgtctcagcactcctccttggccaaggatgcgctaacaatctcaagacgctcctcaaaaaccatgaaacaggctcagtttcaacagagccactcatcaactccattcttgattctttctcgtttgctctgtcttctcagaacataccacgtcatgtgtctcaaagatcatcaaagaaaaagatgtgtggaatacaaggtatggaagattctccgacaccggcccacattgatggcttcatctggaggaaatatggacaaaagaccatcaaaacctctccgcaccaaaggtggtactaccgatgtgcctatgcgaaagaccaaaactgcgacgctaccaagcgggtacagaagatccaagacaatcctccagtgtacagaaacacctatgtcggacaacatgcatgtgaagctccagcttatgcagttaataatggtggtacatacggttcaaaaatgatcaaattcgactatgttattcctgaatcggttatgcctcaacctttatcaattgattcccaagaaattaccatggaggataaagacacagacgaccatattttgaactatattaacgagcatttgatggaagatgaggcgtatgatgttttccctgatgtacttggagaacgttgctgctttggattagaaccctttccaggattgaacattaataaatcttaa

SEQ ID NO: 2470 - DNA, 4119 bp, Arabidopsis thaliana
  Clone ID: AT_K21C13.C1.o24.tg
atgaccgagagtgagcaaatcgtctacatcagctgcatagaggaggtacgatactccttcgtcagccacctctccaaagctctccagcgaaaaggtgtaaacgatgtcttcatcgatagcgatgattcgctttccaacgagtctcaatcaatggtcgagagagctagggtttctgttatgattttaccaggaaaccgtacggtatctcttgacaagctcgtgaaggttctcgattgccagaagaacaaagatcaagtggtggttccggtgttgtacggtgtcagatcatcagagaccgaatggcttagcgcgctggattcgaaaggattctcatcagtacaccattccaggaaagaatgtagtgactcccagcttgtaaaagagactgttagagatgtgtatgagaagctcttttatatggaacgaattggaatatattcgaagctgctggagattgagaaaatgattaacaagcaaccgttggacatccgttgtgttggaatttggggtatgcctggcataggcaagactacacttgctaaagcagtctttgaccaaatgtctggtgagtttgatgctcattgctttattgaagactacaccaaagctattcaagagaagggtgtttattgtttgctggaggaacagtttttgaaagaaaatgctggtgctagtggtaccgttacgaaattgagcttgcttagggatagattaaacaataagagggttcttgttgttcttgatgatgtccgcagtcctctggttgtggagtcttttcttggagggtttgactggtttggtcccaaaagtctaatcatcataacctccaaagataaatcggtgtttcgcctttgtcgagtcaatcaaatatacgaggttcagggtttaaatgagaaagaggctcttcaactcttctctttgtgtgcgtctatagacgatatggcagagcagaatctccacgaggtgtcaatgaaagttattaaatatgctaatggccatccattagctctcaatctctatggcagagaactgatggggaagaaaagaccaccagaaatggagatagcattcctcaaactcaaggaatgtcctccagctatttttgttgatgcaatcaagagctcgtatgacacactcaatgacagggaaaaaaacatttttttggacatagcttgtttcttccagggagaaaatgttgactacgtgatgcaactgcttgagggttgtggtttctttccacatgttggaattgatgttcttgtggagaagagtctggtgactatttcagaaaaccgagtgcggatgcataacttgatccaagatgttggccgacaaataataaatagagaaacaagacagactaagaggcgcagcagactgtgggaaccttgcagcatcaaatatttattagaagataaggaacaaaacgaaaatgaagaacaaaaaacaacttttgaacgtgctcaggtccctgaagagatcgaaggcatgtttctggacacatcaaacttaagttttgatattaagcatgttgcctttgataatatgttgaaccttagattgttcaagatttacagttccaatcctgaagtccatcatgtaaacaatttcctcaaaggctctctcagttctcttcctaatgtgctaagactcctgcattgggagaactatcctctgcagtttctgcctcaaaattttgatcctatacaccttgttgaaatcaacatgccgtacagccaacttaagaaactttggggtggaaccaaggacctggagatgttgaagacaatcaggctttgtcattcccaacaactagttgatattgacgatcttttaaaagctcaaaatcttgaggtagttgatctccaaggctgtacaagactgcagagtttcccagccaccggtcaattgctacatttacgagttgtaaatctctcaggttgcacagagatcaaaagtttcccagaaattcccccaaatattgagacactgaatctacaggggactggtataatagaattaccactttccattgttaagccaaactacagagagcttttgaatcttctagctgaaatcccgggtctttcaggtgtctcaaaccttgagcaaagtgatctcaaacctttaacaagcctgatgaaaattagcacatcttaccaaaatcctggcaagcttagttgcttggagctgaatgattgttctcgtttgcgaagtctgccaaacatggttaatttagaacttctcaaagcccttgatctttctggttgctcagagctcgagactatccagggtttcccacggaacctgaaagagttatatcttgttggcactgcagtaagacaagtgccacaacttcctcaaagtctagaattctttaatgcccatggttgtgtctctctcaaatcaattcgtttggacttcaagaagcttcctgtgcattacacatttagtaattgtttcgatctatctccacaagtggtcaacgattttttagtgcaggcgatggctaatgtgattgcaaaacacataccaagagagcgtcatgtcacaggcttttctcaaaagactgtgcagcgttcgagtcgtgacagtcagcaggaactcaacaaaactttggctttcagcttctgtgcgccctcacatgcgaatcaaaattccaaacttgatctgcaaccaggatcttcttcaatgacacgactagatccttcttggaggaacacacttgtgggctttgctatgctggtgcaagtcgcattttccgagggttactgtgatgatactgattttggcattagttgtgtttgcaaatggaaaaacaaggaaggccactctcataggagagaaataaatttgcattgttgggctttagggaaagctgttgaaagggatcatacgtttgtcttctttgatgtcaacatgcgtccagataccgatgaaggaaatgaccccgatatctgggctgatttagttgtttttgagttctttcctgtcaataaacagagaaagcctctaaatgatagttgcacagtgacaagatgtggagtccgtttaataactgctgtaaactgcaatacaagtatcgagaatatatcaccagttttgtccttggatccgatggaggtttctggtaatgaagatgaagaagtattgagagtcagatatgctggtttacaggagatatataaagctttgtttctttacatagcgggtttgttcaatgacgaggatgttggtttggtagcaccacttattgctaacattattgacatggacgttagttatgggctcaaggtcttagcctataggtctctcatacgtgtatcttccaatggggaaatagtgatgcactatttgctacgacaaatgggtaaagaaatcctccatacagaatcaaagaagactgacaaattagtcgacaatattcagagttccatgatcgcaacaaaggaaatcgagatcactcgttcaaagagtcgccgaaagaacaacaaggaaaagagagtggtttgcgtagtggatcgaggcagccggtccagtgacctatgggtttggcgaaagtatggtcaaaaacccatcaaaagttctccttatccaaggagttactatagatgtgccagctcgaaaggttgttttgctaggaaacaagtcgaacgtagccgcactgatccaaatgtttcagtaattacttacatctctgagcataaccatccattccccactctacgcaatactcttgccggctccactcgttcctcttcctccaaatgctcagatgtaactacttctgcctcatcgacagtctcccaagacaaagaaggaccggataaatcccatttgccttcctcccctgcttctcctccttatgcggccatggtggttaaggaggaggacatggagcaatgggacaatatggagttcgatgttgacgttgaagaagatactttcatacccgaattatttccagaggataccttcgctgatatggacaagcttgaggaaaattctcagactatgtttctctctcgcagaagcagcggaggcaacatggaagcccaagggaagaactctagtgatgatagggaggtcaatttacctagtaaaattctgaatagatag

SEQ ID NO: 2471 - DNA, 975 bp, Arabidopsis thaliana
  Clone ID: AT_F3L17.C1.o120.tg
atggccgtcgatctaatgcgtttccctaagatagatgatcaaacggctattcaggaagctgcatcgcaaggtttacaaagtatggaacatctgatccgtgtcctctctaaccgtcccgaacaacaacacaacgttgactgctccgagatcactgacttcaccgtttctaaattcaaaaccgtcatttctctccttaaccgtactggtcacgctcggttcagacgcggaccggttcactccacttcctctgccgcatctcagaaactacagagtcagatcgttaaaaatactcaacctgaggctccgatagtgagaacaactacgaatcaccctcaaatcgttcctccaccgtctagtgtaacactcgatttctctaaaccaagcatcttcggcaccaaagctaagagcgccgagctggaattctccaaagaaaacttcagtgtttctttaaactcctcattcatgtcgtcggcgataaccggagacggcagcgtctccaatggaaaaatcttccttgcttctgctccgttgcagcctgttaactcttccggaaaaccaccgttggctggtcatccttacagaaagagatgtctcgagcatgagcactcagagagtttctccggaaaagtctccggctccgcctacggaaagtgccattgcaagaaaaggaaaaatcggatgaagagaaccgtgagagtaccggcgataagtgcaaagatcgccgatattccaccggacgaatattcgtggaggaagtacggacaaaaaccgatcaagggctcaccacacccacgtggttactacaagtgcagtacattcagaggatgtccagcgaggaaacacgtggaacgagcattagatgatccagcgatgcttattgtgacatacgaaggagagcaccgtcataaccaatccgcgatgcaggagaatatttcttcttcaggcattaatgatttagtgtttgcctcggcttga

SEQ ID NO: 2472 - DNA, 1062 bp, Arabidopsis thaliana
  Clone ID: AT_T22A6.C1.o70.tg
atgactgttgagctgatgatgagcagctacagcggcggcggaggaggaggtgatggttttcctgcaatcgccgcggcggcgaaaatggaagataccgctttgagagaagctgcttctgcagggattcacggtgtggaggagtttcttaaactgatcggtcaaagtcaacaaccaacggagaagagtcagacggagataaccgcggtgactgacgtcgccgttaacagcttcaagaaggtcatttctctactcggtagatctagaaccggacacgctagattcagacgagctcccgcgtcaacgcaaacgccgtttaagcaaacgccggtggttgaggaggaggtggaggtggaggagaagaagccagaaacaagctccgtgttaacaaaacagaaaacagagcaatatcacggtggtggatctgcgtttagagtttattgtccaacaccaattcatcgtcgtcctcctctatcacacaataacaacaacaatcagaatcaaacaaagaacggttcgtcttcttcatctcctccgatgctcgcaaacggagcaccgtcaacgataaactttgcgccgtcaccaccagtctcagcgacgaactcattcatgtcttctcatagatgtgacaccgatagtactcacatgtcatcaggattcgagttcactaacccatctcagctctctggttcgagaggtaaacctcctttatcatcagcttcgttgaagagaagatgtaattcatctccctcaagccgttgccattgctccaagaaaaggaaatcaagagtaaaaagagtgattagagttccagcagtaagtagcaaaatggctgatataccatcagatgagttttcatggagaaaatatggtcaaaaaccaatcaaaggctctcctcatcctcggggatattacaagtgcagcagtgtaagaggttgtccggcgcgtaagcatgtggagcgtgcactagatgatgcgatgatgctaatcgtgacgtacgaaggagaccacaaccatgctttggttctcgagacgacgacgatgaatcatgacaaaactctttag

SEQ ID NO: 2473 - DNA, 1416 bp, Arabidopsis thaliana
  Clone ID: AT_F6A14.C1.o5.tg
atggatgaggctaaagaggaaaatcgaagactaaagtcatcattgagtaaaatcaagaaagattttgacatccttcaaacacaatacaaccaattaatggccaaacataacgaaccaaccaagttccaatcaaaagggcatcatcaagacaaaggcgaagatgaagacagagaaaaagttaacgaacgtgaagaacttgtctcgttgagcctaggcagacggttaaattcagaggttccaagtggttcgaataaagaagaaaaaaataaagatgttgaagaagcggaaggtgacagaaattatgatgataatgaaaaaagcagtattcaagggttgagtatggggattgaatacaaggctttgagtaatcctaatgagaagttagagattgatcataatcaagaaaccatgtcgttggagattagtaacaataataagatcagatcacaaaatagttttgggtttaagaatgatggagatgatcatgaagatgaagatgagattttgcctcaaaaccttgttaagaaaactagggtttcgatgaacgacggatgtcaatggaggaaatatggccagaaaatagctaaaggcaatccatgtccccgagcttactatcgttgcaccattgcagcttcttgtccagtaagaaaacaggtgcaaagatgttcagaagatatgtctatacttatctcaacgtacgaaggaacacataaccatccacttcccatgtcagcaactgccatggcctctgccacttccgctgccgcctccatgcttctctccggcgcctcctcctcctcatccgccgcagctgatcttcatggccttaacttctctctttccggcaacaacatcactccaaaacctaaaactcatttcctccaatccccttcttcttctggccatccgaccgtcactctcgacctcacaacctcctcctcgtcgcagcaaccgttcttatcaatgctcaatagattcagctctcctccaagtaatgtctcacgatctaatagttatccttcaaccaatctcaacttttcaaacaacaccaacacattgatgaattggggtggtggtggtaatcccagtgatcaataccgtgcagcttacggcaacattaacacccatcagcaatcaccttaccacaaaatcattcaaacccgaaccgccgggtcatctttcgatccgtttggaagatcatcttcatcacattctccacaaataaatcttgatcatatcggaatcaagaacatcatcagtcaccaagtgccatctttaccggctgaaacaatcaaggcaatcacgacagatccaagtttccaatcggctttggcgacagctctatcttccatcatgggcggcgatttaaagattgatcacaatgtgactagaaatgaagctgagaagagcccttaa

SEQ ID NO: 2474 - DNA, 1458 bp, Arabidopsis thaliana
  Clone ID: AT_F20N2.C1.o13.tg
atgagtgattttgatgaaaacttcatcgaaatgacgtcgtattgggctccaccatccagtcctagcccaagaacgatattggcaatgctggagcaaaccgacaatggtctgaatccaatcagtgagatcttccctcaagaaagcttgccaagagatcatactgatcaatctggacaaagatctggtcttcgtgagagactggctgcaagagtaggattcaatcttccaacactcaatacagaagaaaacatgagtcctttggatgcatttttcaggagctcgaatgttcctaattctcctgtcgttgcaatctctccaggattcagtccatcagcactattgcatactcccaatatggtcagtgattcttcccagattatccctccgtcttcagccaccaattacggacctctagagatggtggaaacttccggtgaagacaatgcagcgatgatgatgttcaacaacgatcttccttatcagccgtacaatgttgatctgccttctctagaagtctttgatgatattgcaacggaagagtccttttatatcccatcttatgaacctcatgttgacccaattggaactcctttagtcacatcctttgaatctgaactcgttgacgatgcccataccgacatcatctccattgaggacagtgagagcgaggatggaaacaaagatgatgacgacgaggacttccaatacgaagacgaagacgaagaccaatacgaccaagatcaagatgtagatgaagatgaagaggaagaaaaagatgaagacaatgttgcattagatgatcctcaacctccacctccaaagagaaggagatatgaggtatcaaacatgattggagccacaagaacaagcaagacacaaaggatcatacttcagatggaaagcgacgaagacaatcctaacgatggttatcgctggagaaaatacggtcagaaagtcgtcaaaggaaatcctaatccgaggagttacttcaagtgcacaaacatcgagtgcagagtgaaaaaacatgtggagagaggagcagacaatatcaagttggttgtgactacatacgatgggatacacaaccatccttcaccacctgcacgtagaagcaattccagttcaaggaaccggtctgcaggggcaacaatacctcaaaatcagaatgatcgaaccagtcggttaggtagggctcctcctactcctactcctcctactcctcctccttcgtcttacacacctgaggagatgaggcctttctcttcgttggctacagaaattgatctgacagaggtttatatgaccggaatctctatgctgccgaatataccggtttacgagaattcgggttttatgtaccagaatgatgaaccgacgatgaatgcgatgccggatggttcagatgtgtacgatgggatcatggaacgcctgtattttaagtttggtgtcgacatgtag

SEQ ID NO: 2475 - DNA, 768 bp, Arabidopsis thaliana
  Clone ID: AT_T20L15.C1.o170.tg
atggagaagttgcttcacgggcatgggtgcgccaaccagctgctcatcatggaccagaccgagtcagactcgtccatggaaagggaggatttggccaagtccgtcctccattgtttctcagatgcgctctccatcttgatcgatactaatgaccaccaagacgatcaatccaataactcatctcctcaggactcttctcctgtgcttgagagctccaggaaaccacttcacaagaggggaagaaagacatctatggcagagagctcagactaccatagacacgaatcttcaaccccgatctaccacgacggcttcctctggaggaaatacggacaaaagcagatcaaagaatctgagtaccaaaggagttactacaagtgtgcctacaccaaggaccagaactgtgaagcaaagaagcaggttcaaaagatccaacacaatcctccattgtactcaaccacttacttcggccagcacatatgccagcttcatcaagcttatgcaactttccccattgacacatctgacttcgaagagcacgagggatcccacatgatccgattcggtcaccccaacatcagcttctcctcctccacctctaacctccgccaacatcagaatcatcaggatcgcatcaaagatgaatacatgaaaccggtgatagcagaagattggtctccatcccagtggatgtcgtccgaggttgccctcgccgtggaggctttcgagtttaatcctttctggacatctcacgacttatcatcatga

SEQ ID NO: 2476 - DNA, 1545 bp, Arabidopsis thaliana
  Clone ID: AT_F7A19.C1.o5.tg
atgtcggaaaaggaagaagctccgtcgacatcgaagtccaccggagctccgtcgcgtccgactttatctcttcctccacggccgtttagtgagatgttctttaacggtggcgttggattcagtcctggtccgatgactctggtctctaatatgttccctgattccgatgagtttaggtctttctctcagcttctcgctggagccatgtcttctccagcgactgcagctgctgctgctgctgctgcgacggctagtgattaccagagacttggtgaagggactaatagctctagtggtgatgttgacccgagattcaagcaaaacagaccaaccggtttgatgatttctcaatctcaatcgccgtcgatgttcaccgtaccgcctggtttaagtccagctatgttgctcgattcaccaagctttttgggtcttttctctcccgttcagggatcatatggaatgacacatcagcaagctctagctcaagtcactgctcaagcagttcaagccaatgccaatatgcaaccacaaacagagtaccctcctccctctcaagttcaatcattttcatcgggtcaagcgcagatcccgacctcggctccactaccagctcaaagagaaacctcagatgtaaccatcatagagcacaggtcacaacagcctctaaatgttgacaaaccagctgatgatggctataactggcgaaaatatgggcaaaagcaagttaaaggtagcgagtttccacgaagctattacaagtgtactaatccaggatgtcctgtcaagaagaaggttgagagatctcttgatggacaagtaacggagattatctacaaaggtcagcacaatcatgaacctcctcaaaacactaagcgaggtaacaaagataacaccgcgaatataaatgggagttcgataaataacaatcgcgggagttctgaattgggggcatcacagtttcaaactaatagctccaacaagactaagagagagcaacatgaagcagtaagtcaagctacgacaacagagcacttgtctgaggcaagtgacggtgaagaagttggtaatggagaaactgatgtgagagagaaagatgagaatgagcctgatcccaagagaagaagtacagaagttcggatttcagaaccagctcctgctgcttcacatagaactgtgacagagcctagaattattgtccaaacgacgagtgaagttgatcttctagatgatggatataggtggcgtaaatatggacagaaagttgtcaaagggaatccttatccgaggagctactacaagtgcacaacaccaggatgtggtgtgaggaaacatgtagagagagcagcaacagatccaaaagctgtagtaacaacatatgaaggaaaacataaccatgaccttcccgctgctaaatcaagcagccatgccgctgcagcggcacagttaaggccagataatcgacctggcggtttggctaacttaaatcaacagcagcagcaacagcccgttgcgcggctaaggcttaaagaagagcaaacaacttga

SEQ ID NO: 2477 - DNA, 726 bp, Arabidopsis thaliana
  Clone ID: AT_T12I7.C1.o5.tg
atgttttcaaacatcgatcacaaggctgtggcagcactccttcatggccagggatgcgctaacatcctcaagacggtcctcgacaactgtaaagttagctctgtttcaacagaacctctcattaacaccattcttgattccttttcactagctctatcttctgtgaattctcctaatcgtcaaccacaccatgagtcttcttctcgagacatggcaggtcttgtgcctcaaagatcatcaaagaagaagatttgcggagtaaaaggtttagagatttacagagatgattcccccaatccccgccttgatgacggcttcacctggaggaaatatggacaaaaaaccatcaaaacctctttgtaccaaaggtgttactatcgttgtgcctatgcaaaagaccaaaactgctatgctacaaagcgggtgcagatgatccaagacagtcctccagtttacagaaccacttatttgggacaacatacatgtaaagcctttggggtgcatgataatacgtatggctctgaaatgataaacttcgaccaagttgtatctgaatcggttatgcgtcaacttgcaacaattggtgaacaagctgttctcatggaggacgaagctaaccatatcatgaaccaagaatatgatattaatgattatttggtggatgatgaagtcttttgggggaatgaatttcctctattttcatcggaagacctgatgttgttttga

SEQ ID NO: 2478 - DNA, 750 bp, Arabidopsis thaliana
  Clone ID: AT_T12I7.C1.o1.tg
atgttctccaacatcgatcaaacagctgtggcagcactcctccgtggccaaggatgcgctaacagtctcaagaggctcctcgaaaaccacaagttaagctcagattcaacagagccgctcatctacaccatactcaattctttctcacttgctctctcttttgtggacccgcctagtcttctaccacacaatgagtcttctcttcaaaacatgacaagtcatgttcttcagagatcatcaaagaaaaaatattatggagcagaagatttagagtattacagagacgaatccccgactccacgccccgatgacggcttcacctggaggaaatatggacaaaaaactatcaaaacctcaccgtaccaaaggtgttactatcggtgtacctatgcaaaagaccaaaactgcaatgctagaaagcgggtgcagatgatccaagataaccctccagtgtacagaactacttatttgggaaaacatgtgtgtaaagctgttgcagttcatgatgatacatatggttctgaaatgataaaattcgaccaagttgtatctgaatcggttatgcctcaactcgcaacaattgacgaacaagcaattaccatggaggacgaagccatagaccatatcatgaaccaagaatgtgatattaatgatttttctgtggatgatgacccattttgggctagtcaatttcctccattttcatcggaagacattatgttttttgacaatattgctaatcttgattag

SEQ ID NO: 2479 - DNA, 540 bp, Arabidopsis thaliana
  Clone ID: AT_MBK23.C1.o9.tg
atggacagagaagacataaatcctatgttaagccgcctagatgtcgaaaacaacaacaccttctcttcctttgtagacaaaaccctaatgatgatgcctccatcaacattttccggtgaagtggaaccttcatcttcttcttcttggtatccagaaagctttcatgtgcatgcgccgccattaccacctgagaatgatcaaataggtgagaaagggaaggagctgaaagagaagagatcgaggaaagttccaaggattgcgtttcatacgaggagcgatgatgatgttcttgatgatggttatcgttggcgaaaatatgggcagaaatctgtcaagcacaatgctcatcccaggagctattacagatgtacgtaccacacatgcaacgtgaagaaacaagtgcagagattggcaaaagatccaaacgtcgtcgtaacgacctacgaaggcgttcataaccatccttgtgagaagctcatggagactcttaatcctcttctcaggcaactccagttcctctccagtttctctaatctttga

SEQ ID NO: 2480 - DNA, 1464 bp, Arabidopsis thaliana
  Clone ID: AT_F1O13.C1.o1.tg
atggctgaggtgggaaaagttctggctagtgatatggagttagaccattcaaatgagactaaagcagtggatgatgttgttgccactactgataaagcggaggtcataccagtggctgtaactagaactgaaaccgttgttgaaagtttggaatctactgactgtaaggagcttgaaaaacttgttccacatacggtagcttcgcagtcggaagtagatgttgcttccccggtatccgagaaagcaccgaaggtttctgaaagtagcggtgcattatctttgcagtctggttcggaagggaatagtccttttattcgtgagaaggttatggaagacggatacaactggcggaaatatggacagaaacttgtgaaaggaaatgagtttgtaaggagctattacaggtgcactcaccctaactgcaaagcgaaaaaacagttggaacggtctgcgggtggacaagtcgtggataccgtttactttggggaacatgatcacccaaagcctcttgctggtgctgttcctatcaatcaggataagcgaagtgatgtcttcacagctgttagtaaaggtgaacaaagaatagatatagtttctctaatttataagctgtgcattgtttcttatgatatcatgtttgtagagaaaacatctggatccagtgttcagacacttcgtcaaaccgaaccaccaaagatccatggaggattacatgtttcagttattccaccagctgatgatgtgaaaactgatatttcacaatcaagtaggataacgggggacaacactcacaaggattataatagtcctaccgcaaagcgaaggaagaaaggagggaacattgagctgagtccagtggagaggtcaaccaatgattcacgcattgtggttcacactcagactctgtttgatattgtgaatgatgggtaccgatggcgtaaatatggtcagaaatcagtaaaaggcagcccatatccaaggagctactatagatgttcaagccctggatgccccgtcaagaaacacgtagagaggtcatctcatgacacaaagttgcttataacaacttacgagggaaaacacgaccacgatatgcctccaggaagagttgttactcataataacatgctggactcggaagttgatgataaagaaggagatgccaacaagactccacagagctcaactcttcaatccattacaaaagaccagcatgtcgaagatcacttaagaaagaaaacgaagactaatggctttgagaaaagtcttgatcaaggtccagttttggatgagaagctgaaggaggaaataaaagagagatcagatgcaaacaaagatcacgcagccaatcacgccaagccggaagcaaagtcagatgataaaaccactgtttgtcaagagaaggcagtaggaaccctggagagcgaggaacaaaaacccaagacagagcctgcccaaagctaa

SEQ ID NO: 2481 - DNA, 750 bp, Arabidopsis thaliana
  Clone ID: AT_F28G11.C1.o3.tg
atggtttccaacattgatcacaaggctatggaagcactcctccgtggccaaggatgcgctaacaacctcaagattctccttgaaaacggcgaaataagctcagtttcaacagaaccactcatccacaccattctcgattctttctcacttgctctgtcttttatggattctcctaatcatccaccataccatgaatcctcttctcataacatggcaagtcatatgtcccggagatcatctaagcaaaaactttgtgtagcagaaggtttagtgaattacaatcacgattcccggactatgtgccccaatgatggcttcacctggaggaaatatggacaaaaaaccattaaagcctcagcgcacaaaaggtgttactatcggtgtacctatgcaaaagaccaaaactgcaatgctacaaagcgggtgcagaagatcaaagacaaccctccagtgtacagaaccacttacttgggaaaacatgtgtgtaaagcttttgcagttcatgatgatacatatagttccacgatgattcgattcgaccaagttgttcctgaaccgattatgccgcagctcacaacaattgaccaccaagtaattaccgtggaggaaaactccgcagaacatatcatgaaccaagaatgtgatattaatgattatttggtggatgatgacccattttgggctagtcaatttcccccgtttccatcgagtgacacaatgttcttggaaaacatttctgcttttgattag

SEQ ID NO: 2482 - DNA, 1164 bp, Arabidopsis thaliana
  Clone ID: AT_T17F3.C1.o16.tg
atgatcaaagaggagaccgtttcatacttccaaactttcgatggtgttatggcagaatctgacaaggaagaggagcttgatgcaacaaaagcaaaggtggagaaagttcgggaagaaaatgagaaattaaagctcttactctctacgattcttaataattacaactctcttcaaatgcaagtctctaaagttctcggacaacaacaaggagcttcgtctatggagctagaccacattgatcgtcaagatgaaaataacgactatgatgtggatatatcacttaggcttggaagatcagagcaaaagatctctaaaaaggaggaaaataaggtggacaagatttctactaagaacgtagaggagtcaaaagataaaagatctgcactgggttttggatttcagattcaaagctatgaagcctcgaaactagatgatctttgtaggcaggttaagcttgcaaacgctgaaaataaatgtgtatcttcgaggaaagatgtcaaatcagttagaaatgaaaaccatcaagatgttttggaggagcatgaacaaacaggtttgaagaaaactagggtttgtgttaaagcatcatgtgaagacccatcaataaacgacggttgccagtggaggaaatatggtcaaaagactgcgaaaaccaatcctctcccacgagcctattaccgttgctccatgtcgtcaaattgtcccgttagaaaacaggtgcaaagatgtggagaagaagaaacctccgcttttatgacaacgtacgaaggaaaccatgaccatcctctccccatggaagcaagccacatggcagctggaacttccgcggctgcctccttattacaatctggctcctcctcttcctcctcctccacctcagcgagtctaagctatttcttcccttttcaccacttctctatctccaccactaactcgcacccgactgtaacattggacctcacacgaccaaactatcccaatcagttaccagacgactaccctctatcgtcctcctctttcagtctcaacttttcctctccagatcctccacctccatcatcgcatgaccacaccttgaactttagtggcttgcgaacacaagctccgttgagtacagattcattattggcccgttatcgaacgagactttccggacagcaataa

SEQ ID NO: 2483 - DNA, 1707 bp, Arabidopsis thaliana
  Clone ID: AT_M3E9.C1.o130.tg
atggctggtattgataataaagctgctgtaatgggagaatggttcgactgtagtactactaaccacaggaagagatcgaaagcggaacttggtagagagttttctttaaattacatcaagaatgaggattctttgcaaaccacctttcaagaaagttcacgaggagctcttcgtgaaaggattgctgcgagatccgggtttaatgcaccgtggttaaacactgaggatattcttcagtcgaaatctttaaccatctcttctcctggtcttagtcctgcaactctgttagagtctcctgttttcctctcaaaccctttgctatctccaacaaccgggaagctctcatcagtaccttctgataaggctaaagctgagttatttgacgacattaccacatccttagccttccaaaccatttcaggaagtggccttgatcctactaacatcgctttagaacccgatgattcccaagactatgaagaaagacagctcggcggtttaggagactcgatggcttgttgtgcacctgcagatgatggatacaactggagaaaatatggacaaaagctagttaaaggaagtgagtatccgcggagctattacaagtgcacgcacccgaattgtgaggccaagaagaaggttgaacggtctcgggaaggtcatattatagagatcatatacacaggagatcatatacacagcaaacctccacctaaccgccggtcagggattggatcatccggtactggccaagacatgcaaatagatgcaaccgaatacgaaggttttgctggaaccaatgagaacatagaatggacatcacctgtatctgcagagctcgaatacggaagccattcaggatcaatgcaggttcaaaacgggactcatcagttcgggtatggtgatgcagcagctgatgccttatatagagatgaaaacgaagatgatcgcacgtcccacatgagtgtttccctgacttacgatggagaggtagaagagtccgaatcaaagagaaggaaactagaagcttatgcaacagaaacgagtggatcaaccagagccagccgtgagccaagagttgtggtgcagaccacaagtgacattgacatcctcgatgatggttatcgctggcgcaagtatgggcaaaaagtcgttaaaggaaacccgaatccaaggagctactataaatgcacagctaatggatgtaccgtaacgaagcatgtagagagagcctctgatgacttcaagagcgtactaacaacttatataggcaagcacacccacgttgtaccagcagcacgcaacagcagccacgtcggtgcaggcagttcagggactctccaaggcagtttagcgactcagacccacaaccacaatgtgcactatccaatgccacacagtagatctgagggactggccacagccaactcatctctatttgacttccagtcacacctgaggcatcctacaggtttctccgtttacataggccaatctgagctttctgatctttcaatgcctggtctaactattgggcaagagaagcttaccagcctgcaggcgcctgacattggggatccaactggcctaatgttgcagttagcagcacagccgaaggtggaaccagtgtcaccacaacagggacttgatttgtcagcgagctcattgatatgcagagagatgttgagtagattacgacagatatga

SEQ ID NO: 2484 - DNA, 915 bp, Arabidopsis thaliana
  Clone ID: AT_F9D16.C1.o20.tg
atggacgaaggagacctagaagcaatagtcagaggctactccggctccggagacgcgttttccggcgaaagttccggtacgttttcaccttcgttttgcctaccgatggagacgtctagtttctacgaaccggagatggagacaagtggcttagatgagctcggtgaactttacaaacccttttaccctttctccacacaaacgatcctcacaagctcggtctctctccctgaagattcaaaacctttccgagatgacaagaaacaacgatcacatggttgtcttttatccaacggatcaagagctgatcatatccgaatttcagaatccaaatcaaagaaaagcaagaagaatcaacagaagagagttgttgagcaagtgaaagaagagaatctgttgtcggacgcatgggcgtggcgtaaatacgggcagaaacccatcaaaggatctccatacccaaggagttattacagatgcagtagctcaaaagggtgtttggcaagaaaacaagtcgaaagaaatcctcaaaacccggagaaattcaccataacatacactaatgagcacaatcatgaactaccaacccggagaaactcattagccggttcgactcgagcaaaaacttcccaacccaaaccaaccttaaccaaaaaatccgaaaaagaagttgtttcttcccctacaagtaatcctatgatcccatccgctgatgaatcttctgttgcggttcaagaaatgagcgttgcggaaacgagtacgcaccaagcggctggagcaatcgagggccgccgcttgagtaacggtttaccatcggatttgatgtccgggagcggaacttttccaagttttaccggtgacttcgatgaactattgaatagccaagagttcttcagtgggtatttatggaattactag

SEQ ID NO: 2485 - DNA, 2349 bp, Arabidopsis thaliana
  Clone ID: AT_F6I18.C1.o160.tg
atggggccattagaagccctgaagaaaatgaagaatacaaacaatttcgttttttccattgaaatattttgctattttcgtgctgagtcttatcatacattaaagtacgtatatgtttttcctctttcagtcactattttggaagaacgcaaaacaaactccacttttcttgcagttgtttcctctataaaacaaaacccacgagatacagaaaaagaggacaagagagaatcgtccatggaagaagacactggtatcgacgaagctaagacatacacggtggagaagagcgagaaagtggagccggagaaggacggactgagtcaattcagagacgaggaaaaatcacttggtgcggatatggaagatttacatgatgagactgtgcgagaaaccctaggcaaggatcaggttcaaggtgttcgagaaaattcctctgtggaaccaaatgttgaagatgtattagaagtgaatgagactgatagcgtcaaggaaactgttgtaagtgcgattgtgccggttgatgaagtggaagagaatcgtcaggtagaaacatctccttctctggctgcatcgtcagactcattgacagtgacgccatgtctatctttggatcctgcaactgcttcaaccgcacaagatttaccactggtttcagttccaactaaacaagagcaaagatcagattcgccggtggttaacagattgtcggttactcctgttcctaggacaccggctcgtgatggttataattggagaaaatatggacagaagcaggttaagagtcccaagggctcacggagttactacaggtgtacatacactgaatgttgtgctaaaaaaattgaatgctccaatgattcaggcaatgtggtagagattgttaacaaaggtttacatactcatgaacctccccggaagactagcttctccccgagagagattagagttacaacagctatccggcctgtttcagaggatgatacagtagtagaagagctatcaattgttcctagcggttcagatccgtctgcttctactaaagaatacatctgtgagtcgcaaacactcgttgaccggaaaagacactgtgagaacgaagctgtggaggaaccagagccaaaacgaaggcaaagttcagattctgtctccaaacctggaaagaaaaacaaattcgtagtacacgcagctggtgatgttggtatctgtggtgatggatacaggtggcgtaaatacgggcagaaaatggtgaaaggaaatcctcatccaaggaactactaccgatgcacttcagcgggatgtccagttcgtaaacacattgagacagcagtcgagaacacaaaagcagtaataatcacatacaaaggagtacacaaccacgacatgccggtgcctaagaaacgccatggtcctccaagctcaatgctcgtagctgcagccgctccaacatcaatgagaaccaggacagacgatcaggtgaacattccgacttcaagccagtgctcggtggggcgagaaagtgagaagcagagtaaagaagcattggacgttggtggagagaaatgtgttcgtgctctccgatggcgagtcttcgatgctttcacgcgatcgatctcttcatttcatgggattgagttttccgggaccagcatttctcatgggaccgtaattccgaatcgatctctcactaggaatttgccatggtacagtcattggtatcgctctcaagatcgttgtttctcttcgaacacaaaggatactgatgaagatgaagaaagcagtgaaggagaggatgatgatgaggaggagggggaagactttgaggattcggcggatatggaagtagaaagggaatattcaccggcggagaaagtggaagaggcggaggagatagggtacaaggtgatgggtcctcttaaaccttcggagagacttttcaaaccctatgaaccagtgtttgccattgttcagattggttcgcatcagtttaaagttagcaatggggactccattttcaccgagaagttgaaattctgtgacatcaatgataagttggaactaaccaaggttcttctattgggctcggcaagccagacgattattggtaggcctattttgccagatgcgacagttcatgctgtagttgaagagcatgctttggatgaaaaagtgctcattttcaaaaagaaacgaagaaagaattataggagaacgagaggacatcgacaggaattgacgaagttgagaataaccgatatacaaggaattgaaaaaccagaaccgaagatcgtccataagccttcgaaagaagctgttacagaacagacgaaggctgagctagttgcttag

SEQ ID NO: 2486 - DNA, 5688 bp, Arabidopsis thaliana
  Clone ID: AT_F16J13.C1.o90.tg
atgtcggagaaggaagaacttccgttgacattgacgtccatcggagcggccaccgcgactagtgattatcatcagagagtaggaagttccggtgaagggattagtagctcgagtagtgatgttgacccgaggttcatgcagaatagccccacgggtttgatgatttcccaatcgtcgtcgatgtgcaccgtaccgcctggcatggcagcaacaccaccaataagctcaggttccggtttatctcagcagcttaataattcttctagttccaagttatgtcaagtggaaggatgtcaaaaaggagcaagagatgcatctggtcgttgcatttcccatggcggtggacgtagatgccagaaacctgattgccagaagggagctgaaggtaaaacagtgtactgtaaagcccacggaggtggtcgcagatgtgaatatcttggatgcaccaaaggcgcagaaggcagtactgatttttgtatagctcatggaggtggtcgaagatgcaaccatgaagattgcacacgatctgcttggggaagaacagaattctgtgtcaagcacggtggaggagcgagatgcaaaacatacggctgcggaaaaagcgctagtggtcctttgccattctgccgagcccatggtggtggtaaaaaatgcagccatgaagattgcacaggatttgctaggggaagatcaggactctgtctcatgcacggtgggggaaagagatgccaaagagagaactgcactaaaagcgctgaaggtctttcgggactctgcatatcccatggtggtggtcggcgatgtcaatctattggatgcacaaaaggagcgaaagggagcaaaatgttctgcaaagcatgcataactaaaaggcctctaacgattgatggaggaggaaatatgggaggggtaacaacaggtgatgccttgaactatctcaaagctgtgaaggacaagtttgaagacagtgagaaatatgacactttccttgaagtcttgaatgactgtaaacatcagggagttgacactagtggcgtcatagccagattaaaagatttgttcaagggccatgacgacttacttttgggttttaatacctacttgtcaaaggagtaccaaataaccattctgcccgaggatgatttccctatcgattttcttgacaaggttgagggaccttatgaaatgacatatcagcaagctcaaacagttcaagccaatgccaatatgcaacctcaaactgagtacccttcttcctctgcggttcaatcattttcatcgggtcaacctcagatccccacctcagctccggattcttcactactagctaaaagtaatacctcaggtataactatcatcgagcacatgtcacaacagcctctaaatgttgacaaacaagttaatgatggctataactggcaaaagtatgggcaaaagaaagttaaaggcagcaagtttcctctaagctattacaagtgcacatatctaggatgtccttccaagaggaaggttgagagatctcttgatggacaagtagcagaaatcgtctacaaagatcgacacaatcacgaacctcctaaccaaggaaaagatggtagcaccacatatctaagtgggagttcgacacacatcaattgcatgagctctgaattgacagcatcacagtttagctccaacaagactaagatagagcaacaggaagcagcaagtctagctacgacaatagagtacatgtctgaggcaagtgacaatgaagaagacagtaatggagaaactagtgagggagagaaagatgaagacgagcctgaaccaaagagaagaattacagaagttcaggtttcggaactagctgatgcttcagatagaaccgtgagagagcctagggttattttccaaacaacgagtgaagttgataatttagatgatggatataggtggcggaaatatggacagaaagttgttaaagggaatccttatccaaggttttcctcctctaaagattatgatgtcgtaatcagatacggaagagcagatataagcaatgaggatttcattagccatcttcgtgcttccctctgccggagagggatttctgtctatgaaaaatttaatgaagtggatgcacttccaaaatgtagggttttgattatagtattaacaagcacatatgtcccttcgaacctcttaaacattcttgaacaccaacatacagaggatcgagtggtttatccaattttctacagactatcaccatatgattttgtctgtaacagcaagaattatgagagattttatctccaagatgagccaaaaaaatggcaagctgctttgaaggaaataactcagatgcctggctacacattgacagataagtctgaatctgaacttatagatgagattgtaagagatgctttaaaggtgctatgttctgctgataaggtgaacatgattgggatggatatgcaagtagaggagattttgtcactgctatgcattgagtcccttgatgttcgcagcattggtatatggggtacagttggtataggaaaaacaaccattgctgaagagatctttcgcaaaatctctgtccaatatgagacctgtgtcgtccttaaggacctccacaaagaagttgaggtaaaaggtcacgatgctgtgagagagaattttctgtctgaagttttagaggtagaacctcatgttatccggatatctgacattaaaacaagcttcttgagaagtcggcttcagcgtaaaaggatccttgttattcttgacgatgtgaatgattacagagatgttgacacctttttggggacgcttaactattttggtccaggaagcagaataatcatgacctctagaaatagacgtgttttcgtactatgtaaaatcgatcatgtctatgaggttaagccattagatattcctaagtctctactacttcttgatcgtgggacatgtcaaattgttttgtcacctgaggtttacaagacattgtcacttgagctggtcaaattttcaaatggaaatccccaggttcttcagttcttgagcagtattgacagagaatggaataagttatcacaagaagttaagacaacatctcccatttacatcccaggtatatttgaaaagagctgttgtgggcttgatgacaacgagaggggtatatttttggacattgcatgtttctttaataggattgataaagacaatgtcgcaatgttgctggatggttgtggtttctctgcacatgtcggatttagaggccttgttgacaaatcactgttgacaatatcacaacacaacttggtggacatgctcagttttatccaggcaactggtcgagaaattgttcgccaagaatcagctgacagaccaggagaccgcagcaggttgtggaatgccgactatatcagacacgtattcataaatgacactggcacatcagctattgagggcattttcctagacatgttgaatcttaaatttgatgcaaatcccaacgtgttcgagaaaatgtgtaaccttagactgttgaaattgtattgctccaaagcggaagagaagcatggagtatcttttccacaaggtcttgaatatttgccgagcaagctaaggcttctccattgggaatattatcctctaagttctttgccgaaaagttttaatccagagaaccttgtcgagcttaacttgccaagtagctgtgcaaagaaactttggaaaggaaaaaaggcaaggttttgtacaaccaattcaagtctggaaaagcttaaaaagatgagacttagctactccgaccagttaactaaaatcccaagactttcaagcgcaacaaatcttgagcatattgatcttgaaggttgcaacagtttgttgagccttagccagtccatttcttatcttaagaagcttgtttttctgaatttaaagggctgctcgaagctggagaatattccatctatggttgatttagaatcgcttgaggttctaaatctttcgggttgttcaaagctagggaacttcccggagatctcaccaaatgtgaaagaactgtacatgggtgggactatgatacaagaaatcccgtcatcgattaagaacttggtattgcttgagaaactggacctggaaaacagtagacatctcaagaatcttccaacaagcatctacaagttgaagcatcttgaaactctaaatctttcaggctgcataagcctggagcgatttccagactcgtcgagaaggatgaaatgcttaaggtttttggatttaagcaggacagacattaaagagctgccctcttccatatcgtatctgactgctcttgacgaactattattcgtagactccaggagaaactcgccagttgtaaccaatcccaatgccaattcaactgagttgatgccttctgagtcaagtaagcttgagatcttaggtactccggcagataacgaagtagttgttggtggtacggtagagaaaacccgtggtattgaacgaacgccgactattttggtgaagtcgagagagtatctaattcccgatgatgttgtggcggttggtggtgatattaaggggctaagaccaccagtacttcagctccaaccagcaatgaaactatctcatattcctcgaggatcaacttgggatttcgttacgcatttcgctccacctgaaacagttgcgccgccgagttcctcttcagaagccagggaagaggaagtggaaacggaagagacgggagctatgtttatcccattgggggataaggagacatgctcattcactgtaaacaagggtgactcctcaaggacaatatctaatacgtcgccgatttatgcctccgaaggatctttcatcacgtgttggcagaagggtcaacttctgggacgaggatcattagggtccgtatatgaaggcatttcagcagacggggacttctttgctttcaaggaagtttcactacttgatcagggaagtcaggcacatgaatggatacaacaagtcgagggggggattgcgctacttagtcagcttcagcatcagaatatcgtgcgatatcgtggcacaactaaggacgagtcgaatttgtacatttttcttgaacttgtaacccaagggtcccttcgaaaactctaccaaagaaaccagcttggggactctgtagtctccttatacacaagacagattcttgatggattgaaatatctccacgataaaggttttatacacaggaacattaaatgtgcaaatgtattggtggacgctaatggaacagttaaacttgcagattttggattggctaaggtaatgtccctctggcgaactccgtattggaattggatggctccagaggttattcttaacccgaaggattatgatggttatggaactccagctgatatatggagccttgggtgtactgtgctagaaatgttgactggtcagattccctactccgatctggaaatcggtacagccttgtataacattggaacgggtaagcttccgaaaatacctgatattctatcgctagacgcccgggatttcatacttacgtgtctcaaagtgaacccggaagagcggccaactgcagctgagctgcttaaccatccatttgtgaatatgccattaccatcctcgggctcaggttcagtatcttcgctcctccgtggatga

SEQ ID NO: 2487 - DNA, 975 bp, Arabidopsis thaliana
  Clone ID: AT_F9D16.C1.o280.tg
atggaaggaagagatatgttaagttgggagcaaaagacattgctaagcgagcttatcaatggatttgatgcggccaaaaagcttcaggcacgacttagagaagctccgtcgccgtcgtcatcattttcatcaccggcgacggctgttgctgagactaacgagattctggtgaagcagatagtttcttcctacgagagatctcttcttctgctaaactggtcatcctcaccgagcgtacaacttattccgacgccggttactgtagtcccggtggcaaatcccggcagtgttccagaatctccggcatcgataaacggaagtccgagaagtgaagagtttgccgatggaggaggttctagcgagagtcatcatcgccaagattacattttcaattcaaagaaaagaaagatgttaccaaagtggtcagaaaaagtgagaataagcccagagagaggcttagaaggacctcaagatgatgtctttagctggagaaaatatggtcaaaaagacattttaggcgccaaattcccaaggagttattacagatgcacacatcgtagcacacaaaactgttgggcaacgaaacaagtccagagatcagacggggatgctacggttttcgaagtgacgtacagaggaacacacacttgttcgcaggcgatcacaagaacaccaccattagcctcgccggagaagcgacaagacaccagagtcaaaccagccattacccaaaagccaaaggatattctcgagagtcttaaatccaacttaaccgttcgaaccgatgggcttgatgatggtaaagacgttttctcgttccctgatacgccgccgttttacaattacggaactatcaacggcgagttcggccacgtggagagttctccgatcttcgacgttgttgactggttcaatccaacggtcgagattgacacaactttccccgcgtttttacacgagtcgatttattattaa

SEQ ID NO: 2488 - DNA, 825 bp, Arabidopsis thaliana
  Clone ID: AT_MNL12.C1.o11.tg
atggaagaagaaggttatcagtgggcaagaaggtgtggaaacaacgccgttgaagatccttttgtttatgagccacctcttttctttctgcctcaagaccaacatcatatgcatgggctcatgccaaatgaagatttcattgccaacaagttcgtcacatcaacactttactccggtccacgaatccaagatattgcaaacgctctggccttggtcgaacccctgacccacccagtccgagaaatctctaaatcaacagttcctcttttggaaagaagtactttgagcaaggtggataggtacactttaaaggtgaagaacaatagtaatggaatgtgtgatgatggatacaaatggagaaaatatggccaaaaatcaatcaaaaatagccctaacccaaggagttattacaagtgcacaaacccaatatgcaatgcaaagaagcaagtggagagatcaattgatgagtctaacacatatatcattacctacgaaggtttccacttccactatacttaccctttcttcctacccgataagacacgtcaatggcccaataaaaaaacgaaaatacataaacataatgctcaagatatgaacaaaaaatctcaaacccaagaagagagcaaagaagcacaattaggtgagctcaccaaccaaaatcatccagtcaataaagcccaagaaaacacaccggcaaatctcgaagagggattgttttttccggttgatcagtgtcggccgcaacaagggcttctagaagatgtggtagctccggcaatgaaaaatattcctaccagggacagtgttttgacagcttcttga

SEQ ID NO: 2489 - DNA, 486 bp, Arabidopsis thaliana
  Clone ID: AT_K9E15.C1.o3.tg
atgggtttcgatatatgttatatcgacgttggatgcaggaagaagaaacatagcgaaagtagggtaaagaaagtggtttccataccggctatagacgagggagatctatggacttggcgaaagtacggtcaaaaagacatcttaggttctcgttttccaaggggttactacaggtgcgcttacaagttcacgcatggttgtaaagctacaaaacaagtccaacggagcgagaccgattcaaacatagtcttccaaaacaaagacgaaccaaatcaaccccacttgccttcctcctccactcctcctggaaacgcggctgtcttgtttaaaatgacggacatggaggagtttcaggacaatatggaggtggataatgacgtcgtagatacacgtacactggcattgtttccagagtttcaacatcagccggaggaagaatacccatggtcaacattcttcgatgattataatttttgtttttattga

SEQ ID NO: 2490 - DNA, 864 bp, Arabidopsis thaliana
  Clone ID: AT_F23O10.C1.o11.tg
atgaacgatcctgataatcccgatctgagcaacgacgactctgcttggagagaactcacactcacagctcaagattctgacttcttcgaccgagacacttccaatatcctctctgacttcggttggaacctccaccactcctccgatcatcctcacagtctcagattcgactccgatttaacacaaaccaccggagtcaaacctaccaccgtcacttcttcttgttcctcatccgccgccgtttccgttgccgttacctctactaataataatccctcagctacctcaagttcaagtgaagatccggccgagaactcaaccgcctccgccgagaaaacaccaccaccggagacaccagtgaaggagaagaagaaggctcaaaagcgaattcggcaaccaagattcgcattcatgaccaagagtgatgtggataatcttgaagatggatatcgatggcgtaaatatggacaaaaagccgtcaagaatagcccattcccaaggagctactatagatgcacaaacagcagatgcacggtgaagaagagagtagaacgttcatcagatgatccatcgatagtgatcacaacatacgaaggacaacattgccatcaaaccattggattccctcgtggtggaatcctcactgcacacgacccacatagcttcacttctcatcatcatctccctcctccattaccaaatccttattattaccaagaactccttcatcaacttcacagagacaataatgctccttcaccgcggttaccccgacctactactgaagatacacctgccgtgtctactccatcagaggaaggcttacttggtgatattgtacctcaaactatgcgcaacccttga

SEQ ID NO: 2491 - DNA, 1647 bp, Arabidopsis thaliana
  Clone ID: AT_F8M21.C1.o20.tg
atggaggttcttttgaaattaccctcttcagagtctcctcttaaggataaatttggatctgttcaaatccatgaagctaataagggtgatggtgatcatcaagaacttgaatctgccaaggcagagatgagcgaggtgaaggaagagaacgagaagcttaaaggaatgctcgaacgaattgaaagtgattacaaatctctcaagctcagattcttcgacataattcaacaagaaccttcaaacaccgcaactaaaaatcaaaacatggttgatcatcccaagccaacgacgacggatttgagttcttttgaccaagaacgcgagcttgtatcgctttcactagggagaagaagttcttccccaagtgatagcgtccccaaaaaggaagagaaaacggacgcaatcagcgcagaagtcaacgctgacgaagagttgactaaggccggcttgaccttagggatcaataatggcaacggaggtgaaccgaaagagggtttatctatggagaatcgtgcaaattctggctcggaagaagcttgggcgccaggtaaagttacggggaagagaagctctccagcaccagcctccggtggcgatgctgacggtgaggccggtcaacaaaaccatgttaagagagctagagtttgtgttagagcaagatgtgacacaccaacgatgaatgatggttgtcaatggagaaaatatggacaaaagattgcgaaaggaaatccatgtccacgagcatattatcgctgcacggttgcacctggatgtcccgttagaaaacaggtccaaagatgtgcagatgacatgtctatactaatcacaacctatgaaggaacacacagccactctcttccactctcagccaccaccatggcttccaccacatcagccgctgcctccatgctcctctctggctcctcctcctcaccagccgctgaaatgatcggaaataacctctacgacaattcaagattcaacaacaacaacaaatccttctattcacccacccttcactccccattacatcccaccgtcactctagacctcactgctccacaacactcttcctcgtcttcttcttcattgctttctttaaatttcaacaaattctcgaactctttccaaagattcccatctacaagcctaaatttctcttctacttcatcaacatcatcaaacccgtctactctcaacctacccgcgatttggggtaatgggtattcttcttatactccatatccttacaacaacgtccaatttgggacgtccaacctaggaaaaacagtccaaaatagccagtccttaaccgaaaccctaacaaaagcgcttacttccgacccaagtttccactcggtgatcgctgctgccatctcaactatggtcggatcaaatggagaacaacagattgtcggtccacggcattcgattagcaataacattcaacaaaccaacacgacgaataataacaaaggatgtggaggctattttagcagcttattgatgtctaacattatggcgagtaatcaaacgggtgcttctttggatcaaccatcgtcgcaacttcctcccttctctatgttcaagaattcttcttcttcgtcttctacgactaatttcgtgaacaaggaagagaaaagctag

SEQ ID NO: 2492 - DNA, 1143 bp, Arabidopsis thaliana
  Clone ID: AT_T6B20.C1.o6.tg
atggaggagatagaaggaacaaacagagcagctgttgagagttgtcatagagttcttaatcttttacatagatcacagcaacaagatcatgttggttttgaaaagaatttagtatctgaaactagagaagctgtgattaggttcaagagagttgggagtttgttaagcagtagtgttggtcatgctaggtttagaagagctaagaaacttcagagtcatgtctctcaaagtctcttacttgatccatgtcaacaaaggacaacagaagttccatcatcatcttctcagaaaacaccggtactccggtctggtttccaggaattgagcttgagacaaccttcagattcactcactttagggactcgctcttttagtttaaactcaaatgctaaagctcctctccttcagcttaatcagcagacaatgcctccttcgaattatcctactttgtttccagtacaacaacaacaacaacaacaacaacaacaacaacagcaggagcagcagcagcagcagcagcagcaacagcaacagtttcatgaacggttacaagctcaccatcttcatcagcaacagcagctacagaaacatcaagctgagcttatgcttaggaaatgcaatggtgggataagtttgagtttcgataactctagttgtactccaactatgtcatccactaggtcctttgtttcttcacttagcatagatggtagtgttgctaatatagagggaaagaactccttccattttggggttcctagttcaactgatcagaattcactacattctaagaggaaatgccccttgaaaggagatgaacatggaagcttaaaatgcgggagctctagccgatgccactgcgctaagaagaggaaacatcgggttaggagatcgattagagtaccggctataagtaacaaggttgcagatatccctcctgatgattattcatggcgaaaatatggtcagaagcccatcaagggctctccttatcccagaggatattacaaatgtagtagcatgagaggttgtccagcgaggaagcatgttgagagatgtttggaagatccggcaatgcttattgttacttatgaagcagagcataaccacccgaaattgccatctcaagctataacaacttaa

SEQ ID NO: 2493 - DNA, 1041 bp, Arabidopsis thaliana
  Clone ID: AT_T7D17.C1.o7.tg
atggattcgaatagtaacaacacgaaatccataaagagaaaagttgtcgaccaacttgtcgaaggctatgaattcgctactcagcttcagcttctcctttctcatcaacactctaaccagtaccacatcgatgagacccgtcttgtttccgggtcgggttcagtttccggtggtccagatcccgttgatgagctcatgtctaagatcttgggatctttccataaaactatatcggttcttgattcttttgatcccgtcgccgtctctgtccccatcgccgtcgagggttcatggaatgcttcatgtggggatgattcggcgactccggtgagttgcaacggtggagattccggtgagagtaagaagaagagattaggggttggtaagggtaaaagaggatgctacactagaaagacgagatcacatacaaggatcgtggaagctaaaagttctgaagacagatatgcttggaggaaatatggacaaaaggagattcttaataccacattcccaagaagttactttagatgcacacacaagccaacgcaaggatgcaaagcaacaaagcaagttcagaaacaggatcaagattctgagatgttccaaatcacatacattggctaccacacatgcactgccaatgaccaaacgcacgcgaagaccgagccttttgatcaagaaatcattatggattcggaaaagacattggctgctagcactgctcagaaccatgtcaatgctatggtgcaagagcaagagaacaacaccagcagtgtgacagcaatagacgcaggcatggttaaggaggaacaaaataacaatggtgatcagagtaaagattattatgagggctcttcgacaggtgaggacttgtcattggtttggcaagagacgatgatgtttgatgatcatcaaaatcactactattgtggtgaaaccagtactacttctcatcaatttggtttcatcgacaacgatgatcagttttcctccttcttcgactcatattgtgctgattatgaaagaacaagtgctatgtga

SEQ ID NO: 2494 - DNA, 759 bp, Arabidopsis thaliana
  Clone ID: AT_F28N24.C1.o5.tg
atggcgagaagctacaatgatcatgaaagtagtcaagaaaccggacccgaatcaccaaattcttcaacctttaacggcatgaaagctcttatctcttctcattcgcctaaaagaaggagatccgtagagaagagagtagtgaacgtaccgatgaaagaaatggaaggatctcggcacaaaggggacacaactccgccctcagattcatgggcttggcgtaagtacggccaaaagcccattaagggatctccataccctagaggttattaccgttgtagtagcacaaaaggttgtccggcgaggaagcaagtcgagagaagcagagatgatccaacgatgattctcatcacttacacttctgagcataaccatccttggcctctcacttcttccacaagaaacgggcctaaacctaaacccgagcccaaacccgaacctgagcctgaggtagagccagaggcggaggaggaggataataagtttatggttcttggaagggggattgaaacgacgccatcatgtgtcgacgagttcgcatggtttacggagatggagacaacatcttcgacgattcttgagagcccgattttctcgtcggagaaaaagacggctgtctcgggggctgatgacgtggcggtgttctttccgatgggagaagaggatgagtctttgttcgccgatctcggcgagttgccggagtgttctgtggtgtttcgtcaccggagtagcgtagtggggtcacaagttgagatcttttga

SEQ ID NO: 2495 - DNA, 885 bp, Arabidopsis thaliana
  Clone ID: AT_T5P19.C1.o50.tg
atggatactaataaagcaaaaaagcttaaagttatgaaccaactcgttgaaggccatgacttaacaactcagcttcagcaactcctctctcaacccgggtccggtctagaggatctagtggctaaaatcttagtgtgtttcaataacaccatctccgttcttgataccttcgaacccatctcctcctcctcatccctcgccgccgttgagggatctcaaaatgcttcatgtgataacgacggcaagtttgaagattccggcgatagtcggaaaagattgggacccgttaagggtaaaagaggatgctacaaaagaaaaaagagatcggagacgtgtactatagagtcgactatacttgaggacgcattttcttggaggaaatatggacaaaaggagattcttaatgccaaattcccaagaagttactttagatgcacacacaagtatacccaagggtgcaaggcaacaaagcaagtccagaaggttgagctcgaacccaagatgttcagtatcacatacataggaaaccacacgtgtaacaccaacgcagaaactcccaagagcaagacttgtgaccatcatgatgagatcttcatggattccgaagatcacaagagtcctagtttatctacctcaatgaaggaagaagacaatcctcatcgtcatcatggttcgtccacggagaatgacttgtcattggtgtggccagaaatggttttcgaagaagattatcatcatcaggccagttacgtcaatgggaaaacgagtacatctatcgatgttttgggttctcaggatctcatggtgtttggaggtggcggcgatttcgagtttagcgaaaatgagcacttctctatcttcagttcatgttcgaatctatcttga

SEQ ID NO: 2496 - DNA, 885 bp, Arabidopsis thaliana
  Clone ID: AT_T12C14.C1.o40.tg
atggaaaatgttggtgttgggatgccgttttacgatttagggcaaacaagggtttacccactcttgtctgatttccacgatttatcggcggagaggtatccggtagggttcatggatttactgggtgttcatcgtcatacacccacccatacgccgttgatgcattttccgaccacacctaactcgtcctcgagcgaagctgtgaatggagatgacgaagaagaagaagatggagaagaacagcagcataagacaaagaagcggtttaaattcactaaaatgagtagaaagcagacgaagaagaaggtgccaaaagtgtcattcatcacgaggagtgaggttcttcatctagatgatggttataagtggagaaaatacggtcaaaaacctgtcaaagacagcccttttccaagaaattattaccgttgcacaacaacttggtgtgacgtgaagaagagagtagagagatcattcagtgatccaagcagtgtaatcaccacttacgaaggtcaacatactcatcctcgtccactactcatcatgcccaaagaaggcagctctccatccaatggctcagcttctagggcccacattggcctccctacactccctcctcagcttttagattacaacaaccaacaacaacaagcgccgtcttcttttggaaccgagtacattaacaggcaagaaaaaggaattaatcatgatgatgatgacgatcatgttgtgaagaagagtcgaactcgggatctgctggatggagctggtttagtcaaagatcatggccttcttcaggatgttgttccctctcatatcattaaggaagagatccttacctctcatatcattaagggtgatgatgttcaagatgacacatgtatttga

SEQ ID NO: 2497 - DNA, 993 bp, Arabidopsis thaliana
  Clone ID: AT_F4I4.C1.o30.tg
atggaagaagttgaagctgcaaacaaagcagcagtggaaagttgtcatggagtattgaatctcttatcacaacaaaccaatgattccaaatcaataatggttgaaacaagagaagctgtttgcaagttcaagagagtctcctctcttttgtctagagggttaggtcaaaggaagataaagaaactcaacaacaacaactacaagtttagctcttctttgttgccacaacacatgtttttggagagtcctgtttgcagtaataatgctataagtggttgtattccaattctagcaccaaagcctcttcagattgtaccagctggtcctcctccattgatgttgtttaaccagaatatgtgtcttgataagtcgtttctcgagctgaagccaccctcttcacgagctgttgatccaaaaccttatcagtttattcatacccatcagcaaggagtgtactcaaggagcaaaagtggtttgaatctaaagtttgatgggtctattggtgctagttgttattcaccaagtatatcaaatgggtcaagatcgtttgtttcatctcttagtatggatggtagtgtgacggattacgatagaaactcttttcatttgattggattacctcaaggttccgatcatatatcgcaacattctaggaggactagttgctctggtagtttaaaatgtggaagtaaaagcaaatgccattgttccaagaaaaggaaattaagggtgaaacgatcgattaaagtaccggcaatcagtaacaagattgcggacatacctcccgatgaatattcatggaggaaatacggacaaaagccgattaagggttctcctcatcctaggggatactataaatgtagcagtgtgcgcggttgtccagcgaggaagcatgttgagcgatgtgtagaagaaacttcgatgcttattgtgacttatgaaggcgagcataaccattcaagaatactctcttctcaatcagctcatacttga

SEQ ID NO: 2498 - DNA, 1377 bp, Arabidopsis thaliana
  Clone ID: AT_F1N20.C1.o170.tg
atggttacatatttttgtgttgacttcttctcagagaagagagatagggtttcacgtgagaacatcaacgacgacgacgacgaaggcaataaggttctcatcaaaatggagggttcacgagttgaagaaaacgatcgttccagagatgtcaatatcggtctgaatcttctgaccgcgaatacgggaagcgatgagtcaacggtggatgatggactatcaatggatatggaagataaacgtgcaaagattgaggctcaggagagcaaagcagaaggaaggaaacggcaggaactgcaaatcatggtgccaaggcagttcatggaccttgggccgtcgtctggagcagcagagcatggagccgaagtgtcatctgaagagaggacaacggttcgttcaggttctcctccttcgcttctagaaagttccaatccccgagagaacggaaagaggttgcttggaagagaagaaagctcagaggaatcagagtctaacgcctggggaaaccctaacaaagtccccaaacataatccatcctctagcaatagcaatggaaacagaaacggaaatgttattgatcagtcggccgcagaagccaccatgcggaaagcccgtgtctcagttcgtgcccgatctgaagctgccatgataagcgatggatgtcaatggagaaagtacggacaaaaaatggctaaaggaaacccgtgtccgcgggcttattatcgttgcacaatggccggtggatgtccagttcgcaagcaagtgcagcgttgcgcagaagacagatctattctcataaccacctacgaaggaaaccacaaccatccactcccaccagccgctacggccatggcctcaacaaccaccgcagctgcaagcatgctcctctcgggctcaatgtcgagtcaagacggtttaatgaacccaacaaacctcctagctcgagctatcttgccttgctcctcaagcatggctacaatctcagcctccgcaccattcccaaccatcacattggacctcaccaattcacccaacggtaacaaccctaatatgaccactaataacccgttgatgcagttcgctcaacggcccggtttcaacccggcagttttgcctcaagtggttggtcaagctatgtacaataaccaacaacagtccaagttttctggtttacagttaccggctcagccactgcagatcgcggccacttcctcggtggccgagagcgttagtgctgccagtgcagcaattgcgtccgatccaaactttgcggcggctctagcggcagcgatcacgtccattatgaacggttccagtcatcaaaataataacaccaataataataatgtggctacgagcaacaatgacagtaggcaataa

SEQ ID NO: 2499 - DNA, 1587 bp, Arabidopsis thaliana
  Clone ID: AT_T26N6.C1.o6.tg
atgtttcgttttccggtaagtcttggaggaggtccacgtgagaatctgaagccatcagatgagcagcatcaacgtgcggtggtgaatgaggttgactttttccgatcagcggagaagagagatagggtttcacgtgaagaacaaaacattatcgccgatgagactcatagggttcatgtcaaaagggagaattcacgtgttgatgatcatgacgatcgttctactgatcacatcaatattggacttaatcttctcactgcgaatacgggaagcgacgagtcaatggtggatgatggattgtctgtggatatggaagagaaacgtacaaagtgtgagaatgcacaacttcgcgaagagctaaagaaggcgagtgaagataatcaaagactaaagcaaatgctaagtcaaacaaccaacaacttcaattccttgcagatgcaacttgttgctgtcatgaggcaacaagaagatcatcatcacctagctacgaccgagaacaatgacaatgtaaagaaccgacatgaagtgcctgaaatggttccaagacagttcatcgatttgggaccgcattctgacgaagtgtcgtccgaggagaggacgacggttcggtcgggatctcctccctcgcttctagagaaatctagctcacgtcaaaacggaaagagagtgcttgtaagagaagaaagcccggaaaccgaatccaacggctggagaaaccctaacaaagttcctaaacaccatgcatcatccagcatttgcggtggcaatggcagtgaaaatgcaagtagcaaggtcattgagcaagcggccgccgaagccaccatgcgtaaagcccgtgtctcggttcgtgctcgatccgaagctcccatgttaagcgatggatgtcaatggagaaaatacggacaaaaaatggcgaaaggaaacccgtgccctcgagcttattaccgttgcacaatggctgttggatgtcctgttcgcaagcaagtgcaacgttgcgcggaagatagaaccattctcataacaacctacgaaggaaaccataaccatccattacctcctgcggctatgaacatggcttcaactacaacagcagccgcaagcatgcttctctcaggctccaccatgtcgaaccaagacggtttaatgaacccaacaaatctcttggctcgaaccatattaccgtgttcctcaagcatggctactatctcagcctctgcaccattcccaaccattacattagacctcacagagtcacccaacgggaacaatccaaccaataacccgctgatgcaattctctcaacggtctggtttggtggagttgaaccaatcggttttgcctcatatgatgggtcaggctttgtactacaaccaacagtctaagttttcgggtttacatatgccgtctcagccgctaaacgctggtgagagtgttagcgccgctactgccgcaatcgcctccaatcccaactttgccgcggctctagctgcagccataacttcgattatcaacggttcgaacaatcagcagaatgggaacaacaataacagtaatgttacaacgagcaacgttgacaataggcaataa

SEQ ID NO: 2500 - DNA, 486 bp, Arabidopsis thaliana
  Clone ID: AT_T19G15.C1.o20.tg
atgaatgatgcagacacaaacttggggagtagtttcagcgatgatactcactctgtgttcgagtttccggagctagacttgtcagatgaatggatggatgatgatcttgtgtctgcggtttccgggatgaatcagtcttatggttatcagactagtgatgttgctggtgctttattctcaggttcttctagctgtttcagtcatcctgaatctccaagtaccaaaacttatgttgctgctacagccactgcttctgccgggagagttgcgttcaagacacggtccgaggtggaagtgcttgacgacgggttcaagtggagaaagtatgggaagaagatggtgaagaacagcccacatccaagaaactactacaaatgttcagttgatggctgtcccgtgaagaaaagggttgaacgagacagagatgatccgagctttgtgataacaacttacgagggttcccacaatcactcaagcatgaactaa

SEQ ID NO: 2501 - DNA, 1200 bp, Arabidopsis thaliana
  Clone ID: AT_K6M13.C1.o6.tg
atggagaagaaaaaagaagaggatcatcatcatcaacaacaacaacaacaacaaaaggagatcaagaacacagagacaaagatcgagcaagaacaagaacaagaacaaaaacaagaaatctctcaagcatcatcatcatcaaacatggcgaatctagttacgtcatcagatcatcatccgttggagctagctggaaatctctcaagcatcttcgatacttcatctttaccttttccttattcttatttcgaagatcactcttctaataatcctaattctttcctagacttgctccgacaagatcatcagtttgcttcttcctctaattcctcttctttttcattcgatgcctttcctctccccaataacaacaacaacacctctttttttacggatttgcccttacctcaagctgagtcatcagaagtcgtgaacacaacaccgacttctccaaactcaacctcagtctcatcttcctccaacgaagctgcaaatgataacaacagtggtaaagaagttactgttaaagatcaagaagaaggagatcaacaacaagagcaaaagggtactaagccacagttgaaggcaaagaagaagaatcaaaagaaagctagagaagctaggtttgcgtttctgacgaagagcgatattgataatcttgacgacggttataggtggagaaaatacggccaaaaagctgtcaaaaacagtccttatcccagaagctattaccgttgcaccacagtgggttgcggagtgaagaagagagtggagagatcctccgatgatccttcgatcgtcatgacaacctacgaaggtcagcatacccatcctttccccatgacgccacgtggacacatcggaatgctcacgtcaccaatcctagaccacggtgcaaccaccgcgtcatcatcatcattctccatccctcagccacgttacttgctgactcaacatcaccagccctacaacatgtacaacaacaactctctaagtatgatcaatagaagatcatccgatggcactttcgtaaatccaggtccatcatcatcattccccggctttggttatgatatgtctcaagcttctacttcaacttcttcttccattagagatcatggattgcttcaagatattcttccttcgcagatcagatccgatactattaacactcaaaccaatgaagagaataagaaatga

SEQ ID NO: 2502 - DNA, 849 bp, Arabidopsis thaliana
  Clone ID: AT_F1N18.C1.o10.tg
atggatgatcatgttgagcacaattataacacatctttagaagaagtacacttcaagagcttaagtgattgcttacaaagctcattagtaatggattataactcactagagaaggtcttcaaattctcaccttatagttccccttttcaatcggtttcaccgtcagtaaacaacccttacttaaatctcacttcgaattctccggtggtctcatcttcctccaatgaaggcgagcctaaagagaacaccaacgataagagtgaccaaatggaggataacgaaggcgacctacatggtgttggtgaaagctccaagcaactgacaaaacaaggtaaaaagaaaggagagaagaaagagagagaagttagggttgcatttatgaccaaaagcgagattgatcatcttgaagatggttatagatggcgaaaatatggacaaaaagcagtgaagaacagcccttatccaaggagttactataggtgcacaacacagaagtgtaacgtgaagaaacgtgtagagagatcgtttcaagatccgtcgatcgtaattacaacctacgaaggaaaacacaaccatccgatcccatcgacgttgagaggaaccgtggcagctgaacatctactagtccaccgtggtggtggaggcagtttactccatagcttccctcgtcaccatcaagattttctcatgatgaaacattctccggccaattatcaatcggtgggatctctgtcgtacgaacatggccatgggacctctagttacaattttaataataatcaaccagttgttgactatggtcttcttcaggacattgttccttcaatgttctccaagaacgagtcttga

SEQ ID NO: 2503 - DNA, 864 bp, Arabidopsis thaliana
  Clone ID: AT_MQJ16.C1.o11.tg
atgaactccccacacgaaaaggcggtgcaagctatccgttatggccatagctgcgccatgcggttgaagaggcggctcaaccatccaatggctgatggtggaccgctttcaagttatgatcttgctaaatcgatcgttgaaagtttttccaatgccatttcaatcttatctgctaaaccagaaaccgaagatgatcagttttctgatttatcttctagggattcttctcctcctccacaggggagcccctccaagaaaagaaagattgatagtacaaattcaagtgagaattggagggacgattcaccggatccgatttactacgacgggtatctttggaggaaatatggtcaaaagagtataaaaaaatctaatcaccaaaggagttactatagatgttcttacaacaaagatcataactgcgaagcaagaaagcatgaacaaaagatcaaagacaatcctccggtttaccgaaccacttactttggccaccacacttgcaaaaccgaacataatctagatgccatttttattgccggacaagatcccctagatgactttaaaagtacccaaatgatccgattcggaaaagatcaggatcaggagaaggaaagccgctcgaacggtttctccttatcggttaagcatgaagaagatatcatcaaagagcaagctatagatcagtaccgtgagataaccagtaatgaccaagattgtcaagatgttatagaagaatatctatcatcaccatcaggctcttatcctccttcatcgtcatctggcagtgaaagtgctgactttaattctgatttgttatttgacaacccagactcgtgggatcgttatgatcagttttacttttga

SEQ ID NO: 2504 - DNA, 1125 bp, Arabidopsis thaliana
  Clone ID: AT_T22E19.C1.o22.tg
atgggatttgactttagcacttcaaaatccaaagctaaaagacaaaaaagaatagaggttcgatttgcatctccattaatgggcatcgatctttctcttaagctcgaggccgaggagaaaaagaaagagatagaaggatcgaaacatagccgtgagaacaaagaagacgaagaacatgatgctagtggtgatgaagatgaacaaatggtgaaagaagacgaagatgattcttcttctttaggtttaagaacccgagaagaagaaaacgaacgtgaagagctcttgcagctacagatccagatggaaagtgtgaaagaagagaatactaggttgaggaagcttgtcgagcagactcttgaagattatcgtcatcttgagatgaaattcccggttatcgataaaaccaagaagatggatcttgaaatgttccttggagtacaaggcaaacgatgtgtggatataacaagtaaggctcggaaaagaggagctgagagatctccgtcaatggaaagagaaatagggctttcactttctctagagaaaaaacagaaacaagaagagagcaaagaagctgttcagtctcatcaccaaagatacaatagtagcagcttagatatgaatatgccacgtatcatttcatcttctcaaggtaatagaaaggccagggtgtccgtgagggcgagatgtgagaccgcaacaatgaatgatggatgccaatggaggaagtacggtcagaaaaccgcgaaagggaatccatgtcctcgagcttattaccgatgcaccgtggctccaggatgtcccgttagaaaacaggtgcaaaggtgtttagaagacatgtcaatactgataacaacctacgaaggaacacataaccatccacttccggtcggagcaacagccatggcttccactgcctctacttctccattcttgttactcgattccagtgacaacctctctcatccttcctattaccaaactcctcaagccatagactcttctttgattacatacccacaaaatagcagctacaacaatcgaaccataagaagcttgaactttgatggtccatctagaggagatcacgtttcatcttctcaaaaccgattaaattggatgatgtag

SEQ ID NO: 2505 - DNA, 984 bp, Arabidopsis thaliana
  Clone ID: AT_T9A21.C1.o10.tg
atgtctaatgaaaccagagatctctacaactaccaatacccttcatcgttttcgttgcacgaaatgatgaatctgcctacttcaaatccatcttcttatggaaacctcccatcacaaaacggttttaatccatctacttattccttcaccgattgtctccaaagttctccagcagcgtatgaatctctacttcagaaaacttttggtctttctccctcttcctcagaggttttcaattcttcgatcgatcaagaaccgaaccgtgatgttactaatgacgtaatcaatggtggtgcatgcaacgagactgaaactagggtttctccttctaattcttcctctagtgaggctgatcaccccggtgaagattccggtaagagccggaggaaacgagagttagtcggtgaagaagatcaaatttccaaaaaagttgggaaaacgaaaaagactgaggtgaagaaacaaagagagccacgagtctcgtttatgactaaaagtgaagttgatcatcttgaagatggttatagatggagaaaatacggccaaaaggctgtaaaaaatagcccttatccaaggataatagccaatggaaacgaaaataggagttactatagatgtacaacacaaaagtgcaacgtgaagaaacgagtggagagatcgttccaagatccaacggttgtgattacaacttacgagggtcaacacaaccacccgattccgactaatcttcgaggaagttctgccgcggctgctatgttctccgcagacctcatgactccaagaagctttgcacatgatatgtttaggacggcagcttatactaacggcggttctgtggcggcggctttggattatggatatggacaaagtggttatggtagtgtgaattcaaaccctagttctcaccaagtgtatcatcaagggggtgagtatgagctcttgagggagatttttccttcaattttctttaagcaagagccttga

SEQ ID NO: 2506 - DNA, 912 bp, Arabidopsis thaliana
  Clone ID: AT_MLE8.C1.o3.tg
atggagaagaaccatagtagtggagagtgggagaagatgaagaacgagatcaacgagctaatgatagaaggaagagactatgcacaccagtttggatcagcttcatctcaagaaacacgtgaacatttagccaaaaagattcttcaatcttaccacaagtctctcaccatcatgaactactccggcgaacttgaccaagtttctcagggtggaggaagccccaagagcgatgattccgatcaagaaccacttgtcatcaagagttcgaagaagtcaatgccaaggtggagttcaaaagtcagaattgcccctggagctggtgttgatagaacgctggacgatggattcagttggagaaagtacggccagaaggatattctcggagccaaatttccaagaggatactatagatgcacgtatagaaagtctcaaggatgtgaagccactaaacaagtccaaagatctgatgaaaatcagatgctccttgagatcagttaccgaggaatacattcttgctctcaagctgcaaatgtcggtacaacaatgccgatacaaaacctcgaaccgaaccagacccaagaacacggaaatcttgacatggtaaaggaaagtgtagacaactacaatcaccaagcacatttgcatcacaaccttcactatccattgtcatctaccccaaatctagagaataacaatgcctatatgcttcaaatgcgagatcaaaacatcgaatattttggatctacgagcttctctagtgatctaggaactagtatcaactacaattttccagcatctggctcggcttctcactcagcatcaaactctccgtccaccgtccctttggaatccccgtttgaaagctatgatccaaatcatccatatggaggatttggtgggttctattcttag

SEQ ID NO: 2507 - DNA, 981 bp, Arabidopsis thaliana
  Clone ID: AT_MPL12.C1.o15.tg
atgtctcatgaaatcaaagatcttaacaactatcactacacttcatcgtataatcattacaatatcaacaaccaaaatatgattaatctcccttacgtttctggtccatctgcttataatgcaaacatgatctcatcatcacaagtaggttttgatctaccctcgaagaacttgagtcctcaaggagccttcgagttgggtttcgagctttctccatcttcttctgacttttttaatccttccctcgatcaagagaacggtttgtataatgcttataattataatagtagtcaaaagagtcatgaagttgtcggtgatggttgtgcaaccattaagagtgaagttagggtttcagcatctccttcttcaagtgaggccgatcatcatccaggagaagattccggcaagatccggaagaaaagagaagttcgcgatggaggagaagatgatcaacgctctcagaaagtagttaaaacaaagaagaaagaggagaagaaaaaagagccacgagtctcgttcatgactaagaccgaagttgatcatctcgaagacggctatcgttggagaaagtatggccaaaaagcagtcaaaaacagtccttatccgaggagttactatagatgcacgactcagaagtgcaacgtgaagaagagagtggagagatcttaccaagacccaacggtcgtcatcacaacctacgagagtcaacacaaccatccgatcccgaccaatcgtcggacagcaatgttctctggaaccaccgcatctgattataacccatcatcgtctccaatattctccgatctcatcatcaatactccaagaagcttctcaaatgatgatctcttccgtgtgccatacgctagtgtgaacgtgaaccctagttatcatcaacagcaacatggatttcatcaacaggagagtgagttcgagctcttgaaggagatgtttccttcggttttcttcaaacaagagccttga

SEQ ID NO: 2508 - DNA, 909 bp, Arabidopsis thaliana
  Clone ID: AT_F23A5.C1.o14.tg
atggatcagtactcatcctctttggtcgatacttcattagatctcactattggcgttactcgtatgcgagttgaagaagatccaccgacaagtgctttggtggaagaattaaaccgagttagtgctgagaacaagaagctctcggagatgctaactttgatgtgtgacaactacaacgtcttgaggaagcaacttatggaatatgttaacaagagcaacataaccgagagggatcaaatcagccctcccaagaaacgcaaatccccggcgagagaggacgcattcagctgcgcggttattggcggagtgtcggagagtagctcaacggatcaagatgagtatttgtgtaagaagcagagagaagagactgtcgtgaaggagaaagtctcaagggtctattacaagaccgaagcttctgacactaccctcgttgtgaaagatgggtatcaatggaggaaatatggacagaaagtgactagagacaatccatctccaagagcttacttcaaatgtgcttgtgctccaagctgttctgtcaaaaagaaggttcagagaagtgtggaggatcagtccgtgttagttgcaacttatgagggtgaacacaaccatccaatgccatcgcagatcgattcaaacaatggcttaaaccgccacatctctcatggtggttcagcttcaacacccgttgcagcaaacagaagaagtagcttgactgtgccggtgactaccgtagatatgattgaatcgaagaaagtgacgagcccaacgtcaagaatcgattttccccaagttcagaaacttttggtggagcaaatggcttcttccttaaccaaagatcctaactttacagcagctttagcagcagctgttaccggaaaattgtatcaacagaatcataccgagaaatag

SEQ ID NO: 2509 - DNA, 1266 bp, Arabidopsis thaliana
  Clone ID: AT_T5I8.C1.o10.tg
atggaaaacttccaaggagacttaaccgacgtcgtacgaggaatcggaggccacgtgttatcaccggagactcctccctcgaacatctggcctcttcctctgtcacatccaacaccatcaccgtcagatcttaacataaaccccttcggagatccctttgtgagcatggacgatccactcctccaagaactaaactccatcacaaactccggctatttctccaccgtaggagataacaacaacaacattcacaacaacaatggtttcttggttccaaaggtatttgaggaggatcatataaagagtcaatgtagtatcttcccaagaatccggatctcgcatagtaacatcatccacgattcttctccgtgtaattctccggccatgtcggctcacgttgtcgcagccgcagcagccgcctcgccgagaggcatcatcaacgtagacacaaacagtcctagaaactgtctattggttgatggtaccacgttctcctcgcagattcagatatcttcccctcggaatctaggccttaaaagaaggaagagtcaggcaaagaaggtggtgtgtattccggccccggctgcaatgaacagccgatcaagcggagaagtggttccatcggatctatgggcttggcgtaaatacggtcaaaaacctatcaaaggctctccttttccaaggggttattatagatgcagcagctcaaaaggttgttcagcaagaaagcaagtcgaaagaagccgaaccgatccaaacatgttggtgattacatatacctccgaacataaccatccttggcccatccaacgcaacgctctcgccggctccacacgctcctccacctcctcctcatctaaccctaatccttccaaaccctcaaccgcaaacgtaaactcctcatccattggctcccaaaacaccatctacttgccttcctccaccactcctcctcctaccctctcatcctccgccatcaaagatgaacgaggggacgatatggagttggaaaacgtagatgatgatgatgataaccagattgctccatacagaccggagcttcatgatcatcagcaccaaccagatgatttctttgcagatcttgaagagctagaaggagattctctaagcatgttgctttctcatggctgtggcggcgacgggaaggataaaacgaccgcgtccgatgggatcagcaatttcttcgggtggtcgggagataataattataataattacgacgaccaagactcaaggtcgttatag

SEQ ID NO: 2510 - DNA, 1386 bp, Arabidopsis thaliana
  Clone ID: AT_T4P13.C1.o24.tg
atggcggttgaagacgatgtatctttgataagaacgacgacgttagtggcaccaacaagacccacgattacagttcctcatagacctccggcgatcgaaacggcggcgtatttctttggcggtggagatgggcttagtctaagcccagggccactttcttttgtctcttctttgtttgttgataacttccctgacgtcttgacgccggataaccaacggacgacgtcgtttactcagcttcttaacggaactatgtcggtgtctcctggtggcggaggacgttcaacggcggggatgttcgccggaggaggtccgatgtttacaatcccttctggtttcagcccttctagtcttctcacctcgcccatgttctttcccccgcagtcgtcagctcataccggctttattcaaccacggcagcagtcacaaccgcaaccacaacgaccagacacgtttcctcaccatatgccaccatcgacatccgtcgccgtccatggtcgtcaatctttagacgtttcacaagtagatcaaagagctcgaaaccattataataatccggggaataacaataataaccggtcgtataacgttgtgaacgttgataaaccggcggatgacggttataactggaggaagtacggacaaaagcctatcaaagggtgtgaatatccaaggagttattacaaatgtacacatgttaactgtccggtgaagaagaaagtcgaacggtcatcggatggacagatcactcagatcatttacaaaggtcaacatgatcacgagaggcctcagaatcgccgtggcggtggaggcagagattccactgaggttggtggtgcagggcaaatgatggaatctagtgatgatagtggttatcgtaaggatcatgatgatgatgatgatgatgatgaagatgatgaagatcttccggcttcaaagataagaagaatagacggtgtgtcgacgactcaccggacggtgaccgagcctaagattatcgttcagacaaaaagtgaagtcgatcttctcgacgatggctataggtggcgtaagtacggacaaaaagttgtcaaaggaaatccccatccaaggagctattataaatgtacaacgccaaattgtacggtccgtaaacatgtagagagagcttccacggatgctaaggctgtgattacaacttacgaaggtaaacacaatcacgatgtccctgccgctagaaacggtaccgcggcagcaaccgcagctgcggtggggccgtctgaccaccatcgtatgagatcaatgtcggggaacaatatgcaacaacatatgagtttcggtaacaataataacacaggccaatctccggttcttttgaggttgaaagaagagaaaatcacaatttga

SEQ ID NO: 2511 - DNA, 1089 bp, Arabidopsis thaliana
  Clone ID: AT_F6A4.C1.o140.tg
atggcgtcaaagctctgcgattcgtgcaaatcagcgacggcggcgttatactgccgaccagacgcagcgtttctatgcttaagctgcgattcaaaagtccacgcggcgaacaaactcgcgtcacgacacgcgcgcgtgtggatgtgtgaagtgtgcgagcaagcaccggcacacgtcacgtgcaaagcagacgcggccgcgttatgcgtcacgtgcgaccgtgatatccactcggctaatccgttagctcgccgtcacgaacgcgttcccgttactccgttttacgattccgtctctagtgacggttccgttaaacacaccgccgttaatttccttgacgactgttacttctccgatatagatggtaacggaagccgtgaagaagaggaggaagaagctgcttcgtggctgttacttcccaatccaaagactacaacgacggcgacggcggggatcgttgctgttacttcagctgaggaagttccgggagatagtccggagatgaacactggtcaacagtatttgttctcggatccggatccgtatctggatctggattatggaaatgttgatccgaaggtggaatcgttagagcagaatagctccggtactgatggtgttgttccggtggagaatcggacggttaggattccgacggtgaacgagaattgctttgaaatggattttaccggaggatctaaaggctttacttatggtggtggttacaattgcatcagtcacagcgtgtcatcatcgtcgatggaagtgggagtggtgccagatggtggttcggtggctgatgtatcgtatccttacggtggtcctgcaaccagtggagctgatccggggacacagcgggctgttccgctgacttcagctgagagagaagcgagggtaatgaggtacagagagaagaggaagaacaggaagtttgagaagactataaggtatgcttcaaggaaagcgtatgcggaaatgagaccgagaatcaagggacggtttgcgaagcggacggatacaaatgagagcaatgatgtggttggtcatggtggtatctttagtgggttcggacttgtacctacattttag

SEQ ID NO: 2512 - DNA, 1179 bp, Arabidopsis thaliana
  Clone ID: AT_F2P9.C1.o26.tg
atggtggtcgatgtagagagccgaaccgcgagcgtgacaggagagaagatggcggcgcgtggctgtgatgcgtgcatgaagagatcacgtgctagttggtactgtccagccgatgacgctttcctatgccaaagctgcgacgcctcgatccactcggctaaccatttagcgaaacggcacgaacgtgtccggttacaatcatcttcgccgacggagacggcagacaaaacgacgtcggtatggtacgaaggattcaggagaaaggcgagaacgcctaggagcaagagttgtgcgtttgagaagttgttgcaaatcgagtcaaacgatcctcttgttccggagcttggtggagacgaagatgatggctttttctcgttctcctccgtagaagaaaccgaggagagtctgaattgttgcgtgcctgttttcgatcctttctcagacatgctgattgatgatataaacggcttttgcttagttcctgatgaagtcaataacactactactaatggagaattaggagaagtcgagaaggcaatcatggacgatgaaggttttatggggttcgtgccattggatatggatcttgaggatctcactatggacgtggagagtttacttgaggaagaacaactttgcttgggattcaaggaaccaaacgatgttggagtcatcaaagaagagaataaagtagggtttgagattaattgtaaggatttgaagagggtgaaagatgaagatgaagaagaagaagaagccaagtgtgaaaatggaggatcaaaggatagtgatagagaagcatcaaatgataaagatagaaagacaagtttgtttctgagattagattatggagctgtgattagtgcttgggataatcacggttcgccgtggaaaaccggaatcaaaccggagtgcatgttgggagggaacacgtgtctgcctcatgttgtgggtgggtacgagaaattgatgtcgagcgacggatcggtgacacgtcagcaagggagagacggaggaggatcggacggggagagagaggcgagggttttgaggtacaaggagaagcggaggacgaggttgttctcaaagaaaataagatatgaggttcggaaacttaacgctgagcagagacctcgaatcaaaggtcgtttcgtgaagaggacgtcacttttgacgtga

SEQ ID NO: 2513 - DNA, 1251 bp, Arabidopsis thaliana
  Clone ID: AT_F2J7.C1.o10.tg
atgaaaagtttggcgaatgctgttggagcgaagacggcgagggcttgcgacagctgcgtgaagagacgtgcacggtggtactgcgcggccgacgatgcttttctttgccagtcttgcgacagtttggtccattcagcaaaccctcttgctcgccgccacgagagagtccgtttgaagacggctagcccggcggtcgtaaagcatagcaaccactcatcagcttctcctccacatgaggtcgccacgtggcatcacgggtttactcgtaaagctcgaacgccacgtggctctggtaagaaaaacaattcgtcgatatttcatgacttggttcctgatattagtattgaggatcagacagacaactatgagcttgaagagcagctgatctgtcaagtgccggttctagatccgttggtgtctgagcagttcttgaacgatgtcgttgagcccaagatcgagtttcctatgatcagaagtggtttgatgatcgaggaggaggaagacaacgctgaaagttgtcttaatggatttttcccgaccgacatggagcttgaggagtttgctgctgacgtggagactctgctcggtcgcgggttagacacggagtcgtatgccatggaggagctagggttatctaattcagagatgttcaaaatcgaaaaagatgagattgaagaagaagtagaagagataaaagccatgagcatggatatatttgatgatgatcgaaaagacgtggatggaacagtaccgtttgagctaagctttgattacgagtcgtcacacaagacgtccgaagaagaggtaatgaagaacgttgaaagtagtggtgaatgtgttgttaaggtgaaagaggaagaacataagaatgttctgatgctaagattaaactatgactcggtgatatccacttggggaggtcaaggtccaccgtggagttcaggagagccaccggaacgagacatggacatcagcggttggccagccttttccatggtggagaatggaggagaaagtactcatcagaagcaatacgttggtggatgtttaccatcaagtgggtttggagatggaggtagagaagctagagtttcgagatacagagagaagaggaggacaaggttgttttctaagaagatacggtacgaggtacgtaaattgaatgcagagaaaagaccacgaatgaaaggaagattcgtgaagagagcctcgctcgctgctgctgcttcaccattaggtgttaattactga

SEQ ID NO: 2514 - DNA, 960 bp, Arabidopsis thaliana
  Clone ID: AT_T30F21.C1.o24.tg
atgaagattcagtgtaacgtttgtgaggcggcggaagcgacggttctatgttgcgccgacgaggctgctctttgttgggcttgcgatgagaaaattcacgccgctaataaactcgccggaaaacatcagagagtccctctctctgcctctgcctcttccatacccaaatgtgacatttgtcaggaagcatctggattcttcttttgtctgcaagatagagctttgctatgtaggaaatgtgatgttgcaatccacactgtgaatcctcatgtttcagctcaccagagatttcttctcactggaatcaaagttggtcttgaatctatagacactggtccttctactaaatcctcacctaccaatgatgataaaaccatggagaccaaaccttttgttcaatctatacctgagcctcaaaagatggccttcgatcatcatcatcaccagcagcagcaggaacagcaggaaggagttataccgggaactaaagtcaatgatcagacatcgacaaagcttcctctcgtaagtagcggatcaactactggaagcattcctcagtggcaaatagaggagattttcgggctaaccgactttgatcagagctatgaatacatggagaataatggatcatctaagacagacgttctcaagatgaaacttctagatagtgcttgtcttgggaagaaattggaaaaagcggatactagtagacgaggagattcagacagttcttcgatgatgagatctgcagaagaagatggagaagataacaataactgcttgggaggtgagacatcatgggcggttccacagattcagtctccacctacagcgtctggtctaaactggcctaagcattttcaccaccactctgtgtttgttccggacataacttcttcaactccttataccggttcatccccgaatcaaagggttgggaaacggcggcgacggttctag

SEQ ID NO: 2515 - DNA, 1119 bp, Arabidopsis thaliana
  Clone ID: AT_MLP3.C1.o10.tg
atgggttacatgtgtgacttctgtggtgaacaaagatctatggtgtactgtcgatccgatgcagcttgtttgtgtctctcctgtgaccggagtgttcattccgctaatgcattgtccaaacgacattctcggacacttgtctgcgagagatgcaatgctcagcctgctactgtcaggtgtgttgaagaaagggtttcactctgtcaaaactgtgactggtctggccacaacaacagcaacaacaacaattcttcgtcttcttctacttcgccgcagcagcataagaggcaaaccataagttgctattcgggttgcccttccagctcagaactcgcttccatttggtctttctgtttggacttagctggacaatctatttgtgaacaagaactgggtatgatgaatatagacgatgatggtcctaccgacaagaaaacttgtaatgaggataagaaagatgtcttggttggatcctcttcaattcctgaaaccagttctgtaccacaaggaaaatcatcttctgctaaggatgttggaatgtgtgaagatgacttctacgggaaccttggtatggatgaagttgacatggcacttgagaactatgaagaactctttggtaccgcctttaacccctctgaagagctattcgggcatggtggaatcgatagccttttccataagcaccaaacagctccagagggagggaattcggtgcagccagcaggcagtaatgattcgttcatgagttcgaaaactgagccaataatttgcttcgcatcgaagccagcacattcgaacatatccttctctggagtcactggagaaagtagtgctggagatttccaagaatgtggtgcatcatcttccatacagctctcgggggagccaccatggtatcctccaacattacaggataacaatgcctgctcacattcagtaacccgtaataacgcagttatgcgttacaaggagaagaagaaggctcgcaagtttgataagagagtgaggtatgcttcccgcaaagcaagagctgatgtgagacggcgtgtaaaggggcgatttgtcaaagctggtgaagcttatgattacgaccctctcaccccaaccagaagttattga

SEQ ID NO: 2516 - DNA, 1302 bp, Arabidopsis thaliana
  Clone ID: AT_F13K9.C1.o15.tg
atgagtagttcggagagagtaccgtgcgatttctgcggcgagcgtacggcggttttgttttgtagagccgatacggcgaagctgtgtttgccttgtgatcagcaagttcacacggcgaatctgttgtcgaggaagcacgtgcgatctcagatctgcgataattgcggtaacgagccagtctctgttcggtgtttcaccgataatctgattttgtgtcaggagtgtgattgggatgttcacggaagttgttcagtttccgatgctcatgttcgatccgccgtggaaggtttttccggttgtccatcggcgttggagcttgctgctttatggggacttgatttggagcaagggaggaaagatgaagagaatcaagttccgatgatggcgatgatgatggataatttcgggatgcagttggattcttgggttttgggatctaatgaattgattgttcccagcgatacgacgtttaagaagcgtggatcttgtggatctagttgtgggaggtataagcaggtattgtgtaagcagcttgaggagttgcttaagagtggtgttgtcggtggtgatggcgatgatggtgatcgtgaccgtgattgtgaccgtgagggtgcttgtgatggagatggagatggagaagcaggagaggggcttatggttccggagatgtcagagagattgaaatggtcaagagatgttgaggagatcaatggtggcggaggaggaggagttaaccagcagtggaatgctactactactaatcctagtggtggccagagttctcagatatgggattttaacttgggacagtcacggggacctgaggatacgagtcgagtggaagctgcatatgtagggaaaggtgctgcttcttcattcacaatcaacaattttgttgaccatatgaatgaaacttgttccactaatgtgaaaggtgtcaaagagattaaaaaggatgactacaagcgatcaacttcaggccaggtacaaccaacaaaatctgagagcaacaatcgtccaattacctttggctctgagaaaggttcgaactcctccagtgacttgcatttcacagagcatattgctggaactagttgtaagaccacaagactagttgcaactaaggctgatctggagcggctggctcagaacagaggagatgcaatgcagcgttacaaggaaaagaggaagacacggagatatgataagaccataaggtatgaatcgaggaaggcaagagctgacactaggttgcgtgtcagaggcagatttgtgaaagctagtgaagctccttacccttaa

SEQ ID NO: 2517 - DNA, 690 bp, Arabidopsis thaliana
  Clone ID: AT_F24B18.C1.o9.tg
atggggaagaagaagtgcgagttatgttgtggtgtagcgagaatgtattgtgagtcagatcaagcgagtttatgttgggattgtgacggtaaagttcacggagctaattttctggtggcgaaacacatgcgttgtcttctatgtagcgcgtgtcagtcacacacgccttggaaagcttctgggctgaatcttggcccaactgtttctatctgtgagtcttgtttagctcgtaagaagaataacaacagctccctcgccgggagggatcagaatcttaaccaagaagaagagatcattggttgtaacgacggagctgagtcttatgatgaggaaagcgatgaggatgaagaagaagaagaagtggagaatcaggttgttccggctgcggtggagcaagaacttccggtggtgagttcgtcgtcttcggttagtagtggtgaaggagatcaggtggtgaaaaggacgagacttgatttggatcttaacctctccgatgaaatgattaagaaatctgaaacaattctttttgaaatgcaggaggagaaccaatctagaccattgaaaagattatcgagagacgaaggtttgtcaagatcaactgttgtgatgaatagctcaatcgtgaaattacacggagggaggagaaaagcagagggatgtgatacatcatcgtcgtcttcgttttattga

SEQ ID NO: 2518 - DNA, 414 bp, Arabidopsis thaliana
  Clone ID: AT_K9D7.C1.o4.tg
atggagtgtgagagatcatcgtcgtccacgtcatcagaaaccggagcagtcaggcaccgtcgtacgtcgtcgtcgtcagtctccaccgtgacgagacgaatgtacgagtgcactttctgcaaaagaggtttcacaaacgcacaagctttaggtggtcatatgaacatccatcgacgtgaccgtctcaacaaggccaaggtgcaaaacgatgctgacgtggcactctcgcaaactcatagatgtttccacgtggcgtctgaccttggaggctacgagcaagtagactccgtcgtgttgaggacgacgacctcgaactacatccaacacttacgaatcggctcgatggctacaaggagagaaaacgtcgtcgttgaaggaaatgaaatcgatttggagctgcgtcttggcttatga

SEQ ID NO: 2519 - DNA, 1146 bp, Arabidopsis thaliana
  Clone ID: AT_F17F8.C1.o14.tg
atgggtaagaagaagaagagagctacagagaaggtgtggtgttattactgcgatagagagtttgatgatgagaagattcttgtgcagcatcagaaagctaagcactttaagtgtcatgtctgtcataagaagctttctacagctagtggcatggtgattcatgttcttcaggttcataaagagaatgttacaaaagttcctaatgctaaagacggtcgagattcaactgatattgaaatatatggaatgcaaggaattccaccccatgtcttgactgctcattatggagaagaagaggatgagcctccagccaaagttgcaaaagttgagattccttctgcccctcttggtggtgtagttcctagaccatatggaatggtatatccgcctcaacaagtacctggtgctgtacctgcacgaccaatgtattatccgggtcctcctatgcgtcatcctgctcctgtatggcaaatgccacctcctcgtccgcaacaatggtatcctcaaaatccagctctttctgtacctccagctgcccatttagggtatcgaccacaaccactttttcctgttcaaaatatggggatgactccaactccaacctcagctcctgccatacaaccatcaccagtcactggagtaactcctcctggaattcctacatcatcacctgcaatgccagttcctcaacctctgttccctgttgtgaataacagcattccttctcaagctccaccattttctgctcctctgcctgttggtggggctcagcaaccatctcatgcagatgctttaggatcagcagatgcttatccgcctaacaattctattccaggttcaatcccaagtgggactaatgctcattcttatgcctctggcccaaacactagcggtccttcaattggtccacctcctgtaattgcaaacaaagctcctagcaatcagcctaatgaggtctatcttgtatgggatgatgaagcgatgtctatggaggaaagaagaatgtccttaccaaaatacaaagtgcacgatgaaaccagccagcttgcaatagtaggtagtgagaaacatagcatgaactcgataaatgcagcgatagacagacgaatctcagagagtaggcttgctgggcggatggcgttttag

SEQ ID NO: 2520 - DNA, 837 bp, Arabidopsis thaliana
  Clone ID: AT_F14I23.C1.o40.tg
atgtcttcttcaatgtcttctgcaggctcttccacacccaaatccaaaaagctcaaaggcattgttgtggacatggagaagtcgaaagagaaggcaacaaggaacactattctgaaactaggttctcctcaagaggttacctctgaaaggaggattgagaactctagttttggatctagtgctgtccgaagaggaagagagatcatgaagttttacccgtcaaaatcaaacaagatctacacttgtcatttttgcaaaaaaggtttctcaacctctcaagccttaggtggtcaccagaacgcgcacaagcaagagcgggagtgggacaaaaagcggaaggagatggaagctgagtatcctggactctcctttttgaaccctttccttgataagcctcacattctcttaggtggttattcacaagatgctttatcaaatgaaaatcatcttgggatcactcttgatccttttaaacgcttaatttacccatctttcaatgcgggtatgaacatggctgtagttcctcgtgtcactcctactcgcttcttcaccgggaacactagtaccaatggttctacttcaagggtccctgatcctttaccatcctacaacaacctttacccatcaaactctagaaacgttcttccttttcctcctcctcaaaccaccaagctttctagcaatttcgtctcgcaaggaaacgttttaagcgaagagaatttcatctcaaagattggaacaaacaatattgtggagattgatgatgatgatgatgatattcagccagaagaagaaaaaactaaaagcgggagaattgatttatctttatccctttga

SEQ ID NO: 2521 - DNA, 999 bp, Arabidopsis thaliana
  Clone ID: AT_F11O6.C1.o15.tg
atggagtcaccaccactatacgagatatcctcaagctcttcttctgaaaaacctagacaccatttccaatcccttgatctcttccctaacctcaaccaaaactcttgtatcaacaataccctaattgagcctttaccgcttattgatcgcataaacttgaactcaaacctagacctaaaccctaatcccttgtatgcggaagaaggagagcaagaggaggaagaagaagaagaagaagaccgtgaagtggacgtggacttacacatcggccttcctggttttggtaaaccaagcaatgatgctaaacagctgaagaagagaaatgggaaggagatcgccacatatgacgccggaaaaggcatcgagaatgaactttccggaaaggcatactggatcccggcgccggagcaaattctcatagggttcactcatttttcttgccatgtatgcttcaagacattcaatcgctacaacaatcttcagatgcacatgtggggacatggttcacaatacaggaaaggaccggagtcactgaaaggcacacagccacgagccatgttagggatcccttgttactgctgcgttgaagggtgcaggaaccacattgaccatcctcgttccaagccactgaaagactttaggacgctccaaacgcactacaaacgcaaacacggacacaaacccttctcgtgtcgcctttgcgtcggatcatctttctatttgagtattgtatttgaaattggagtttgggatatcaacaacttaacattggtggataatgatgctgcgaagaaacaattggagttcctcatgggcggattcaagctactatgccaatcggaggtgcaatttttggagatgttgacttcgatggaggaaaccttgaagcgaatggtttgcgcagtagagaggattgaatctcgatcgatttcagatgacggtagacagctggacctccggatcttcactaaaggtaatccgaagagtggattgcgatga

SEQ ID NO: 2522 - DNA, 909 bp, Arabidopsis thaliana
  Clone ID: AT_T6J4.C1.o5.tg
atgtataataataaccaatatagcttctccggtgacgaagactccgtcgtcctcagccttggacctcctggccaacaataccctagccataacaaacctaccagtactaaaccttcttctgatcatgagtttaatcacccattaacaaaccctaatggtgttaccgttgctcttcatatcggtcctccgagttccgacaaagaaacccttagcggcgggaacaaccaagagggtttaacggcgaggcagggacagtattggatcccttcactttcgcagatccttgtcggtcccactcagttctcttgttctgtctgtaacaaaactttcaaccgcttcaacaacatgcagatgcatatgtggggtcatggttcgcaataccgaaaaggcccagagtcgctcagagggacgaagtcgtcatcttcgatactaaggctgccatgttactgttgtgctgaaggttgtaagaacaacatagaccatccaagatcaaagcctctcaaagactttagaacgcttcaaacgcattacaagcggaagcacggagcaaaaccttttcgttgccgcaagaaatgtgaaaaaacgtttgcggtgagaggcgattggagaacgcatgagaaaaattgtgggaagttgtggttttgcgtttgcgggtcagattttaagcataagaggtcacttaaggatcacgttagggctttcggtgatggtcatgcggctcacactgtaagtgatcgggttgtaggcattggggacgcagatgaagatgatgaggaggaggaagaagaggaagaagatgatgtagaagaagaagatgctcatgaagaaaatgttcgtggagagaagaactatgggattagatatgatcactttcgtcgttatggtcagatttctgatgacaattactaa

SEQ ID NO: 2523 - DNA, 1284 bp, Arabidopsis thaliana
  Clone ID: AT_MUA22.C1.o14.tg
atgagttttgttaagaaactcgagtttaaaaatatagtggtgttaaccaatgaggtagtggtaaatctctcaagtgaagatataaaagaaaaagaaaatggtgtttcttatacgtgggccttctttgggccgaacaagatatcatatagtccaggaaggatccagttaataaaccggagcggaggaaatgttcagttggatacttgtttcatgtttgtgagaccgatggctacgggtatggcggtagatacggtaggcgagttaggctttccgtactggaacccaatccgacgaagatttcctccggattcgccgttctttgcatctggaaatgtcgagcgcgagctacttgctaaacaggtgacattggacttcacagaagatgaaatcaaccatctgcataaatttgtggaaattgaaaccagaagaatctcgtgtcccattgttggctgtcctgaacgcctgaaatctttggaccattttgaagatcactataatgcacggcacactgcctcttgttcagtgtgctcaagggtctaccctacttctcgcttactaagtattcacatatccgaagcacacgactctttctttcaagctaaagtttctcggggttatgacatgtatgagtgccttgtggaagggtgtggattgaagttcaagacctacaaagcccggcatcgacacttgattgacaaacacaagttcccaacgacatttgaattcttcaagaagacccaactctcaaagaagcgtagagagaaacttcaaaggcaacatgtatcaaagctgaaacatgaagaagacaaagaagctgcttcgtcagatgccatggaagtagaagacaaaggcagcttagacggtcttgtttcagcactgtcctcgctaactacctcagacacaactccttcgaatgtcagcttcggtcgacgccatggtcgtgggctgacctttgttccacggatccctattaattctaaagtggctgcagctgtcgatggcgacggctggattttgccatcgccgagatcaagcaatgcgctagagcttcatgttttccttacaacattacatctacctctgcagccccttgatgaggactcttatgtttggaaacttgtcgctcaagcggtaatctatgctatttggaagcagagaaacaacttcattcacaaccagcaatcaatccctgctgcttgggtgtttaagaccattgaccgtgagatgagatcattgacaccatcaatgcgaggcggcaccggaagaagttcagaaaccttataa

SEQ ID NO: 2524 - DNA, 1182 bp, Arabidopsis thaliana
  Clone ID: AT_F1O19.C1.o5.tg
atggcgactgaaacatcttctttgaagctcttcggtataaacctacttgaaacgacgtcggttcaaaaccagtcatcggaaccaagacccggatccggatcaggatccgagtcacgtaagtacgagtgtcaatactgttgtagagagtttgctaactctcaagctcttggtggtcaccaaaacgctcacaagaaagagcgtcagcttcttaaacgtgcacagatgttagctactcgtggtttgccacgtcatcataattttcaccctcataccaatccgcttctctccgccttcgcgccgctgcctcacctcctctctcagccgcatcctccgccgcatatgatgctctctccttcttcttcgagttctaagtggctttacggtgaacacatgtcgtcacaaaacgccgttgggtactttcatggtggaaggggactttacggaggtggcatggagtctatggccggagaagtaaagactcatggtggttctttgccggagatgaggaggttcgccggagatagtgatcggagtagcggaattaagttagagaatgatacacaacaaaaactcaagcttttggttgataacggtgattacggattcgagagaggatctagatatggagaatacgcgagattacgagaatcaaaacttcgtatgaaacgagacttcgagaagattctaaaggaagaacaagtgagatttgggttcaccagagaagaagaaatcagggttttgccggagaagaagacgagattcggatttaaccctaatcagaggaaaacgtcgtcgtcttcttcttcttcgttggctcaatctgttcctgatttctcttctatgattcgtaaagagaatcgtcgaccaccagttaattcgaatttgcttcctcggagaacagaacttactccaccgtcgatgaagagtagaaacgccgccgttttcgctggatctgtgattagaggaagtgtttcagcgagtgctggtgagaagaaaggtattgggatgatgcgtaaaagctacgctgctgttgatgatcttaagaaaatatcaatggctgctgcttccgccataaacggcggtggaggaaaaaggagatcaattggcggcggaggaggaaggaaatcacttggcggcggtggtggtggtcggactattctaggttacagacaaatttattga

SEQ ID NO: 2525 - DNA, 486 bp, Arabidopsis thaliana
  Clone ID: AT_MAC12.C1.o2.tg
atggcggaaccaccaccgtcttaccttcatttcgtaggtcctgcaaaaactcgatcatcaagcaaacgccactctttctcctcctctgcacatccagcttcccaccgtctctttccatgtcagtactgtcctcgaaagttctacacatctcaagctctcggcggtcaccaaaacgctcacaaacgcgaacgcgccgctgctcgtcgtaacctcggcgtcctcgctaactctccacccatcctcgacgacaacaacacgtttcttcgtccttacccttgcttttaccaaaacccatttcaaggatctacttctggaaacgaaccgcttcaggaacagccgacgatgatgacgatggatggctacgatccgtttcatccgtatccgtatgtgtacccttttgcattatccggtaacaacaacgacggaggaaacggcgttatggaagaagacgagcctctcgatctagacctttctctccgtttataa

SEQ ID NO: 2526 - DNA, 783 bp, Arabidopsis thaliana
  Clone ID: AT_F15E12.C1.o19.tg
atgagaccaatattagacctcgaaattgaagcttcatcgggcagtagtagcagccaagtggcctcaaacttgtctccggttggggaagattacaaaccaatctcgctgaatcttagcctcagtttcaacaacaacaacaacaataatctggatcttgaatcatcgtctttgacgctgccactttcgagcacgagtgagagtagtaacccggagcagcagcagcaacaacaaccatctgtatcaaagagagtcttctcttgtaactactgccaaaggaagttctatagctctcaagcgctaggtggtcaccaaaacgctcacaaacgtgagagaacactcgccaaacgcgctatgcgtatgggtcttgctggggtcttccccggtagaggatcaagtagcaattatgcggctgctgccacagcagccgctctctcgtgtttgccgcttcacggaagcggaaacgggaacatgacatcgttcaggactttgggaatccgggcacattcctcggcgcacgacgtcagcatgacaaggcagacaccagaaacacttattagaaacattgccaggttcaaccaggggtatttcggtaattgtatacctttttacgtggaggacgacgaggccgagatgctctggccggggagtttccggcaagctacgaatgcggttgcggttgaagcgggtaatgataatttaggtgaaagaaaaatggatttcttggacgtcaagcaagcgatggatatggaaagttctcttccagatctaaccttgaagctttga

SEQ ID NO: 2527 - DNA, 1260 bp, Arabidopsis thaliana
  Clone ID: AT_T2E6.C1.o3.tg
atggctcctctccctttcataccggaacaaacccgttcgcaaacgcgtttatcttcagacacaaagaagaagaacagaaacaagaaaacgtcccaaccaccgcctcaaacgcaaaagataaagcagaagacggtaccatcaacatcatcatcgtcgtcatggagccagataaagaaccttttgagttgcaaacaaatcgaagggccacgagtgcacgaaccatcaaagattacgtcatcatcttgtggctcctctctttgtaagtttagtgatgttatttacggtaatgcccgtgtgattcaccgctccgatcactcccctgagagtagcaatcttggacaagatacccggttgttgacccgaaaacccattagtacccgtggatcttcttcatcggttagatccaacggttgtggcgcttacacgtcatattcaacttccaaagctatgcacttcagaaacctctcaggttgctatgagtgtcacatgattgttgatccaagcaggtatccaatagcaccaagaatatgtgcatgtccacagtgtggggaggtcttccctaagcttgaatcattggagcatcatcaagcagttcgtcacgctgtgtcggagttggggccagaggattcagggagaaacatagtggacatcatcttcaaatctagctggttacgtaaagacagtcccatctacaagatcgaacggatattaaaagtccacaacactcaacgaacgatccaacggtttgaagattgtcgcgacgcagtcaagtcccatgcacatgcctctaccagaaaagaggctcggtccgccgccgacggcaacgagcttctccgcttccactgcaccacagtttcttgctccctcggctcacgcggctcgacctccatttgctccgccatccctggctgccgcgtttgcaccattatccgccatggcttccacgccaaaacggtacgtgtaggcaatggtgaaggaaaagaggagattaagggcgtgaggaccactgcaagcagtggaagagcacacgatgcgttgaggtgttttgaccagcggagggcgatgcttgtttgccgtgtgatcgcgggaagagtgaggcgcgtgcagagtgatgtgccggaagatgaaagtggttctggctcgtatgattcggttgcgggggccgctggggtctacacaaaccttgacgacttggttgtgtataatccaaaagctatacttccttgctttgtagttatctacaaagtctccgagccttaa

SEQ ID NO: 2528 - DNA, 519 bp, Arabidopsis thaliana
  Clone ID: AT_K14B15.C1.o2.tg
atgaaccaccgggacaaacaaattgattccggctctggctctggagaaaaccgccggacttatgactgcgacatctgcaagagaggtttcacgaatcctcaagccctcggtggtcacaataacatccaccgcagggaacgcgaaagatacccctcctcctcttcttcttctcactcatttccattttctcttccgttaccatctcagtctccctcctcctccacaaacttcacaaaccctcctccttattttccgaccattgagtcatacctacaccaagggtctcagccacctattaaccctagccacaacacacaatactttggatcatcatcatcatcaagaggaggagggagatttgctcaaggggcgtctcatgatcttaatttgagcttagggctcggatccatgaatgaagatgatgacactcaccggagcccaccagagaccggaggttctcaacctcaagatggtgatcttgatcttgatcttcgactcggcggtcatcgtcatcattaa

SEQ ID NO: 2529 - DNA, 606 bp, Arabidopsis thaliana
  Clone ID: AT_MUG13.C1.o2.tg
atgttgtcctcggactcgaattacgctagtgatattagcgacgatgcctccgccaccggatcgatagagaatcctatatacaaatgcaagtattgtcctaggaagttcgataaaacacaagcattaggtggtcatcaaaatgcacacagaaaggagagagaggtcgaaaaacaacaaaaagcatttttggcgcatttgaaccgaccagaaccagatctttacgcgtactcgtattcgtatcatcattcatttcctaaccaatacgcactcccaccgggatttgaacagcctcagtacaaagttgatagatcatacaagatgtccatggtctacaaccaatatgtgggatcctcaagctctagctttgcaggactacaaagtgacccaagtcaaggaatgaaccaggattggacctttaccgggatcccattcctaccccaatctcaacctcaaccactatcgtcaccaatatgtttggatctttgccttggcattggtagctcccaaacccaaccacaacctcaagaaccaaatgatgcaacagaagagatggatgctgagaaagaaaatgatggttcttccctttctctctcactcaaactgtga

SEQ ID NO: 2530 - DNA, 1389 bp, Arabidopsis thaliana
  Clone ID: AT_F10A5.C1.o26.tg
atggctttactaactttcttgccggagaacgcagaggcgccacaaaaacacaagccaacgtctagcaaacgaaagaaacgcgataatcccaccgaccaaacgcagacacagaaacataaaccgcagaaaccgaagaaagcagtacctccgaagcagccatcttcatgggaccaaatcaagaacctattgacttgcaaacaaatcgaagggtcaagagtccatgatccttccaagaactctcaatctggtccgtccatgacaactaacttatctccttccaagcttggctcgtcgtgcagctccatttgcagctttagagacgtggctcacggcaacactcgtgtggttcatagagctgatcactcaccagacgtaggtaactcggctactcctaactcggagactcggcttctgactcggaaacctggtcaacacggttcttcttcgtctcggtctcttacatctggctcaacgagatctaacgccagtgggagttacacgtcatcgtcaacgacttcgtttagagccatgcagttccgtaaactctccggatgttacgaatgtcacatgatcgttgacccgagcaggtatccgatttcgcctagggtttgtgcttgttcccaatgtggagaagttttccccaagcttgaaagcttagagcttcatcaagcagttcgtcacgcagtttcggagttaggtccggaggattcgggtcgaaacatagtggagatcatattcaaatcaagctggcttaaaaaagacagtcccatctgtcagatcgaacggatattaaaagtccacaacactcaacgtacgatccaacggtttgaggattgccgagacgcagtgaaggcgcgtgcacttcaagcaaccagaaaagatgctcgttgtgccgccgacggcaacgagctcttacgttttcactgcaccactctcacttgttcactcggagctcgtggctcttcttctctctgctctaacctccctgtttgtggcgtctgcaccgtgattcgccacggtttccaaggaaaatctggtggcggaggagccaacgtcgcaaacgccggtgtgaggacgacggcgagcagcggaagagctgatgatttgctgaggtgtagcgatgatgcgaggagagtgatgcttgtgtgccgtgtgatcgctgggagagttaagcgagttgatttaccggcggcggatgcttcggctacagcggagaagaagtcaacggtggaggataactcggtggttggagtttcttcgagtggtggtacgtttgactcggtggcggtcaatgctggagtttattcgaatcttgaggagcttgtggtttataacccgagagctatattaccttgcttcgtggttatttacaaagttttagaatcttga

SEQ ID NO: 2531 - DNA, 828 bp, Arabidopsis thaliana
  Clone ID: AT_F8D20.C1.o210.tg
atgagtaatcccgagaagtctaaaattgctgaggaagagaatgagaattttgacgagagtgattatctttggagcgatgaagaaggagacatacgtgaaattgttcttggccttcctgcactaagacttagtgagagtctcaatgtggatgaaagcatccgtaacgaagccgtttccgcggcgaagttgatcgtggcagccgccaaggaagccacagggaatacagaacaaagtgctagtggtaccggtgacgttagtggaactccagaaatcataaaagttgggaaaccccgtgtattattggaagcgctggccgaagcatctggttgtacccctattggggtgaccactactgaaggagaggtagtcaagaaaccccgtaagaaaggttctactcagttgacacatctgccgcaaggccctcctatgtgtaatgtttgtgggaagggctttgcttcttggaaggctgtttttggacatctaaggcagcataaggatcgagggtatctaggttttcttcctccgccaacattcaatgctgctgaggaaggatttggtggagttgctactgcttcaaccggtggtgcagtagccactgctatttccgttggtgaagtccctactgcttcttccgctggtggactcgctacggcttcttccgatggtgaagggcttgtttcaagtatcggaagggcgaggattgacttaaatgccgatccagtcgaggaggaagacaaggtaattggagttggatctaagcgaaaatttgatctgaataggtcccccccaccagacggtgatgaagagaacgatgataaagtcgagtga

SEQ ID NO: 2532 - DNA, 1680 bp, Arabidopsis thaliana
  Clone ID: AT_M7J2.C1.o20.tg
tggagcttgtgaaacaagatgggaatgattctctcgatatgcttatcagacgtgcggttggaaaggatccgtttctttccttccctagacctgaaaatactcctgtccagctttttcaacttctccataccttagaacgtccaggctggccattgctgacccctttgaagatacaaatgcagaagtgtgaaaagtgcagtagggagttttgctctcctgtgaactttagaagacataaccgcatgcatcgccgtcaaagaaagccggaaaaggttgtgtttaaatgttaccaggattttggcaaagagagggatgcgctgggagccttttggaataaggtctctgcaactgatgcaaaggagattctctcagtaaagagcatgatgcttgaggatattcctggggcatcagtggagtcaggattaatgtcacttatcgaaaaaccaggctatactgctctgccacaatattatctaagagctggttctggccttttggatcttctccaggctagaccacctagacttccaatttcttcgcaggaactttttagcattcttgatgatgcaagtgaaaaaactttcctgtctagcgaggctgcaccaatgcaaaagtacatttttgacggggaaataggaaaaactgtactggaggcaaaaaatgttgttgcttgcgcaagcttccttctggaacagcgattggttaaagcatggcttgctgacaaagatgctgaagctctgaggtgccaaaatttactggttgaagaggaagaagctgctcgaagaaggaaagctgagctcttggagaggaagaagaggaagaagctaaggcagaaagagcagagagagaaggaccagaaaaaagatgctaaggaagacgagagcaccacatcagaggaacaacaatatccagctgagccatcaagccctttatctgtagcttctgattctgaggcacagacaccagattccttaccaattgatgattcttcatccctcgaggaacctcaagttttggaaactaataatggaagaaacagtgaaacgcaagtgccaatggttgatggcttagacaatggccaaaacatggaaaggcgaagtggccgtaggcaaatgcaaagatcacaacagggaatgccgaatgggttccatgctgatcatgcaccaaaccttggaggcatgcgaaagaatggaaccaacagagacgcaagagccaatactactaaagtttggagccgaaaatccgataaccccaaattgatatcacaacatgcagcagtgactcagcaggatcagacaaagagcagcgaatttatagttggatcgttgagtgtatcaatccgaaacagtggcgaacataaccaaaccaaatgcagtgaaggggagagaagaacaaagactgttgaggtgaaacccgcatctgagcaatcaactgtaaaaatatggagaccagtgagcagtcagggaagaaaaacctcaacagtcaatggaaacacagacaaagaagataagagatcaaacccaactacacccgaagtgaaaaacgctcatcacataagcttgcagtttaacaaccacgaagcaaaggcgtttcttgcaaagagtaaaccttcttttaccctttctttttatcttaatctccctatcgtttatattttggaagttgtttactcaatctgaa

SEQ ID NO: 2533 - DNA, 522 bp, Arabidopsis thaliana
  Clone ID: AT_K24G6.C1.o23.tg
atggaagatcattaccatcaagtagaagtggagggagaagaagagatcaagccaagcaaagaagccaacaagacagacgaaaacacatcatcattaagaatattcccctgcctcttttgttctagaaagttccatagctcccaagccctaggaggccaccagaacgcccacaagaaggagcgaaccgctgctagaagagccaaaagggcttatgattttgtcaacaacaatgacttccttcacacgttacctgttttcttatcctctccctctcaacatcacttgaccatcttaggctaccctgcttctgcctccgttgcctgttttccgacggttcatcccgaccatccgattttcaaatccagtggttctcatgtcgtgttggctacatcccaccaaggtagagattgcaaaggagggtactgttgtcaacaacgtgtagacattttggatcatcattataacgtggtcaatagtgacaagggtaaagatcagtgtcttgatctctccctacatttgtga

SEQ ID NO: 2534 - DNA, 816 bp, Arabidopsis thaliana
  Clone ID: AT_F8D20.C1.o120.tg
atgagtaatccgaacccagagaaaacgaaagtggatgttactgaggaagagaaagaggaatctgatgagcaatggagcgatgaagaaaccaatatgagagaaattgttctcggcctccctgctttgaatatcagcagtagaatatttggagagagtagtagtgtcgttgaggaagatgcagaaaaagcgcgtttgaatgagcaagcggttcttgcggcggggttgattttggctgcggcagaggaagcggttatgaaaggaatgaatgagggaagtgggagtggtgggaagaaaaagagtagaccaaggatatctacgcaaaccgatgacgaaggggatggtttgggtgaaggagaagcgaaaaagccgaagaagaaagcaaaggaattgactcatccaccgaaaggaccaccggtttgtcatatctgtggaagaggtttcggttcgtggaaggcagtgtttgggcatatgagggctcatagagatagaaactatcaagggtttcttcctcctcctacattctctgcgggggctgaaaggtttgtgattcccgggctaagatctgcttttactattgccactgtcggaggaggaagttctggtggtgtagcggtaggaggaagaagttccggtgatttttctggcagtggtggtggtgatgcgccaggatctgaaggtgggagaggttcaggtattgatttgaatgtggaacctgtggagcaagtagaggaagcgactgaatctggatgtattgccaagttcgatcttaataaatctccaccaaaagatgaagaggaagaggacaaacccaagtga

SEQ ID NO: 2535 - DNA, 1122 bp, Arabidopsis thaliana
  Clone ID: AT_T27A16.C1.o24.tg
atggcggctcgaaaactagggtcgttgttacgtcaatactttttctctctatgcttcctcttcctcggttgcttcttcttccctaaagacgcagactataaacaaaagagaagaaagaagaagcttagaagagtttcttcttcttctggttcatctctatcctcttcttggacgtatttaaaacgagttttcttatccacgacaaggatatccaaatcccgtaaccaaacacatcctaacgttactttaacatccgcaagatcatctcaaaactccctcgtcactctcgtccaacccgataccacaaaccaacccgacccggaaacacgtattcatcagcaaaccgaattcgagatctcctcttccgacgagattttcccttgtaactcgtgtggcgagattttcccaaaaatcaatctcctcgagaatcacatcgcgatcaaacacgccgtgtcggagctaatcgccggagaatcaagcacgaacatcgtcaagatcatattcaaatctggttggccggagcaaggtaattacaaatctccggtgatcaatcgaatcttaaaaatccacaacagttcaaagattctcaccagattcgaagagtatcgtgagttcgtgaaagctaaagccgctcgtagcaacggcggtggaagacggtgggacgatgaacgttgcgtcgccgacggaaacgaacttttacgattttactgctcgacgtttatgtgtgatttagggcaaaacggtaaatcaaatctctgtggtcatcagtattgtagtatctgtggtatcatcggatctggattctcgccgaagctcgacgggatcgcgacgttggcgacggggtggagaggacacgtggcggttccggaggaggttgaagaagagtttgggtttatgaatgtgaaacgggccatgttggtttgtcgggttgtagcgggtcgggtcgggtgtgatttgattgatgatgatgacgtggataagagtgatggtggagggtatgattctctggttgggcagagtgggaacaagagtggggctctgttgaggatcgacgatgatgagcttttggtttttaatccaagggctgtgcttccttgttttgttattgtgtatactgtgtaa

SEQ ID NO: 2536 - DNA, 804 bp, Arabidopsis thaliana
  Clone ID: AT_T7I23.C1.o3.tg
atggaagagaggcataagtgcaagttatgttggaagagcttcgctaatggaagggctttgggaggtcacatgaggtctcacatgctcattcaccctctccccagtcagcccgagtcatattcgtcttccatggctgatccagggtttgttcttcaggacagagagagtgaaaccgagtcgtccaagaagccctcccgcaaacgatccagacttaaccggagatccatctcatcattacgtcatcaacaatccaacgaagaagggaaaagtgaaaccgcaagagcagcagatatcaagatcggggttcaagaactcagtgagtcgtgtacggagcaggaaccgatgagttcggtgtcggacgctgcaacaacggaagaagacgtggccttgagtctcatgttgctgtcgagagacaagtgggagaaggaggaagaggaaagtgatgaagagagatggaagaagaagaggaataagtggttcgagtgcgagacttgcgagaaagtgtttaagtcgtatcaggcgttagggggacacagagcaagccacaagaagaagatagcagaaacagatcaattaggctcagatgagttgaagaagaagaagaagaagagtactagtagtcaccatgaatgtccaatctgtgccaaagtcttcacatctggtcaagctctcggaggtcacaaaagatctcacgcttccgctaataatgaattcacgagaagatcaggaataataattagcttgatagatctaaatctcccagcgccatcggaggaggaagagatggcctcgtcggttttttaa

SEQ ID NO: 2537 - DNA, 1209 bp, Arabidopsis thaliana
  Clone ID: AT_T20K14.C1.o90.tg
atggaagacgaacatcaagatctccataaacccattaatggagctttgcgagacctcaagattactcggtcacagaaagaaacagaaaagtctacgaaccaacagcaagatgttacttgttactatggtctaagggaaaactcgaagaagaaaacccaggaatctccggaaccaatgaagaagattttgtttcgatgcgaagaatgtggaaaagggtttcggtacgagaaatattttaagaatcatcgctcgatgatgcatttatcgccgaacgagaaggtttgtgaagaatccttgatgactctgtctcgtagccttgggtttgtgaagaagaagaaaagatcaagacttggtaggtctgggaagactttatttactacgtttcttgaaccgagttctatttttgatgcgactgatgaagaattagaagtggcggattgtttgattctattgtctaagagtgctcccaaggttgtagacgaattgaaaagtctttctgaggcagtacgtgttactcctgaaacacctgaaagtagctatgatttgggttgtttgctcaacaagaaaccgagaaaaggtggtgaattggaatctggggttttaagtaatgagcaaagacttatggaagaagggtttagtagttatggaacatcgaaagaaccagctagcttcttgagagacgaaaacagattggatcagcagaaacggagaaaagatggtgaatttgaatccggacttttgagtaatgagcaaagactgctagaagaagagattactactcctgtgacattcaaaggtccagcgagttccttgagacacaagtgtgctttggatcgaaatggaggtgaatttggtcctgagtttttgagtaatgagcaaacactgatggaagaaacatggaaagaaccagtgagtttcttagaagataagcatgaatttgatcagcggaaaatgcgagaagctggcgactttgaatctaggttttacagaattgagcttggagtaggagctatggagtgtacttcttcagatactgatatgctcacgcaatctgataagaagaacgttgagcatcgatgcaggttgtgcaacaagatattctcgtcttatcaagctctagggggtcatcagacgtttcatcggatgagcaaatgtaagaacaagaagaatggcatagaggaatcagttgaacccaggatgactctgtga

SEQ ID NO: 2538 - DNA, 1242 bp, Arabidopsis thaliana
  Clone ID: AT_F28P5.C1.o6.tg
atggcggaagaagctaaagttgatgtgaagacttcggcgaagaaggatatacgcaattatctatgccagtattgcggaatcagcagatctaaaaactatctcatcactaaacacatccaatctcatcatcagatggaacttgaagaggaaagagatgatgaagcttgtgaggttgatgaggagtcttcaagtaatcatacttgtcaagaatgtggtgctgagtttaagaaacctgctcacttgaagcagcatatgcagagtcattcgctcgaggttgggagacctcctgagaagctccagcaagtaagcctcgatcacgcaaaatgtttgaggtctgatagatcttttacttgctatgtggatgattgtgctgctagctataggaggaaggatcatctcaataggcatcttcttacacataaagggaagctctttaagtgtccgaaggagaactgcaagagtgaattctcagtacagggaaatgttggtaggcatgttaagaaatatcatagtaatgacaaccgtgataaggacaatactggtttgggcgatggtgataaggacaatacttgtaagggggatgatgataaggaaaaatctggtagtggcggttgtgagaaggaaaatgaagggaatggcggaagtggtaaggacaataatggtaatggcgattctcagcctgcggagtgttcaactggtcagaagcaggttgtctgcaaagaaattggttgtggaaaagcctttaagtatccttcacagcttcaaaagcatcaggattctcatgtgaaattagactctgtggaggcattttgttccgagcctgggtgtatgaagtactttaccaacgaagaatgcctcaagtcacacataagatcctgtcatcagcacatcaactgtgagatatgtggttctaagcatttgaaaaagaacatcaagagacatctacggactcatgatgaagattcctcaccaggagaaatcaagtgtgaagttgagggttgctcttcgactttctccaaggcttctaatcttcagaaacacatgaaagcagtgcacgatgatatacgtccctttgtctgtggctttcccggttgtggcatgagatttgcttacaaacatgtcagaaacaagcacgagaattccggaggtggactaaagaggaaacaagttactgcggaaatgctggtacgaaagagagtcatgcctcctcggtttgatgcagaagaacacgaaacttgctag

SEQ ID NO: 2539 - DNA, 1062 bp, Arabidopsis thaliana
  Clone ID: AT_T4P13.C1.o29.tg
atggaagaacaacaagaatttgagaaacccatcttcgaattccgtcctaagaagctcagaacctctcgagtttcgagaaatctcatgaagaagactggcttcagagaatctatgaatcattacgaagagctctcttgcaactacggattgagggaaaacccgaagaaaacccagaaatctttactcgatcatcgattctgtacgaggaggaggagaaataaaaagatcctgattcgatgcaaagaatgcgggaaagggtttctttacgagaaatgtctgtttaatcatctccaagtgacgcattctgaagaatctacaagaagaagcctgttttgtaggtttagtattgtgcagaggagaaaaagatcgaagagagtttccaggtacaagaagattcttcctcgattctctgtttcttcttcttcgtgtactatgtttcctgtttctgtggatgatggaggattattagaagtcgctgagtctctgattctcttgtccatgagtggtggaaagttcgtgaatggtttggaacattttggtaaagctctgggttcgactcagagaaaatttgaagacgggttattgagaaatgagcagagacttgttggtgaagctctggattcgaatccagagaagaaacttgtggggataagcagagcatctgttggaacatcgaaagagctttcgggttacttggcaaacaagaagggcagagaagatgatgaattgggtcagcagaaacaggctggagcaagaatacttagagaagaaactgataacgaacagaaacttgttcgtcaagaaactgcatttgaagattcagtatcaggatttgagatgaatatagagcatcggtgtgggctctgtcacaaggttttctcgacttatcaaactcttggtggtcatcagacgttccatagaatgagaaacaaatccaaaagtcaaaccaagagatgcagagaagaatcgatagaagctgaagctgggattaataatggttcagtgacgttgacaataagtgcagagtttgctgaaggctgtttaggtcagtacatgctttaa

SEQ ID NO: 2540 - DNA, 1014 bp, Arabidopsis thaliana
  Clone ID: AT_F11M15.C1.o8.tg
atgtctaatccagcttgttcgaatctcttcaacaatggatgtgaccataatagcttcaactattccacttctctctcttacatttacaactctcacggtagctactattactctaataccacaaaccctaattacattaatcatactcataccacttccacttcccctaactcacccccactaagagaagctcttcctcttcttagcttaagccccataaggcaccaagaacaacaagaccaacactatttcatggacacccatcaaattagctcttcaaactttcttgatgatcctcttgtgactgtggatcttcatctagggttaccaaactacggtgttggtgagagcattaggagcaatattgctcctgatgcaaccacggacgagcaagatcaagatcatgaccgaggagtagaagtcacagttgagtcccaccttgatgatgatgatgatcatcatggagatctacacagaggtcatcactattggattcctactccttctcagattttgattggtcctacacagttcacttgtcctctttgcttcaagacattcaacagatacaacaacatgcagatgcacatgtggggacacggctcacaatacagaaagggaccagaatccttaagaggaacccaaccaacaggaatgctaagactaccatgtttctgctgtgcacccggttgcaagaacaacattgaccacccacgagccaagcctcttaaggactttcgaaccctccaaacacattacaaacgtaaacatgggtctaaaccatttgcttgtcgtatgtgtggtaaggcctttgcagtgaaaggagattggagaacgcatgagaagaattgtggaaagctttggtattgctcttgtggctcggattttaagcacaagaggtcgcttaaggaccatgtcaaggcctttggaaatggtcatgttccttgtgggattgatagttttggaggagatcatgaggactactatgatgctgcttctgatatcgagcaataa

SEQ ID NO: 2541 - DNA, 1320 bp, Arabidopsis thaliana
  Clone ID: AT_T7N22.C1.o5.tg
atggaagagaacatgtcgaatctaacatcagcttcaggagatcaagcaagtgtgtcttcaggaaacagaactgaaactagtggctctaacattaatcagcatcatcaagaacagtgttttgttccacaatcgtctcttaagaggaagagaaatcaaccaggaaatccagacccagaagcagaagtgatggccttatcaccaaagacactaatggcgacaaacagattcatatgtgaggtctgcaacaaaggttttcaaagagaccaaaacttgcaacttcacaagagaggacataatctaccgtggaagcttaaacaaagatcaaacaaagatgtggttaggaagaaagtttatgtttgtccagagccaggctgtgtccatcaccatccatcgagagctcttggtgacttaaccggaatcaagaagcatttcttcagaaaacatggcgagaagaaatggaaatgtgaaaagtgttccaagaaatatgcggtgcaatcagattggaaggctcatgctaagacttgtggcactaaagaatacaaatgcgactgtggaactctcttttctaggagggatagtttcataactcatagagcattttgcgatgcattagcagaagagagtgcaagagccatgccaaaccctattatgatccaagcttcaaattctcctcatcatcatcatcatcaaacacaacaaaacatcggtttctcttcgtcatcccaaaacatcatcagcaacagcaatctccatggtcctatgaagcaagaagaatcacagcatcactatcaaaatatccctccttggcttatctcatcaaaccctaaccctaatggcaacaatggtaatttgttccctcctgttgcttcttctgtgaataccgggaggtccagctttccccacccatcgccggctatgtcagccacagctttgctccagaaagcagctcaaatgggttctacgaagtcaacaactccagaggaagaagagaggtcttcgaggtcaagctataataacttgatcacgactacaatggctgctatgatgacttcaccaccagaacctggcttcggatttcaagactattacatgatgaatcatcaacatcacggtggaggagaagctttcaacggtggttttgtccccggagaagagaagaacgacgtcgtggacgacggtggaggagagacgagagatttcttggggctaaggtcgttaatgtcgcataacgagattctaagtttcgcgaataatcttggcaactgtctcaacacttctgctacagagcaacaacaacaacaacatagccaccaagattaa

SEQ ID NO: 2542 - DNA, 1521 bp, Arabidopsis thaliana
  Clone ID: AT_F21M11.C1.o23.tg
atgacaactgaagatcagacaatttcaagtagtggaggatatgtccaaagctcatcaacaactgatcatgttgatcatcatcatcatgatcaacatgaatccctcaatcctcctcttgtcaagaagaagagaaacctccctggaaatcctgatccagaagctgaggtcatagctctatctccaaagacacttatggccacaaatcgtttcctctgcgagatatgtggaaaagggtttcaaagagaccagaatctacagcttcaccgtcgaggacacaacctcccatggaagctaaagcagaggacgagcaaagaagtaaggaaacgagtgtatgtatgtccagaaaagagttgcgtccaccaccatccgacgagggcacttggtgatcttaccggcattaagaaacatttttgtcggaaacatggcgagaaaaagtggaagtgtgagaaatgcgccaagagatatgcagtccaatctgactggaaggctcattccaagacttgtgggactagagaatatagatgcgactgtggtacaattttctccaggagagacagcttcattacacatagagcgttctgtgacgctttagcagaagaaaccgctaggctaaacgcagcctcgcatctcaaaagctttgccgcaaccgctggtagtaatctaaactatcattatctcatggggacacttatcccatcaccatcactaccacaaccaccgtcgtttccgttcggaccaccgcaaccgcaacatcatcaccaccaccaattcccaatcacaaccaacaacttcgatcatcaagacgtcatgaaaccagcgtctacgctctctttatggtcgggaggaaatattaatcatcatcagcaagtgaccatcgaggaccgtatggcgccgcagccgcattcaccgcaagaggattacaattgggttttcggaaacgcgaataatcacggcgagttaataacgacgagcgattcactcattactcatgacaataatattaatatcgtccagagtaaggaaaacgctaacggggcaacttctctttccgtgccttctctttttagcagcgttgaccaaattacccaagacgcaaacgctgcttctgtggctgttgcaaatatgtcggcgactgcgttactccaaaaagctgctcagatgggagcgacttcttctacgtcaccaacgacgacgattactaccgaccaatcagcgtatcttcagagttttgcatcgaagagtaatcagattgtagaagatggtggcagcgacaggttctttgcttcgtttggatcgaacagtgtcgagttaatgagtaataataataacggtcttcacgagatcgggaaccctagaaacggcgttacggtcgtttcggggatgggtgaattacagaattacccttggaagcgtagaagagttgatattgggaatgcgggaggaggagggcaaactcgggattttcttggggttggtgtacaaacaatatgccattcttcctctatcaatggatggatttga

SEQ ID NO: 2543 - DNA, 1089 bp, Arabidopsis thaliana
  Clone ID: AT_F4F7.C1.o10.tg
atggagctgacgcaacccataagagaaaacggagacccgcagggacaccagctaacagatccagatgcagaggtggtatctttgtcaccaagaacgttactagaatcagatcggtacgtgtgtgagatctgcaaccaagggtttcagagagatcagaatctacagatgcatagaagacgacataaagtgccatggaagcttctgaagagagacaagaaggatgaggaagtgaggaagagagtctacgtgtgtcctgagccaacatgtctccaccatgacccgtgccacgctcttggagatctggtcggaatcaaaaagcacttccgccgtaaacacagtgtccacaagcaatgggtttgcgagagatgctccaaaggctatgcagttcaatctgactacaaagcccatctcaagacctgcggttcacgcggtcactcctgcgactgtggccgcgttttctccagggttgagagtttcatagagcatcaagatacttgcaccatccggcaacctcaacccaccaaccaccgtcatctacagcagcacacgatgggccttgacgctccatcaagaaccacttcgacagcaagcttcggccctttattgcatggacttcctttgttaagacctccacgaccgtccaatcaacattcaccagcttttgcttaccctttcaatgcttcatcagctcctttcgaaagcctcgaacttcaactatccataggaatggcaagaacatcagcacaagcgaggcacaacgaaaagagagagacgagtttaacaaaggagagagcgaacgaggaggcaaggaaggcagaggaaacgagacaagaagcgaaaaggcagatagagatggcagaaaaggattttgagaaagctaagagaataagggaagaagcaaaaaccgagttggagaaggctcacgttgttagagaagaagcaatcaagaggattaatgcaacaatgatggagatcacttgccactcttgcaagcaactatttcagctgcctgttacggctgatgagagtacgtcgtctcttgttatgagttacgtttcctcggcgacaactgaaggagaatgcgagtga

SEQ ID NO: 2544 - DNA, 1014 bp, Arabidopsis thaliana
  Clone ID: AT_T23G18.C1.o15.tg
atgaattcttatgagacgaaaggcttaagtttcgaatccccaagctttattgaatggcttaaacctcaatcttctactacttcttctaaatctgtgttatatcgtgggaagacaagagatgctatatcaagatcaaatcaccaccagagtcagatgaacatgttggaacgatctctattcttgtaccaaccacaagaaccactcaacacgtctattcaatgcttgcctcttctaaacaagctcatggaaaataatagtcaagcctcggatatcaaagaagagaataaggatgatgtggttaccctccaaatcggatttcctaaataccaccgtggtagctcggaggatggctctgatataactttcgatcatcagaagaaacccatcaagagagagataatagaagatggtgtggtgatgatgaagaagaggaggaagatgaagtttgatgaggagataattgattctgatgtggaagtatgtgggaagaggttttggataccaagtccggctcagattcatgtcggtccaatgcaatttgcttgctctatttgcagcaaaacattcaataggtacaataacatgcagatgcatatgtggggacatggatctgagttcagaaaaggggctgactcgttgaaaggcacaatccaaccggcagccatcctgcggctgccatgctattgctgtgccgagggatgcaagaacaacatcaaccatccgcggtccaagcccctgaaagatttccgtacacttcagacacattacaaacgtaagcatggctccaagcccttttcttgcggaaaatgtggcaaagccttggctgtgaaaggcgactggaggacccatgagaaaaactgcggaaagctttggtattgtacatgtggatcagatttcaagcataagaggtctctcaaggaccacattaggtcctttggcagtggacattctcctcacccgtctcttttgtttgacggttttgaggaggatacagaatgcgtcaccacagagtga

SEQ ID NO: 2545 - DNA, 1401 bp, Arabidopsis thaliana
  Clone ID: AT_MLN1.C1.o8.tg
atgacaagtgaagttcttcaaacaatctcaagtggatcaggttttgctcagccacagagctcatcaaccctggatcatgatgaatctctcatcaatcctcctcttgttaagaaaaagagaaatctccctggaaatcctgatccggaagctgaagtgatagctttatcccccacgaccttgatggctacgaaccggttcctatgtgaggtatgtggcaaaggtttccaaagagaccaaaacttacagcttcatcggcgaggacataatcttccatggaagttgaagcagaggacaagcaaagaagtgagaaaacgtgtctacgtttgccccgagaagacatgtgtccaccatcactcctctagagctctaggcgatctcactggaatcaaaaagcatttttgccggaaacacggggagaagaagtggacgtgcgagaaatgtgctaagagatacgcagtccaatctgattggaaagctcattccaagacttgtggtactagagagtaccgttgcgattgtggcaccattttctcaaggcgagacagctttatcactcatagagctttctgcgatgccttagcggaagaaaccgctaagataaacgcagtgtctcatctcaacggtttagccgcggctggagccccaggatcagttaatctcaactatcaatatctcatgggaacattcatcccaccgcttcaaccatttgtaccacaaccgcaaacaaatccaaaccatcatcatcaacattttcagccaccaacttcttcgtcgctctctctatggatgggacaagatatcgcgccgcctcaaccgcaaccggactacgattgggtttttggaaacgctaaggcagcgtctgcttgcattgataataataatactcacgatgagcagattacgcaaaacgcaaacgcaagtttgaccactaccactactctctctgccccttctttattcagcagcgaccaaccacaaaacgcaaacgcaaattcaaacgtgaatatgtccgcgacagctttactacagaaagctgctgaaattggcgctacttctacaacaaccgcagcgaccaatgacccatcaacgtttcttcaaagtttcccgcttaaatccaccgatcaaaccaccagttatgacagtggcgaaaagttttttgctttgttcgggtctaacaacaacattgggttaatgagtcgtagtcatgatcatcaagagatcgagaacgctagaaatgacgttacggttgcgtctgccttggatgaattacagaattacccttggaaacgtagaagagttgatggtggaggtgaagtgggtggaggagggcaaactcgggatttcctcggggttggtgtacaaacgttgtgccatccatcgtctatcaatggatggatttga

SEQ ID NO: 2546 - DNA, 1482 bp, Arabidopsis thaliana
  Clone ID: AT_K24C1.C1.o1.tg
atggaccaattacgaggttacaaaaccaactgtggattctcacttgggaaaccgagattcggatctattaaggttaaaatcccaaggatcaaacctgagatagaagaagaccaagtagaagaagatgatgaagctaaaaacatcggtctcgaggaagaggaaaatgatcatgaagctaagagtatggatctagagcaaggagatgtggaagaagaagaaggagaagagaaaaaacatatatgttgtgaatgtggtaaaaggtttgtgtcaggtaaagctttaggaggtcataaacggattcatgtgctcgaaactcgtaaattctcaatgatgagaccaaagatggtgtctggtatggttggtagatctgaaagaggtgacttagaagtggcttgttgtgtttgttacaagaagtttacatcaatgaaggctttatatggacacatgaggtttcatccagacagaggttggaaaggtgttttgcctcctcctcctcttcttcctcatccacttggtaattcatcgtcttctacacttgatcatgatgatgagtttataagctcagattatgatgatgatgatgattttgatgatgatgatgatgatgatgatgatgagaactcggagttatgggacagtaatttggaattggaaaacgttgttgaatcgattaaaggatggtcaacaaaagggaagagaggaaggagaggtgatttgaagtttgatgaagcagatttgaaggatccacctttagaagatgtgaaggatattgatgatgctaatggtctattgttcttagctactactgcagaagcagctgctaatcttaatgttgctgagacttctgcttcgcgttccgttgaagagaaatatctggaaatggtcaagaagaggaagaagaagcagaagagattgtctgagatggagaaagagtcatcaacatctactcatcatgatcatcagcttgatcaggttgttgttgttgcagctgaggaaggtggtggtgccggtgcacgtgagaagcacgtgtgtgtgacttgcaacaagtcgtttagttcttatcaagctttaggaggtcatagagcaagtcacaacaaggtcaagatattggagaatcatcaagctagggcaaacgctgaagcttcattacttggaactgaagcaataataaccggtttagctagtgctcaaggaacaaacacatctttaagcagtagtcataatggagatcatgtttgtaatatatgtcacaaaagcttctcaacaggtcaagctcttggtggtcacaagagatgtcattggactgcaccagtttctactgtggctccaaccacggttccaaccgctgctccaaccgttccagcaactgcgtcttctagtcaagtaacagagacagtacaagaggtgaagaaattgaagagaagagttttggagtttgacttgaatgagttgccacctaacgaagaagaagaaagagtctaa

SEQ ID NO: 2547 - DNA, 1197 bp, Arabidopsis thaliana
  Clone ID: AT_F13M14.C1.o25.tg
atggaagcagctgcggaggctgtatcagccgctagggagcaatcattgatccttaaagggaaacggactaagcggcaacgtcctcagtccccaatccctttctctatcattcctcctatgtcttcgcatgaaccggatgctgaagaagagtctactagtcttgtttccaaggagaagagtctcaatgatgaaatcaacaacaataacatcaagaataataacaatactttgatcaatggtgttacatcttcatcttctgcctcttcatcttccaacaacaatgccacattaaaggccacggctgacgaagaagatcaagatatggctaattgtttgatcctcctcgcccaaggtcactctcttccccacctccaaccgcaaccgcacccccaacaacaaacaagacagcttatgatgagttaccaagattccggtaacaacaacaacaatgcgtatagatctagcagcaggaggtttctagagacatcttcatctaacgggaccacaacgaacggtggtggaggcagagccggttactatgtttaccagtgcaaaacatgtgaccggacttttccgtctttccaagctcttggtgggcatagagccagccacaagaagcctaaagccgctatgggtcttcactctaaccatgaccacaagaagtctaactacgatgacgccgtttctctccatctcaacaacgttctcaccacaactcctaacaacaatagtaaccatagatcgcttgtggtatacggcaaaggtagtaataataaggtccatgaatgtgggatatgtggagccgaattcacatccgggcaagcattaggtggtcacatgagacgccatagaggtgcagtggtagccgcagcagccgcctctaccgccaccgtatcggttgcggccattccggctactgcaaacacggctttgtcattgtcgccaatgtcgtttgatcagatgtcggagggtccaattcaggctcccgttaagagagcgaggagcgcggttgtgtcgttagatttagatctgaatctacctgccccggaagatgagaatcgggtcaacggattaagctttgcttcaaagcaagaacacgaacaagaacatgaacaaacacaacagaagaaacagagagaagaacaaaagtctcttgtcttgtcttctgctcctacattggtggattgccattactaa

SEQ ID NO: 2548 - DNA, 915 bp, Arabidopsis thaliana
  Clone ID: AT_mci2.C1.o20.tg
atgtattcacttctcaagaaaacaaaaatctgtcaggtgtgcaagaaatcattttcaaacgggaaagctcttggtggtcacatgagagctcacactttgaaatttttccctggatcatcttcatcaactggctcgatcactccatcactacgatcatgcaacaaccttggagcaagctttagaagacctaatgaaacagttctggcgagatttgtccacaccagtgaagttgttggtggtccaaagccagatctaaacaaagaagctgagcaacgaacaactgtcaagaaaaagatcgtcgtggatttggaagaggaaaattcgatagagtctgaaagcgatataactattgaagaaagtgctttatgtcttttacaaatgaaggatgacaacatgtcagaatatcttcagaatctgaaatcgattgatagtttggtatcaactcgaaaaagaaaagatactgaaaactatatcgaaatagattctgatgaaaatcacgaagatagtgatgatgagtacgttgttgaagatgaagatgaagacaatgaagatgacgatgttaagtctctcacttcagatgtggaaaacctaataggagacagcgatgaagatgatgatgattatggtgatgaaaacgcatattacggtggaaaaaggaaaaggggtaagaaacaaagtaaatatacgtgtgatacttgtggaaaagttttacgttcgtatcaggcattaggtggtcatcgaacgagccacaaatacaagcgattgaagatttccgacaagaattatttcggggaagatgggccaatagttcgacgacaatacgagtgtcaaatttgtaacagaatgtttgcatctggtcaagcacttggtggtcacaaaaagattcactatatgttcctagctccagccaagtaa

SEQ ID NO: 2549 - DNA, 975 bp, Arabidopsis thaliana
  Clone ID: AT_T7I23.C1.o23.tg
atgcatgtgactaggaatgttggaaaaagtcaaaagttgcaccacgtgtcgttaaagcaagtgcttagctacttggaaccacatgaacaagaagacaccaaacccgttacttccactaaaaacaagggctttcttctttttaattcacaccaaaacactttgaacacacacatgcatggagccatgaactcaccatgcattgatttcgtaatgttcagtcgtggacaacacgatgaggacaacatgtcacgtcgtcctccgtggaagagggagagatcgatgtccactcagcatcatcatcttaacttgtctccaaacgaagacgaagagcttgccaactgtcttgtcttgttgtccaattcaggggatgcgcatggtggtgatcagcataaacaacatggacatggtaagggcaaaaccgtcaaaaagcaaaaaaccgcccaggttttccaatgcaaagcttgcaagaaggtgttcacgtcgcatcaggcattgggtggacacagggcaagccacaagaaagtgaagggttgttttgcctctcaagataaagaagaggaagaggaagaggaatacaaagaagacgacgacgacaacgacgaggacgaagatgaggaggaggatgaggaagacaaatcaacggctcatatcgcaagaaagagatccaacgctcacgaatgcaccatctgccatcgcgtcttctcttcgggacaggccttaggaggccacaagcgatgccattggctaacaccttccaattatcttcgtatgacgtcgctccacgatcatcatcattccgtcggcagaccgcagccgttagatcaaccatctctcgatctcaacttagcttgccaagaatattccgtcgatccaacggccatgagcgtagggatgatcgagagagatggtggtggcaataatcacaacgctacttcatcttcgtggttaaaactcgcaagtggtgattggtcttga

SEQ ID NO: 2550 - DNA, 708 bp, Arabidopsis thaliana
  Clone ID: AT_MRN17.C1.o12.tg
atggttttggagttttcccgacaagaaaccgacccgggtcatgattttgtgcaagagtcgaccaacctttttggtgtccaagaaagagggcagatctcgtttcccgaccagaatcttgattggtacaacaccgaaaccataaaccctaaaaaagataaacatcgttctaaaccaagttccgggagctacgatatactggagctagacgtagcggacctactagcgaaatacacgcattactgccagatttgtgggaaagggtttaagagagacgctaatctaaggatgcacatgagagcgcacggggatgagtacaagacacgtgaggccttgatcagcccaacgagccaagacaagaaaggaggatactcgttaaagaaacattactactcctgtcctcaacacgggtgtagatggaaccagaggcacgagaagtttcaaccgttgaaatctgtgatttgcgccaagaatcattacaagaggagtcattgtcccaaaatgtatatgtgcaggagatgtagtgtgaagcatttctcggttctgtctgatcttaggacacacgagaagcattgtggggatataaagtgggtttgctcttgtgggactaaattttctaggaaagacaagctgatgagccacgtttctttgtttttgggccacgtaccggcacatgggtcgtccaagccgccgacaatcaccctaaagtaa

SEQ ID NO: 2551 - DNA, 1953 bp, Arabidopsis thaliana
  Clone ID: AT_MUO10.C1.o4.tg
atggatttagatggtgttgagttgttactagacttgagggaaatggtttctcaatcgggtttcgaaaagtctactacttgcagtggtgttattgctctgagaagtaatctgcagagtaaatcaagtcacaaatgcaaaatatgtggcaagagttttgagtgttatcaagctctaggtggtcaccaaagaattcacagaccgattaaagagaaactatcgaaacaagagttcagtgaagtatatcctcggaagagtaagttgcagaaaagacctgagagtagtagctcctgctatgaatgcaaagtatgtggcaagatttttgggtgttatcgaggtctaggtggccacacgaaacttcacagatcgactaagagggaattagcgagtactcaagatgagaattcactgttagactcatcagaagctaagaagattgtttcacaaccatcaagctttaaagtctctcaggaggagaagttcttacattgtgtggagttaaaacaagacttcagtgaaccgctttctcattcgggtgcattaccatctactctgagaagtaaattgcagacaaaaactcagtggaaatcaagctgtcattgcaaaatatgtggcaagagttttgtgtgttctcaaggtttaggtaatcacaaaagagttcacagagagattagcgggaaattagcgtgtaaaaggaagtacactgaagactataatccattctctgactcattaaaagctaagaagattgttaaaaaaccatcaagctttgaagtctctcaggaggagaagatcttacattgtgttgagttaaaacaagacttcggtgaactgcttgctcactcgggtttcgacaagtctattagttgcagcaaatcgatcaaagtgaaaaaagtagcgcgtaaaaatgagaaaactgaagatagtacttcactgtttggcgtttttgtcggcgaaatgtctcagagacttcatggttgcaaaacatgcgggagaaagtttggaactttaaaaggtgtgtatggtcaccagaggatgcattctggtaatcacaatagaatcgaagatgagaatggtttggaaaggatttggggtcttaagaagaagtctagggtttgctctgtttcagcttttgatcgattcaaaggatcttcttttatggctgagattgagaaacatgaggtgattgaagctgcattgaacttggttatgttgtgtcaaggagtttatgactttgcttctatcagtaatttgcctctaggtgatggtttcatggatttagagcttaaaccttgtcctttgagaaggaaactacagaaaaaatctcgctccagttataaatgcagtatatgtgagaagagttttgtgtgttctcaagctcttggtagtcaccagagacttcacagatggaaactagtgcctaaacctgagtacattgaagatgatagttcactgttagactcatcagaagctaagaagattgtttcaaaaccatcaagctttgaacatgctcaggaggagaagatcttacaatgtgttgagccgaaactagagttccacgaacagcttgctcactcgggtttcgacaagtttgatacttgcagtaaaatcaggttcagtgcattaccttctcctccagaagctaagaagattgtttcacaaccaccaagctttgaagtctctgtggatgaaaagatcttatatcgtgctgagccaaaactaaacttcagcgaaccgcttgctcactcgtgtttcgacaattctagtagctatagaagcataatatgtggcaagagttttgtgtgttcacaagcattaggtggtcaccaaacacttcacagatcgattaaaggccaattagcgggtactgaagatggtaattcactctctgtgactgactcagaagctagcaagattgttgcacaaccatcaagctacaagtctcaggggatataa

SEQ ID NO: 2552 - DNA, 1506 bp, Arabidopsis thaliana
  Clone ID: AT_F15A17.C1.o180.tg
atgcagatgattccaggagatccattttctatttcatcctccatgggagggtttgttcatcaagaaacacaccttcatcatcttcagcagcagatccctgaccttaaccctaattctaaccctaacccaaatgcgaaaccaaactcttcatcagccaagaagaagagaaatcaacctggcactccagatgctgatgtcatcgctctatcgccaacaacactcatggcaacaaacagattcgtgtgcgagatctgcaacaaagggtttcaaagggaccagaatttacaactacatcgccgtggccacaaccttccatggaagctaaagcaacggtccaaacaagaagtgataaagaagaaagtatacatatgtcctatcaagacttgtgtacaccatgatgcctccagggcccttggagacctcactgggatcaagaaacactacagccgcaaacacggtgaaaagaagtggaagtgtgaaaagtgttctaagaaatacgctgttcagtctgattggaaggcacatgcgaaaacttgtggtactcgtgagtataaatgtgactgtggcacgttgttctccaggaaagatagtttcatcacacatagagcgttctgcgacgcattaactgaggaaggagcgaggatgagttcacttagtaacaacaatccggtgatctctacgacgaatctgaattttggaaatgagtcaaatgttatgaataatccaaatcttcctcatggatttgtacaccgaggagttcatcatcccgacattaatgctgctatctctcaattcggtctagggtttggacatgacctaagtgcaatgcatgcgcaaggtctatccgagatggttcaaatggcctccaccggcaaccaccacctcttcccgtcgtcatcatcatccctccctgatttctccggccaccaccaattccaaattccaatgacttccacaaaccctagtctcaccttatcatcatcctcaacatcacaacaaacctcagcttcactacaacaccaaaccctaaaagactcatctttctcaccactcttctcctcttcctccgaaaacaaacaaaacaagcctctctctccaatgtctgccacagctctcttacaaaaagctgcacaaatgggctctactagaagcaattcctccaccgctccgtcattcttcgccggcccaacaatgacatcctcctcggccaccgcttctcctcctcctagatcgtcttctccaatgatgatccaacaacaactaaacaacttcaacaccaatgtcttaagagagaatcataatcgtgctcctcctcctcttagtggtgtctccactagtagtgtggataataatccctttcaatcgaaccgatcgggtctaaacccggctcaacagatgggtctaacccgggattttcttggagtgagcaacgagcatcaccctcaccaaacgggtcgtcgtccgtttttgcctcaagaactcgcaaggtttgctccattgggttga

SEQ ID NO: 2553 - DNA, 1047 bp, Arabidopsis thaliana
  Clone ID: AT_MOE17.C1.o17.tg
atggctgatccagattgtatcttcagaaatggatatgtagactactataactatagcttcaactatgccacttccctctcacgcatctacaactctcatgacagcttttattatcctcaccagacgacaaacccaaacatcaacgaaaaccctaatttgacttcacctgactctcctccacttagagaagccctccctctccttagcttaagccccattcataagcatcaagaacctactgctaaccaccatgagtactatttcatggagacgacagaaacttcctctaattcaaactttcttgatcaatgccaagacagttatcgtcatgatgtaaccgtggatcttcatctagggttaccaaacctcggtgatggtggaagcagcagcagcgatgtggtccttgattccaccgaccaccaagagggtcaccatgatcatcatcaagatcaaggacttgaagttactatggcttctgaccatgatgatgaacatggtggcttacaaaggggtaatcatcttcatcacttttggatcccgactccttctcagattctgatgggtccaacacagttctcttgtcctctatgcttcaagactttcaacagatacaacaacatgcaaatgcacatgtggggacatggttcacaatacagaaaaggaccggagtcgctgagagggacacaaccaacggcgatgctgaagctgccttgctactgctgtgcaccgggctgcaagaacaacatagaccacccaagggctaggccgctcaaggacttccgtacgcttcagacacattacaagcggaagcacggtgtgaggccctttgcttgtcgtaggtgtgggaaggcatttgcggtcaaaggagattggaggactcacgagaagaactgtgggaagctatggtattgctcatgtgggtcggattttaagcacaagaggtcacttaaagaccacgttaaggcctttgggaatggtcatgtcccttgttgtggaattgatcatgaggaagaggaggctgcttctgatgtcgagcagcaagaatga

SEQ ID NO: 2554 - DNA, 2055 bp, Arabidopsis thaliana
  Clone ID: AT_K23L20.C1.o2.tg
atggcttcgagggatggtaacaagaaaaaaaagaatctcaaagtttttgtcagagatcgttacaacagctttcgtgttttgcctatcgatgattctggaagtaacgaagatgggaagcgtaaagaggttattgaatgttcttcaagatcccctgtttttgaaacaggggaatctttgcagattccttcttcttatccactagagaccaattccaatccattttatattcctggtcaacctgagacctcgtcaagaaatggtgtcagcatgggagcttcttctctggttcagatttgggaagctcggtcgcagcagtcaagttcgagtctaagtcaatcgctactcgatagcaggacgagttctgaatcaagtctctccgactttctcaacgacgaggcgagaaaaagcaacgaaagcagtggtgaagaaatagattggtttcctcaatcagatatgaataatgtttcaaattcttatgagaatgatggagaaggaagatgttttcttgagctggctagttgtagtactcctaggataagaggacggcaagcaagtgaagatgtttgtaagatgattttgcgtgaccgagaaaatgagcttgaattgctcggtggtcgctacgcggtttcaaagttctcgcctcgcggttgtgggcgtcttcagtatatgcttatgatccgaagtttggaaaggtgcattgtgattcaagaaagatatcggtcgaaatcagatgtaaaccggttttcacgaggatctagggtgaagagtgttttgcaagaaacaatggagaaaagtaacacaagggagaatcaggccgcggctgataagccggaaattgccaataaacccgtctttaatgatgctgcaagcaatgagaacggttcaaagaaacctgaaattgagcggaaagctacagaagaaggagaagggttgaggaaagttactgtgaaggaaggagaagaaacgaacaagttctcatcgagttttgtagagaaggtgtatctttgggattctaaggagagagctaataggagaagaactatggggaaagctaaagacgagggaaaagatgcaagaagagtcattgatgtgaagactgaagggagaaacgaagaaaggcgaaagaaagaagaaggtaaatccatggagattgaggaatatagaagcaaccctcaagaagtgacatcagtggtttgtttggatagagaaaaggatgaagaaactgcaagacaagtatttagagagagtggtaaagaggaaaaatcttcacaaaacgatgaagaaacatcaaaagccgagaagcaacaagcagcggaaacattgtttctaattcttgaatcaccaatatttctaaatgcttgggatgaaaatgaaacagaaaatgaagaaaatgaagattgcaatagagagattatgtattatgattggattagtgatatctcgcggccaagaagttattgggaagatctcaagaaacaacgggtgctcgaggttatgaacaatatttccgagaaaggcgatatgtggaacttgatcaagtggaggaccgtttctagcttcctcgaaggtgattttcgggaaaagattgataaaatcatgatctcatgcgtgcaaaagaggtcagaaataggaagcaatcttgtagaagaagaagaaggtaacgaggagactttggttgagtgttcagaaaggtaccaagggaacgtagaagaaaatgaaacaaaaaagttaatccttgaaccagaaactgaaacacagatgatatgtgatctcaaacaacaaatcaaacagcttcaaagagatattcttgaactacaaagtttggtaaaatcttgtgttgatttccagaaatccttggaattcgaatcactttctgattcactagaaagaaattgttctatttgctttgagatgcctatagactcgcttctatacaggtgtggacatatgtgcacttgtctgaaatgtgctcatgagcttcaatggagtaatatgaaatgtccgatctgcatggctccaattgtagatgttgtgagggcatttcttgattcttag

SEQ ID NO: 2555 - DNA, 681 bp, Arabidopsis thaliana
  Clone ID: AT_T6G15.C1.o40.tg
atgagtttagagagtgatatcaaagaaagcaaacgagtcgttgaaccatttgatgatgacgattgtgcggtttgtttggagccgttggctaatgatgctgacgaacgaactgttgttaagcttcgatgtagccacaagtttcacttagattgtgttggttcatcctttaacataaagaacaagatggaatgtccatgttgtagacagattgaaaaagggaaatggttgttcgcagaacctgtagatcaactggaagaagatgatatgtcaccactcgacatgctaaccaatatggtgagtccttcttttcttcatattgatgatggaatcttcaccaatatagctagtgtgttatttccaaatgctctgaaccaaatcagtaacaatgccaacgtgagcagtaacccattgggtgagccgcgtaacactttgttggacacaaggatgcaacgtcaagtcgacgaacatgtagcctctactgtcgatagcgaacgtcgtttacccgacatgctgtttgaacttcatgacaggactgggggaagtggaccaagtggttatggccgtgaaagaagcggtggggaaggcggtgaaaacagttgtggtggggaagcggtggcggaggaagatcaggtgggggaagcagcagaaggggcggaaatgatggataatttgaacttttag

SEQ ID NO: 2556 - DNA, 2136 bp, Arabidopsis thaliana
  Clone ID: AT_T32F12.C1.o29.tg
atgggttgtactgtgagggagaagcatgttagaccaaaccggaagaccagatccgtgaaacccgaattcgatccgtgttgtttgctcgacaggacggctctatcgaaatcgattgttgaatcgagtcttaagcatcttgtttatcatccgggtcttctcgattcgtgtccagagtcaaaccctagtggcagttttgaggataataatggttggggttattgtacggaggagcaattagaggatattttgttgaaacatttggagtatttatacaatgaagcgatttcgaagcttgtgggttctggttatgatgaggatgtggcgttgagagctgttcttagtaatgggtattgttatggtggaatggatgttatgactaatattcttcataattcgttggcttatcttaagagtaatactggtgaaggtagtaatgtgaacaatgaggatcaatcagagacggtttttacggatttgagacagttggaggagtattcacttgcgggtatggtttatttgttgcaacaagttaaacctaatttgagtaaaggtgatgcaatgtggtgtttgctaatgagtgagcttcatgttgggaggccgagtactatggatataccgagttctggaaaaggggatagtagtaatgtaggggttggtggtgctagtagtactgtaaatggggttggtggtgctattgctccggcattgtgtagattccatggaggttggggttttggtaatgggaaaggacccaagttttctggtaatgggttttctttgcacagtgaagagttaacgttgcagagagagattgattgtccaaggagatttaatctctcaccttcgatgaagtctttgttgagagagaatgttgcagcctttgctgctgggtatcgtgctagtatggagcaaaagaagcaggtgcaaatgcagtctgaaactagtggtactagcttgtcttgcacggctgctgctacacattcagagaagtgtgagcagccacatgtcttcggaagtgaagaatgtttcagttcagtgctggagaaattccgggatctgaaccttgatgacaatgttgattcggcacctgaggagctgaaggatgatgctttaataggactacttcagcaggttcaggatctcaaaaagcaattgaaggagaggaaagactgggctcagaagaaggcaatgcaagctgcccaaaaggtcagcgatgaactgtccgagcttaaatcgttgaggagtgagagagaggaaattcagcgggtgaaaaaggggaaacaaactcgtgaggactcaaccttgaaaaaattatcagagatggaaaatgctcttagaaaagctagcggtcaagttgacaaggcaaatgcggtagtaagggcacttgagaacgaaagtgcagaaatccgggcggaaatggaagcttccaaattaagtgcatcagaatcgctcacggcatgcatggaggcctcgaagaaagagaaaaaatgcttaaagaaactactggcgtgggagaagcagaaaatgaagttgcaggacgagattacagctgagaaagagaagattaaggcactcaatagagctttagctcagatcactcaggaagaaaaagaatatgaggcgaaatggaggcaggagcagaaagctaaggagcaagttttggctcaagtggaagaagaacagcgctcgaaggaagcaattgaggctagcaacaagagaaaggtggaaagcctgcggttaaagatcgaaatagacttccagagacacaaagatgatctccaaagactggaacaagagctgtctcggctcaacaaagcctcttcaactgactcaagcctccaatccaataacacctctcacacaaaggtgaaatcagacaagtcgaagggagaaacaatgtctaagctgcttgaagagctgaataggcttgatggatcatatgagaaggaagcaaactatgaccgggaatgtctgatctgcatgaaagatgaggtttcggttgtgtttctcccttgtgctcaccaagtggtctgtgcgagctgcagcgatagcttcatgggcagtggcaaagcgacctgtccttgttgcagagctccggttcagcagagaatccgtgtctttggagcgagttcttag

SEQ ID NO: 2557 - DNA, 1206 bp, Arabidopsis thaliana
  Clone ID: AT_T8K14.C1.o20.tg
atgactatggggaatttcttaaagagatttggaagtggaaaaagcagaagcagtagaaatatgactctgggaacgacgtcgtctcaatctcatgaaccatcaccgtcggatccttcactctcccttgccgataataccaacgccaccaagaagaagtacgctctcatccctgaccgcttctcttccctcgaccaggtatcaaaagctctaagagaagctggtcttgaatcatccaatctcattctcggagttgatttcacaaagagcaacgagtggactgggaaaacttctttcgatggaaaatgtctgcacgcgctcggcgaaacttcgaatccatatgaaaaggcgatttttgtaatcggccaaacgttggctccttttgatgaagacaatctcatcccttgtttcggctttggcgattcaacaactcatgacgaggaagtgttcggtttccatagcgacaattctccatgtcatggcttcgaagaggtcttagcatgttacaagagaattgcacccaacttgcgtctatcagggccaacgtcgtatggaccgctcatcgatgctgctgtcgacattgtggagaagaacaacggacaattccatgttctggtgattgttgcagatggacaggtaacgagaggtacggatatggccgagggagaactcagtcaacaagagaaaacaaccatcgacgcgattgtaaatgcaagctcgtatgctttgtcgattgttttagtcggtgttggagacggaccatgggaagacatgaggaagttcgatgataagatccctaagcgtgaattcgacaactttcagtttgtgaatttcacagagattatgacgagaaactcaccagagtctgccaaagaaactgcttttgctctagctgctctaatggagattccctttcagtatcaagcagccatcgaactccgcttactcgggaagcagacgggcttagcgaagacaatagttccgaggccaccaccaattccgtacacacctccaactaatgctgaactaccatcaactgcatcacctgcatcacctgaacaaacccagagttgcccgatttgtctgactaaccgaaaagacgtggctttcagctgtggccacatgacttgtggagattgcggatccaaaatatcaaattgcccgatctgtcgagtaaggatcacgaaccggctaaagctttacacatga

SEQ ID NO: 2558 - DNA, 1227 bp, Arabidopsis thaliana
  Clone ID: AT_MPN9.C1.o15.tg
atggagaacgacaatggcccacacgttggcaacgtcgtcgtcaccgctgagcaagcgaccaagattaacgagactgatggacggttgccggagaatcggcagaccggtgttgtctctgacaccggaagtggtagcgagagaggagagcaaggggttggagagtcggcagttgctgtggcggtgccggtggaggagagcggatcgatttcggtgggagagctacctgctccccgatcttcctctgctagagttccgtttactaatctaagccaaattgatgcggatcttgctcttgctcgcacactccaagaacaggagcgggcgtatatgatgttgaccatgaatagtgaaatcagtgactatgggagctgggaaactggaagctatgtatacgatgaggatgagtttgatgaccccgagaatgaggatgaggatgatgatgaagatgaatatgaaacagatgatgatcctcaggaagatgggcttgatgtcaatgtgcacgccaatgaagatgatcaagaagatgacggtaactctgacattgaagaagttgcttatacagatgatgaggcctatgctagagctcttcaagaagctgaagaaagggatatggctgctagattgtctgccttatctgggttagcaaaccgggtggttgaagatctagaggatgagagtcatacttctcagtggccaaaggacaaagtcgtgacattgaacccgccattgtctagttatacatcttacatggctccatctacctactatccttctgttgtggcattagatgcctgggatgagatggatcctgatgagctttcatatgaggagttgcttgcacttggcgacattgtgggaaccgaaagtagaggattgtctgctgatacaattgcatctttgccttcaaaaagatataaagaaggagacaatcagaacggaaccaatgagtcatgtgttatatgtcgtttagactatgaggatgacgaagacctgatactgctcccatgcaaacattcttaccactcggagtgcataaacaactggttgaagataaacaaggaagagtatctagagtatggtgaatcatctcatcagcttccatcacaattaggaagaagaacttttgtcaacattcataagtttcaacttcgacctctggacaaagctgatgaggcaaaggaagaaagattcagaaagaatcataagctaagaacttcaaaaccttag

SEQ ID NO: 2559 - DNA, 2340 bp, Arabidopsis thaliana
  Clone ID: AT_F19I3.C1.o15.tg
atgcataagcaagacaacaacgacgacgagtcggacgccaaccggtgtttttgttctggtaaaacagttggattcgatttggcttttccggttacggagcgaagtcaccgccatgtcactgacatgttgaacattggagccaatctgtacttttctgaaaggtcaaccataaccaacaaacgacttaagaacatcatcgatattgcattttccatcaacagtttgggaaaacaatattccacacaaacaatcacaattgtacatatgcaatatcgatcgtttttgaggaggaaaccaagaagattgttgatcgcaaccatgttttgcggcacttcaatgttttggtcaaacgaactcaacagaaaattaaataaagacatggttgcagtcgtgtcacgttgtccaacatgtgcgaccatggatcgcaaccaacggcacaatgacgatgttgttttcaagaagaatctgaaagctcaagtgaaaactgctcctccggccatctccgacgagagctcggagaacagagttgattctttgatcggaaacaagcggaaaaagaacaataaaagccgtcctggatcgccggagaaaccacggactagaaaaggaaacaacttttccgacaatcttggaggagcttcttctcttgtgcagatatgggaggcgaggctaaatcgatccaacggcggaaactcggctatccatagccaatcaatagagatcagctcagaagcgagcgttcaagaaatacaccttttagctccatccatcgacggagaatctgaatcagagaacgaatccaagagtcctgatcagacggtggagattgaatctgggactctcaattcggtttctgatattatccggagattgagtaacgaacagaagctaaccgccagcaataatggcggtgcagtcgatatgccgatcgttaaaacgccgacgctggagaaaagcagttttcaggtggttacttgctctccgcgaattcgaggaaggcaagcttactccgatctgcttgtgcatctggaacgcgaacgtcaccgcgaattggaatcacttcttggacgcaacgcagtttctaggtttcctcaacgtggtcgcctccagtcaatgttgcggctaaggagtctcaaacgcggcctagcgattcaagatcgtcatcgtggtaccacaaaaagcgatttgaatcgcttccaacctagttctacaattctccatctaagagaaaaactccgggaaaaagcagcaaacgctgccgctgaagccggactaaagaagggtcaacaatccaccgtagaaacagagagcatgcagtcaaaagaaaccagtggtattcttcattctccttctacagagcggttaagtcctcaaaaacgcaacatagaggaagcaatcttacgcaagaacgaaactgaaaccaaaatgagttaccttcagctgaaaaaagccatagtagcagaagtattggaaagagaatctgataacactagtcctctcaccagcgtaactcctcaagaaccgcggatactaaggaacgaggaagcggggaaactagaaagcggtacagagggaactcaagagacaccgttccttgagacacaagaaatgtcattccaaagcggatgggaagagcaagaagagtatgaggatgagcagtcttattacggagacatgagctatgactggtttacagaaatatctaggcctcggacttattgggaagatctgaggaaatctcggtatctggaagtgatgaacactaaatctgacaaggacgatatatgcagacttcttgagagaagaacggtttcgggtttcctccaaagcggattacgagagaagatcgataagctcataatgtcccgtgttcagatacatccggctcaccggattgaagaagcaactaaagaggaagagaaatatgacataggagaagaaaaagatgaagacagagatgacttgagccaatcatcatcacagatatttgcaccgtctccggcaggatcatggagttctctggacacaggagttacttccacaccaacgcacaatcttcattccactctccaactagaaatgtctgagctacgagactctgtcaaaacgtgtttggacgtcaatgctagccttcaaaagtcggttcacctggaaaatccctttaaacgcaaatgctgcgtttgtaacgaaacgcaagttgaaacacttttatacaggtgtgggcacatgtgcacatgcctgagatgcgcaaacgaactacaatataatggcgggaaatgcccgatttgtcatgccaagattctagacgttgttcgcgttttcgtcgattcaagaacctga

SEQ ID NO: 2560 - DNA, 804 bp, Arabidopsis thaliana
  Clone ID: AT_T1A4.C1.o30.tg
atggaagcttcacccaatgatcgacttcattttggcaaaatgggtttcgggtgtaagcattacaagaggagatgccaaatcagagctccatgttgcaacgaagtcttcgattgtcgccattgtcacaacgagagcactagcacattgcgcaatatctacgaccgtcacgatcttgttcgtcaagacgttaaacaagtgatttgttctgtttgcgatacagagcagccggcagctcaagtttgttcgaattgtggtgtcaacatgggagaatatttttgcagcatctgcatattctatgatgatgatactgaaaaacaacagtttcattgcgatgactgtggaatttgcagagttggtgggcgtgagaatttcttccattgcaagaagtgtggatcttgttatgcggttggtctgcgcaacaaccatcgctgcgttgagaattcaatgcgtcatcactgtcccatttgttacgagtacctttttgactctctaaaggacacaaatgtgatgaaatgcgggcacacaatgcacgtagaatgctacaacgagatgatcaaacgtgacaagttttgttgtccaatttgctcgaggtcagtgattgatatgtctaaaacatggcagagactcgatgaagagatcgaagccactgctatgccttcagattaccgtgacaagaaggtttggatactttgcaacgattgtaacgacacaacagaagtgcacttccacataatcggacagaaatgtggacattgcagatcatacaacacacgagcgattgcgcctcctgttcttcctcaatga

SEQ ID NO: 2561 - DNA, 666 bp, Arabidopsis thaliana
  Clone ID: AT_F6N18.C1.o18.tg
atggttcatacaggactccgattattttccggcgaagatcaggcacaaaagattagtcacctgtctgaagatgtttttgctgcacatatcaataggcaaagcgaagaacttgatgagtttcttcatgcccaggcggaggagctacggcgtacattagcggagaagaggaagatgcactataaagcgcttcttggtgccgtggaagagtcgttggttcgtaagctgagggagaaagaggtagagatagagagagccacgcgccgtcacaatgagctggtggcacgtgactcgcagctgagagcggaggtgcaagtatggcaagagagagctaaagcgcacgaagacgccgccgcgtcgctgcagtctcagctccagcaagccgttaaccaatgcgccggtggatgtgtatcggcgcaggatagtagagcggcggaggaagggctattatgcaccacaatcagcggagtggatgacgccgagtcggtgtacgtggatccggagagagtaaagcggccgaattgcaaagcttgccgggaaagagaggcaacggtggttgtgttgccgtgtcggcatctgagcatctgcccgggatgtgaccggacagctttagcttgcccgttgtgtctcacgttgcggaattcaagtgttgaagctatcttttgctaa

SEQ ID NO: 2562 - DNA, 1641 bp, Arabidopsis thaliana
  Clone ID: AT_K9E15.C1.o7.tg
atgggatctggccggagcaaatcatgtctaggctcgtcggcgatggcgagagaagcttctgacgtggctcaacctcctccgtcgtcttctagtggtggtggaaggagaagaagatcaaagagtcttttttgtggtcttcactcttcttgtcttgcttcatcttctacttctcattacagtgatgatgataatgatgaacaggtgtgtaatggatggatgaggaagagtcatggaagtgttacacggcgtagaatggaatcgagaagagatgcatcagattgctatgataaagaattgaaagatgataagaaatctgaaaacgaaagacattgtgatgagcttgagcttgatgatgagtgtggtgttgaagaagaagaagaggaagctagtgtaagcaatgtacagatgagaaatgttagcggttcgattcaagaatcttctactccaggtcgagttttttcgcatttcaaattcattcctggtaacataagctctagacttagcagagcttcaagttcaagatccttcaacacgacttatccagtctcttcttctcatagagaagatggtgttacttcaccttcagaatctgctattaggctcaatgatagagttgagtctccgagaattcctgtgattgacaatgtagttagagatattgatgccatgagatttggggaagatggtagcttacgttctccgagagtagttaatggtatggatagtacttatgctggacttcttgatagaagacatgttgtacgagaaccttctattgagcgcaatgttagatttagtagaactctgagtgttggaagactccgtgatagagttcttcgccgatcttcactctctgatttcgcattccgtccctcgccacatcagggagaagaagatactgatctcttctctgctgaaaccgcagcagcagaggatgctcctgtgacttcaacgtctatactaaatcgttccgcttctagcattcgaaggaccttattcggcattcaggatcatgagacaccagctgctcttgtgagagaagggaggtatcaaggtttattagaacacagatcagatttccttgaaagaaggaggagaataagatctcaggttcgcgctcttcaaagattaggaagccggtttgagaatgtcgcagtccatcatgatagatcttgtgtcttatcaggtcaagatcaagcaggtcgctgcacatgccgtgcagttactaaccgtggttcgacaacagcaacaaccgatgaaacaaatgcaagagctagcatctcaaggatagtattgctagctgaagctctcttcgaggttcttgatgaaattcatcagcaatctgttgtcttatcctctcaacaaccatcagtatcatctataggatctgttcctgcacctaacgacgttgtggatttattaccgataaaactttatactaagtcacaaagcgaggatccatcacaatgttacatatgccttgtggaatatgaagaagcagactctataaggacacttccttgtcatcatgaattccacaaaacctgtgtagataaatggctcaaggagattcacagattatctgatgatgtttttatggcgaagcagagtatgtccgctgtgtcgaggagatatttgtag

SEQ ID NO: 2563 - DNA, 1032 bp, Arabidopsis thaliana
  Clone ID: AT_F7D8.C1.o33.tg
atgcctgcagcactactggcagcgtttgacaacagatcttggatccctgtcacaaatatatttcttcgtctttgcaaaggttctgggtttagttctttaaagaacggagagtcttcgttttcgtctactgttttccaggcgcttctacgagatgcttgtatcaatgatggtgaattactttctacttttcttaaccgtctattcaacacactgagctggaccatcactgaattttctgtctcggtgcgagaaatgcaagaaaagtatcaggtaatggagtttcagcaaaggaaatgttgtgtgatatttgagctttcaagcaatctcgcaagggtcttagaattctgcacttacgcaatgccacaagcatttcttgctgggactgacacgaatcttcgtaggctcactgagttgattcttttcatcttgaatcacatgacctcagcagtagatgacgagttctttgatctatctgtcaggtcacttagacggcagggacaaccttcagagaaagttagccgagggatcttattagctcctttggttggtataatcttgaatctcttggaggctagtgaagactcaaaaccaaagcaacaacatgatgtaattggtcttttcgcaagcatggactgtcccgatacagtctattacgggtttcagtatctcttggaatataattgggacggttgtgtaagcggggatgatgcctatgtaaagaaacttggacagcttgagaacttcttgagccatctcataaaccgggcttcatcgcaagaacccgaaagaaaagaagagtcattcaacaaagacacgacagatatagaagacaacacttgctgtatctgctacgcgggggaggctaatgcaatgattgctccgtgttcacatcgatcatgttatggctgcataactagacatcttctcaactgtcagagatgttttttctgcaatgctacggtgatagatgttataagagataaagaagaagaagaagaagaagacgatgatggtcacaaaagaagcacatga

SEQ ID NO: 2564 - DNA, 2220 bp, Arabidopsis thaliana
  Clone ID: AT_T17H7.C1.o18.tg
atggtgtcttctcctcagagattcggtttaatcttaagagatcgtaaccaaaacgctggcgtttttcaaaagaatctgaaatctccggtgaaagaggttttgaaatctcatgtctccgatgagaatttagttgattcttggatcgaaactcacaataacaagaacaatcgtgttcttgaatctccgttagaatcgaagagaaacgacaatcttgtggcttcttctttggttcagatatgggaggcgaggctaaaccgatccaacggtggaaactcgccgagtagcagtcaatctacggcgagtagtagtagtcggagcgattcaggagttagtgttcaagattccggtctttcagaatcttcatcaatcgatggagattctgaaattgctgatcgaacggtggagattgaatctaggtcacatggtttggtttctgattccggagaaagtaaatggggacgagtcgctgacctaattcggaggcttagcaacgaagacaagaaacgaaccgctggagataatggcagcggcggtggcggtggactcgagattatcagaacgccgaggccttattgcacttcgtcgtcatcggagaaaagtaattttccggtggttagtttctctccgaagatacgaggacgacaagcgtttaccgattttcttatgcaaatggaacgtgatcgccaccgtgaattggattcgctttttgaacgcaacgcagtttctaggtttactcaacgtggtcgtctccagtcaatgctaaggttaaggaacctcaatcgctgtcttgtgattcaagatagaaaccggtctaacgcaaaaacaaccggattaaaccgaattgaatcaggctctgctgttctgcatttaagattttcaatctttgattggcaacgcagggagaaatttcatgcgaacgtagtaaactctgcggctgcaacagataagaggaagaatcatcaacgatccactgagatgaacaacaaatccgtagaagaaacagaaggaactactaccacaagcacgaggttaaaggatggtggtgttactctcgaagcttttttcgcagagcggttgagaccccgtaaccgcaagatagaggaagcaacgttatgtaaggaagaagaatctgtaagtggaacagttgattcacaaaagaattgccttcagctgcaagaaacaagagaagtagaagaaacttgcaacgatggcaagtctgaaaagaaagaagaagaaaatactagcccgagtgaatatttatctcgagaatcgcggttgagacagaatcaagacgagaacaatgtgggaaagtatatgcaagaaactcgagaaacagaaggtctagttcatgagagtaatgagatggaccagtgccttgatcaacaagaaacatcctatttgaatagatggggagaacaagaagagtatgcagatgagcagtcttattatggagaatataacgacgactggcttagtgaaatagctaggcctcggagttactgggaggaattgaggaagtcacggtacctggaagtaatgaacactaggtctgagaaagatgacatatgcagactccttgagcgaagaacggtgacagatttcctcgacagcgggttgcgagagaagatcgataatctcatgatgtcccgtgtacagacacactcggataagcactccaaaaaatgggaattgcaacaagaagaagaggaggaagtaaattttgaaattgatgaagaaatcaaagaagagccattaagaggaggtgaagagcaagatgatagagatgacttgagccaatcgtcgtcttcacatatatctgcatcgtctcctgcaggatcatggagttctcaagacactgatgttacttccactcctgccttggttgttcagaatcctcagtcacctgaaatggagctgataagcggtatgagatcacagatccaacagcttcagcaagaaatgtcagtactacgagattctgtcaaaacgtgtttagatgctaacgcgagcttgcaacacaaggctcaccaagaaaacccaatgaaacgaaaatgctgcgtctgcgacgaaacacaggtcgaggcggttttgtacaggtgtggacatatgtgcatgtgcctaaaatgtgccaacgaactacattggagtggagggaaatgtccgatttgcagagctcagattgttgacgttgttcgtgtcatctacgatacaagaaactga

SEQ ID NO: 2565 - DNA, 792 bp, Arabidopsis thaliana
  Clone ID: AT_MMF24.C1.o2.tg
atgttatccatccctgatactagaatgtggaatctagcatcgagttatcttacgggaaacattggaccgaaaaacgatatcagaagaccggtccatgctcatgcggagtgttcagatgacgatgtatcttctgtaggtagtaaagacgaaggtctcgagtgtcctatatgctgggaatcatttaatatagttgaaaacgttccgtatgtgttatggtgtggacatacgatgtgtaaaaactgcattttgggacttcaatgggctattgtgaaattgcctactcacccggttcagcttcctctcttcatttcatgcccctggtgcaaccttttgtctttccgtctggtcttcagaggaacactcagattccctcacaagaactactttgtgctttggatggtcgagaggatgaatggagagagacgtaactcacctggtggagctcaaacagatggaaacaatgatcatacaagggaaactccatctccatgtctccacaatcgccatcatcgcagtcaacctgaaccatcacgttctgttaatgatcatcgcattccaagggacaacatacaaacttcactgaggaagtctctggttttctttgtccagttgacagcaaagttcccattagttgtcatatttctgctgataatactctatgcaataccgaccagtgcagccatattggcgatgtacattctagtcactctcttgctggctctaccgtcgtttctcatcctctacttcgcttatccttgtctcgactggcttgttcgagagattgtcacatga

SEQ ID NO: 2566 - DNA, 1089 bp, Arabidopsis thaliana
  Clone ID: AT_F27O10.C1.o9.tg
atggcgcgaactattaaatatcggttattaattgagtttcatagagtcaataaacaagtagagagaatatattctaagagttcaggaagtagcaatgttaatgaaggcaaaagatttgcttttgatctcaacgtggaacctgttgatgaaactttggacctcaacgttgaacctgttgatgaagagaatcgtgatgctctgaatcctgttgatgaagagaatcatgactctatgaatcatgttgctaaacagaatcatgattcttctaatcatgttgatcaagagattcgtgattctcagaatcttattgatgaagagaatcatgattctccaaaagactcagattatctcggtgacttggatttgtgttcgatttgtcgtggggctttggtcaatgagaatgatgttcaacgaacactggttacacttaaatgtgttcacaagtttcacctcgactgtatcggctcagcctataatgcaaagggcttcatggaatgtccaaactgtagaaatatagaaccgggtcattggcagttttcagacggtactcacttcaatcccaatggtatgattgctaataatgaagaagaagaagaagacaatgatcctggatccttttctcagatgattgtaaaatcagaggtgtgcccttttggatgcttaggtcaacggtatccttttgatcccttaggaagatccgacatctcaatgattaatgcaccaatgaatttgtcatgtccaagcactagcacggtgcaacttaacccatctgacgtatgggagagtactcagcctttcctgtcatcgaggcatcacctcatggtcgaagatgagatataccgcatgatttacggtgacagaattgaaatgggagaaagaagtggcaaccatagaggcagagaaagcaatggaaatggtgataacggaggaagcagcacctttggtggcaatggcaacggcaatgggataaatgcaacggttctctgttcgtcgaggaccggaagttcaaattatttttcaacgtcacaagttaaagtgaccattcaacggctggagaatgttcatggactcatcgggatctcttcttag

SEQ ID NO: 2567 - DNA, 1512 bp, Arabidopsis thaliana
  Clone ID: AT_F9K21.C1.o140.tg
atgtatgacctaaaaccctcaccgttccacatgaataggctttacttcaagggttttgtgagcgaggaaactaagggctttggggttgctatttgcgaccaagaggataagctactgtatcatatcaagggttcacgtcatcatgactctgccataacagttttggaggctgagcttaccgcattgaagcgaggactaatcgaagctgtgggtttggggatcaaccatatctcattctactgcgatcatgatcagattttcgaattggtcatggggatatcggtcccagagcaagataacattgctttgcttatggatgatgtgcaacgtattagaaaacaatttacttctagcatccctgttttgatgactagaaatcaagctaagtttgcttataagcttgcaatggaaacaatagtttctgaaattagcatagatatggcgccttctcagaggaagacttgcggtatctgtttcaatgatgatttcaaagctgagcatatgttttctgttgatttatgtggccatcaattctgtgtggagtgcatgacacaatatataaaagtgaggctactcgaggaaagtgagatgagatgccctcattatcaatgcgagtccaagttaactgttgtacgatgtgccaatcttttgactccggaactaagagagatgtgggaacataggagccaaaaggaatccgttgttgtggcagacaaagcttattgccaaatcgaatgtgcttggcttttatgtcaaatggagttcagagatggtgctttagatgtagtaagtcttattgcatcagctgcaaagttccgtggcataacaacttgtcgtgcgagcaatacaagagatgcggatataagttttgctacacatgtggagatgaatggaagcaaggaagttgccttcatcagcgaaaggagatgcttgtggagtatggctttacttcaagggtttagtgagcggggaacaacgggatttgcggttgcaatttgtgaccaagagaataagctactgtatcataccaagggttcacttcatcatgactccaccattacaattttggaggctgagcttacgtccttaaaacaaggactaaccgaagctgtgagattggggataacttatatcaaaatttactgcgatcatactaaacttttcgatttggtcatggggacatccgcgcttgaggataacattgccttgctaatggatgatgtgcatcgcatccgaaaacaattgaagtctagcaatcctattctggagactagaactcaaattagtatgcttataaacttgcaatggaaaccaactgagcttaatggagtcatcaagcgcgccccgagccggtacataccgtttgccccgaagccacctctcaaacgaccaccgagccgtgaaaaacacgcgaggcaaagacttgtaaaaaccattcattctccaaggatcatttccggtaaaataggatcttttatgggactttcggaaatgataaaggagaatctttga

SEQ ID NO: 2568 - DNA, 1350 bp, Arabidopsis thaliana
  Clone ID: AT_F6F9.C1.o16.tg
atggggtctgtttgctgtgtggctgcaaaggacagaaatgttcccagtggagctattgataattcagtgtgttcaccatcgtggagttttcgacgggacaacaggaggcgtgtagctgatgagattaaagattcatctaatcataatgttgggagtagaggtattgacatcgataagttgtcgttaggcttagagagaggacctccgtcatctgaaactgggggtttagctactcttggctctcagaaatccgcagactcagagatgggcacagcttcgatggttacagctcctttagcgggtacaagtttggcgattcgatctccttcagatgtatccttggcaagtcctgttcgtgttgaggtgaagaatatagttgactcatcagatattgtttcatcagttttaccaaatccgtcaagttccacctcggtctctgatcttccttcagctcacacacattcacttcctcccagatcaactccgtctagacgtgctcgaggttcacctgggcagcagttgtttaggcaggtttctgatagtcaaactttgggattgaaatctcccaataattactcaacatctgaaggaaggtcgtcctttgtgctttcgacctgtagtaatgacactgccactgggtcccattttgcttcttctgaaggtggctggtccataaacgccttttgtgagctcgtggctcagtctcaaagggagagatggtcttttgataatgagcacttaggttccggacgacgaagactaagtgggtgtagtagtagcagattctcatgctccccttctgttgatcagcagacttgtgggcgttgctcaaagcttttaactgaaaggtctccagttgccaggtttgaccttccaattcctgctgttctagcgtgcggctgcttagagacaatgacaaatgaaacagagaagtatgatcctacgtgtcccatatgcacagagacacaggttactaaattatcgaggaaagctctaaaagccgaggcagaattgaaggcaacgagttacaaaaggtgtaagaaccgtgtggtagatagttatgtccgcagtgaatgtgaggatcttatgttccagaatctagggaaacgagaaggaaaaggtctgaagatggatcctagttcgaataccaaaggctccacgtctaagtcttttatgaaatggcacttcggttccgtcagcaccaagtggagtaaagccagggattctacctcgaagaagagcttttggtccagacatagtaataaaagattaagtcattctttttcaagcgttgaggtaaaatatccatacgagactcaatatgttcactttccatctaaacaaagttaa

SEQ ID NO: 2569 - DNA, 813 bp, Arabidopsis thaliana
  Clone ID: AT_F23O10.C1.o9.tg
atgtggggctttgcgtcgaatgtcattggaagtatggggttaaagaagtcccctaaagattcagctcaagcatcctctcaatgctcagatgatgaggtttcaaatattagcagggatgaagagggattagaatgtcccatatgttgggaatctttcaacattgttgagaatgttccttatgtgttatggtgtggtcatactctttgccagaattgtgtctttggtctccaatctgctgtcttgagactctcaagccaagatattcggattccgtttttcgtctcgtgcccgtggtgtcagttgctttcgttcaggattgtttacaagggtaatctaaagttccctcggaagaatttcttccttctctggatggttgagagtctgaatggtgacaggacaagtcatggtgacaggacaagtcatggttccttggtcactgataaccagcaatcggctccgactccgaggtgtagcatgtctctgggaaaccacagcagcaacaacaatctggttgcgaggcctttattgcgtaaccagtctacagaccttttgccacatcatgaccacagtaaccaaccaagcagacaactcttctcctttcacaaatctcttgattttttcatctctttcacctccaagtttccgtttgtgatcatcttccttctgatcgtattctttgctatacctggtagcctcataattcttgccctttacttcctcctcacaatacttttcgcagttccagctggtcttgtactatattttgcttatcctattctagaaaggttggtaaatgaaataacatcatcatga

SEQ ID NO: 2570 - DNA, 1230 bp, Arabidopsis thaliana
  Clone ID: AT_F3K23.C1.o26.tg
atggttgtgcctaatacatcagcagtcgagaattttcaaagaaacaatgtgaggtattctcctaactggagcttccgatgggataatagaggaggacgcgtggcaggggaagagacctctgttagtttgttatctgatcggattagtcgtaacgatgtctctgatgtcaaatctgaaactgctcttgtatcatcacaaggttctcctttggacaattttcagacgcagtcatggcagaaatctcctgcttctgatcaatcattttcaagaattgcctctattgactctgtctctgaacagatcacccaaaaaacaaatgattcaaccgaccctacttattatccatctcctgcaaaactgtctctttcattggcttctcaaccatcatccttctcagtgtcaccactgtcaagtcagtcccacttgccaatgccacctgcaagttcatcccaattaaagctgacaccgccccctcgtctatcaaagcaagtctcatatggtcaaatctttggattcacctcaccgagcagaagctcagcaactgaagagaggctggggaatgaatctcagtctgatggttggtccatgcaagctttttctgaaatgatggcgtattctcgcagagagtcttgctcttacgataacgagtgctttgggcttcgtcgtgacaagatagacaatcttggaagtagaaagtccaatgatcagcaaaactgtggtgcttgctcgagatccttgtctgagaaatctttgttgagtagccaaaaaatctttgccactaacgagctctccgtagctgcgattctagcatgtgggcacgtctatcattcagagtgtttagagcagatgacacctgaaatcgacaaattcgatccttcttgtcccatctgcacactgggtgagaagaaaacattcaaactgtcggaaaaagcattaaaggcagatttggaaatgaaagctagacacaacaagagactaagaaaccgcgttgtggacagcgatgaatttgtcaagtttaataacaaccacgaagcggcagtaggatacaaaggtaaaaccccaaagctgatatcaagttcaagcttgagaagctattccccaaagcctttccttgctagacacttctctttcgggtccagaagtaatagtgttaaatccccaaaagagattcattccccgagctctcttagaaagaaaggcttcttttggaccaaatctagcaaaatttga

SEQ ID NO: 2571 - DNA, 1020 bp, Arabidopsis thaliana
  Clone ID: AT_T30E16.C1.o12.tg
atgatacatttggctggatttacatgttgcttaggcggcgtcgctctttatcttcttaccaggagcacaggcaggtggatgggttttggttatgtgtttgatatcattcgtttttattcagaacaattagtagaagtagagagcaaggtggtacctttgatcatcgcagtatcaggagatgttggctctgagactcctattaagtgtgagcatagttatgttctcggtgtatttctcaagagaacggcagaacaacaggttttgagacgtaattggagattttcatgggttcgaaatagtacattgatgcagccgatgactaaggaagtcccctggtatctggacgacgggacaggtcgtgtgaatgtagatgtatctcaaggtgaattaggcttggcgttgacggttggtagtgatgtatttgaaaaggcagagccggtatcgcttgttcaaggagcgttgggttatcttaaaggctttaagatacttggagtaagacacgttgagcgtgttgtcccaattggtacaccgcttacagttgttggtgaggctgttagggatggcatggggaatgtcaggattcaaaaacctgagcaaggacctttctacgtcacttatataccgctagatcagctcatctctaaattgggagatttgtcaaggaggttcaagtatgcctccatgggtttaactgttcttggtgtgattcttatttcaaagcctgtgattgaatatattctaaagagaattgaagatactctagaaagaaggcggcgacaattcgcactgaaaagagttgttgatgcagctgctaggagagccaaaccagtaactggaggtggtacaagcagagatggtgatacacctgatctctgtgtggtttgccttgaccagaagtataacaccgcttttgttgagtgtggtcatatgtgctgctgcacaccatgctccttgcaactaaggacctgtcctctttgccgggaacgaatacaacaagttttgaaaatttaccgccattga

SEQ ID NO: 2572 - DNA, 903 bp, Arabidopsis thaliana
  Clone ID: AT_MQD22.C1.o19.tg
atggcggttcaagctcatcaccatccttctactctcttcttcctcaacaacggacaagaagggaatgatcagccgcataaatctcagtttcattcaatcaacgccggggttgatacaagaaagcgagcgagagaagtttcttcggtgattgatttagatatcacggcggctccgatgaaccctccgccgcaaactccaccgcaagttataggacgtcgacaaaatccgaatgttgtatcaaccggtctacgtttgtctcgtgaacagtcgcagaatcaagaacaacggtttttgtcttttccgataaccggagatgtcgccggagaaatcaaaagccaaacggacgaattaaatagatttcttcaaatccagggagagcagcttaagcgcatgttagctgaaaacagtgagaggaactatcgtgagcttctgagaacaacggaagaatcagtaaggcggagattaagagagaaagaagcggagatcgagaaagccacacgtcgtcatgtcgagctagaagcacgtgcgactcagatcgaaacagaggcacgtgcttggcaaatgagagcagctgctagagaagccgaagcgacgtcgttacaagctcaattacaccaagccgtagtagtagctcacggtggcggagttattacgacggtggagccacaatcgggaagcgtagacggtgtggatgaagctgaagacgccgaatcggcttatgtggatcccgaccgggtcgaaatgattggaccgggatgtaggatttgccggcggcgatcggcgacggtgttggctttgccgtgtcgtcatttggttatgtgtacagaatgcgacggctccgtgagaatttgtccgctttgccttagcacgaagaattcaagcgtggaggttttctattcttga

SEQ ID NO: 2573 - DNA, 1368 bp, Arabidopsis thaliana
  Clone ID: AT_F1B16.C1.o13.tg
atgggttcagtttgttgtgtagctgtgaaagacagaaaggttcctcctagtggtggacctgcgagttcatctgttcatcggaattcagcatgttcgccacaatggagttttcgacgtgataataggaggcgagtggctgatgagattgagggttcaccttattacagtccttatgttgcgagtagaggtattagtatggataagatgtcattaggctctgagagaggaactttatctgaaggaggaacccctcctgatggacatttagggactcctgcttctcagaaatcagcaactccggaaatgagcaccaattccatggttccaccttcttcaggttcatccttggcaagcagtgatctcattgaggtgaagaacttagttgactcacctggaattgtcccttcagctcaatcgaagcctttgttctccacgccttctcttcccaatccagttagtgatctttcatcggctcacacgcgtttgcttcctcctaaatccacaccatcaagacgggctcggcgttcacctgggcatcagttgtttaggcaggtttctgatagtcaaattttaggactgaaatccccaattaataattactcaatctcagaaggaaggtcgtcctttgtgctttcgacctgtagcaatgacttcgccactggatcccagtacgcatcttctgaaggtggctggtctatgaacactttttctgagctcgtggcatattctcaaagggatagatggtcctttgatagcgaacacttgggttctggcagacggaaactaagtggtggtagcagcagattctcattctccccttccgttgttgatcagcaggtttgtggagcttgttcaaagttgctaaccgagaggtcttctatagccacttttgagctcccaatcgctgctgttcttgcctgtggtcatgtttaccacgcagagtgcttagagaccatgactactgatatagagaagtatgatcctgcttgtcccatatgcacaattggggagaaacgggttgcgaaaataacaaggaaagccctaaaagcggaggcggaagcaaaggcaaagcagtacaaaagatgtaaaaaccgtgtggtagatagttacggtgagagtgaatgcgatgagtttgtattccagaaaatggggaaacgagaaggcaaagctctcaagctggaagctagttgcagtagcaagagctcgtctaataagtcattcttgaaatggcactttgcttctatcagctccaagtggaataaaccctcgtccaaagactctgcattgaagaagggattctggtctagacatcgaaataaccggtcttcttcaagcatagagggacttaatcagacatctccgctatga

SEQ ID NO: 2574 - DNA, 486 bp, Arabidopsis thaliana
  Clone ID: AT_MTI20.C1.o6.tg
atggattcgaaagcaaaagacgatgaaaaaactctaaacatggattccaaagcaaaatacggtaaagaagctctagacatgctcttaaagcttcaacagagagttgatgaaatccattctgagttgcaatcttcgggagcatccgcaacaacttcatctgatattcaaaacatctacaacgaaatccaacaacttctacagatgattactaagaagacgcctcaagatccgagtaaagtgtcgtcacatattcgcgacgatcttgacatggtgtttgtgttggaggaagttggacactcgtgcgacttgtgccagagagatcttgctaaggatccagaacggcctaatgcttccttgagtggcttacaagaggcgtgcgtgctgtcttgtggtcatgtctaccacttcaagtgtttgagaggaaccactcttgatattgataaccattctaaagatccttcttgcattttctgcattagctgttag

SEQ ID NO: 2575 - DNA, 5622 bp, Arabidopsis thaliana
  Clone ID: AT_MCK7.C1.o28.tg
atgggcaaacccaaaggagatgctgcaagaagcaaagcacgtccatctagcagcagcttggcagcttctctgttgccgtctggctctgcagccgccgtaggttttgggggctatgtcggtagctctagattccaaacttctctgtcaaacgaagactctgcttccttcttggatttggatagtgaggttgcccaacacttgcaaaggctttcaaggaaggatcctacaacaaagattaaagctcttgcttccctatcagaactggttaagcagaagcaagggaaggaacttttgccaataatcccacaatggacatttgagtacaagaagctgatactggactacagtcgagatgttcggcgagctactcatgacgtcatgactaatgttgtcactggtgccgggagagatatagctcctcatctaaagtctataatggggccctggtggttttcgcaatttgatttggcatctgaagtttctcaagcagcaaagtcgtctttccaggttggctcctcgtttggtaattcagttttcttggtggaggcagcattccctgcccaggaaaagagattgcacgccttgaatttatgttcagctgagatttttgcttatctggaggaaaatctcaaacttacacctcaaaatttatctgataaatcacttgcttcagatgaattagaagaaatgtaccagcagatgatatcgtcatctctggtggggttggctacacttctagatattttgctccgcgaacccgataatactggctctgcaaacattaattctgaatcaaaacttgcctcaaaggctagggcagtagcaacctcctcagctgagaagatgttctcttcccataaatgctttctgaactttctaaaatctgaaagccctagtattcggtcagcgacttattctttgttaagcagcttcattaaaaatgttcctgaagtctttggcgaaggcgacgtccgaagtcttgcaccagctctgcttggtgtttttcgagaaaataatccaacctgccactcatcaatgtgggaggctgtcttgctgttctctaaaaaatttcctcagagttgggtctacttaaatgttcataaatctgttctaaatcatttatggcagtttctgaggaacgggtgctatggatccccacaggtttcttatcctgcactgatattgttcctcgaagttatgccagcacaatctgtagaaagtgataagttctttgtgaattttttcaaaaacttattggctggaaggagtatgtgtgaatcatcaagtacggatcagttatcacttcttcgggcaaccactgaatgtttcctctggggattacgtaatgcttcaaggtattgcgatgttcccaattctattcatgatctccaggttgatctaattgataaagtcctagtgaagattctatgggcggacttcactgaactatctaagggcagcattccacctaatcagaggaagtcagctgaaaatcttggcatgggtaattcagttagttatctgcaagagctaggaagatgcatcttagaaattctatcagggattaatttacttgaacagaacctgctgtcttttttctgtaaagctgttcaagagagcttcttgaatatgcttcagcagggagatttagagatagttgcgggaagcatgagaaaaatgattgattttctcttgttattggagagatattcagttttggaaggtgagagctggcccttgcatcaatttatggggccactgctgtccaaggctttcccgtggataagatcatctgaattgttagatggtgtgaagcttttgtcagtttcagtatcggtgtttggaccaagaaaggtagttccagtgctaattgatgatatagagacttctacccttctctctgttgaaaaagagaagaatatgagcccggagaagcttattaaagtttttcaagaaatttttattccttggtgtatggatggatatgactcttcgactgcagctagacaagatctcctattttcattgcttgatgatgaatgtttcactcagcagtggagtgatgtcatttcttatgtatttaatcaacaacatcagggcttcaataacctggctgctatgaaaatgcttttagagaaggcaagggatgaaattacaaaaagaagttctggacaggagttgaatcaaagaataggttctcggccagaacattggcaccatacactcatagaatcaactgctataagtcttgtccattcctcctcagcgactacaacttctgctgttcagttcctgtgttcagttctgggtggttcaacccaagacagcagtatttcttttgtgtcaagaagctcgttggtcttgatatatagagggatcctcgaaaaactgctatcttttatcaaacagtcaccattatgttcagtcaatgatacatgttcgtctcttattgtcgaggctatagcgtttgattcgagcagttctgtagatgtgatcgtggttgctaagtttgcagctgaagttattgatggtagtttcttcagtttgaagtctctgagtcaggacgcaaccctacttacaactgtattgtcttctatttttatcattgacttagagaatagaatgacatcactagtggacaatacgctatctgagtccaaagagaagagaaaggatcggaattttgtgtgtgattatgttcatgccgtttgctctaagatggataatcaattctggaaatctataaactatgatgtccggaagagttcagcaagcactttggctcagttcctgaggtcagttgtcctacttgaggatgatctgcaaccttttgaacttacattattgtgtgcttcaaggatgaccgaagtgttagaatatctctcattggatcaaagcgatgaagagaatatctgtggcctgctcctgcttgagagtgatgcgtggcctatttgggtcagccccagctcgtcagctagcatagatacccatggtatgcctgttcagttgtgcgaattgaggaaatcgaaaagtcaaagatatgtttctttcattgacagcctgatcatgaaattgggaattcaccgatttattgttggccacaaagatcatgggtttgcctctcaagcttggctttccgtagaaatactctgcacgtgggagtggccagggggtaaagttcagacttctttcctgccaaatcttgtatcattttgtaaggatgaaccatcgagtggaggtttactaaattccatttttgacattctactcaacggtgctcttgtgcatgtaaaggatgaggaagagggcttagggaacatgtgggttgactttaataataacatagtggacgtcgttgaaccatttttgagggctctagtgtcattccttcacattttgttcaaggaggacctttggggagaagaagaagccatggctgctttcaaaatgatcacagataaactcttcataggggaagagacaagcaaaaactgtttgagaattattccttacattatgagcataataatctcaccattacgtacaaaagtaaaatctggtggttctggtaaagatactctgctaccactggaagttttgcttagaaattggctggagaggtctttgtcgtttcctcctctggtgctctggcaaagtggggaagatatacaggattggtttcagcttgttatctcttgttatcccgtaagtgataaagctgaagaagcaaaggaactacagaggcatctgagcactgaagagagaacgctcctgcttgacttgttccgcaaacaaaagcaagatcctggtgcatcaactgtagttacccaacttccagctgtgcaaattctgctcgcaagactaattatgattgcagttagttactgtggaaacgattttaacgaggatgattgggattttgtcttttctaatctgaagcgtctgattcaatctgcagtagttgtgatggaggaaacttccgagaacgtcaacgacttcattagtggtgtttcttccatggagaaggagaaggagaatgatacccttgaaggacttgggcatatagtttttatctctgatccttctataaacagtgctcagaatgctctctcagcattttcgttgcttaatgcgttagtaaaccataaatctgttgaaggtgaagacaatctgaaatccttggcagatgaaacatgggatcctgttaaagatcgaatacttgaaggtgttctgcgtcttttcttctgcacgggtcttactgaggctattgctgcttcatattccccagaggcagcatctattgttgcttcatttcgagttgatcatctgcagttctgggagctggtagctcaccttgtagtagactcttctccacgcgcaagagatagagctgtcagagcagtggaattctggggactaagcagaggatctataagctctttgtatgcaataatgttctcttccaatccaatcccgtcattgcaacttgctgcatacactgttttgtctaccgaacctatttccaggctggccatagttgctgatttgaatgcaccactgaatgatgagtctctcaatgatcaggactcaagcaatgctggtttaccatctgaagacaagctactgctaagagatgaagtatcttgtatggttgagaagttagatcatgaacttcttgatacggacttgactgcgccagaaagggtgcaaacgttcctggcgtggtctttgttactctccaatgttaactctttaccttcactaacccaaggacgagagagactggtgcaatatatagaaaaaactgcaaatccgttgatattagatagtctttttcagcacattcctctagaattatacatgggacagagcttgaagaaaaaagatggggatattccgtctgagttatctgtggtagcttcagcagccactcgtgcgattattacgggttcgtccctgtcaacggttgaatcactttggcctattgaaactggaaagatggcttcgcttgctggggcgatatatggtctgatgttacgtgtccttccagcttatgttagagaatggtttagcgaaatgcgtgaccgttctgcatcatctcttattgaagcatttacaagaacgtggtgcagcccatctctaatcaagaacgaactgtctcagataaagaaggcagactttaatgatgagagcttttcagtcagcataagtaaagcggcaaatgaggtagttgctacatatacgaaggatgaaacggggatggatctcgtgatccggcttccagtttcttacccactcaagcctgttgacgttaattgcgcaaaaagtattggaataagcgaagcgaagcagaggaagtggttgatgtctatgcaaatgtttgttcgtcatcagaatggggctctggcggaggcgataaggatatggaagcgaaattcggacaaggaatttgaaggagtagaagactgcccgatatgttacagtgtgatacacatagggaatcacagccttccaaggcgagcttgcgtgacttgcaagtacaagtttcacaaagcatgtttagacaagtggttctacacgtctaataagaaactctgccccttgtgccaatctccttgctaa

SEQ ID NO: 2576 - DNA, 576 bp, Arabidopsis thaliana
  Clone ID: AT_F7K15.C1.o30.tg
atggaggaagaaggcactctaatacaaggagatggctcctacggcctttacatcagagaacaatcaacatctagcatcccactagttctggtgactgaaaatcaaaataagtctttttataaacttgcaatggaagcaggagttcctgaaatcagcatacatatgcctgcaatttgccgtatctgtttcgatgaggatgtcaaagctgagcagatgtattctgttgctttatgtggtcaccaattctgtgtggattgcgttaaacaacatatagaatcgaggctactcgagggatgtgtaccgagatgtcctcatgatcaatgcgagtataagctaacatttagaagctgtgctaatcttttgacacctaaaactaaaagcgatagctctatatatcttctactcaagacactcaagttaggagatgttgtgtcaaatgcggtgaacccttttgcatcaactgcaaagttccatggcatagtgacttgtcatgcggtgattacaagaggtgtggctattcgttttgctacacatgtggtgccgaatggaagcaaggaggttgcactcaccgcttag

SEQ ID NO: 2577 - DNA, 174 bp, Arabidopsis thaliana
  Clone ID: AT_F10A16.C1.o17.tg
atggcttttgatggttgttgtcctgattgcaaacttcctggagatgattgccctctaatttggggagcctgcaaccacgcgtttcatcttcactgtatattgaaatgggtgaattcgcagacgagccaagctcattgcccaatgtgcagaagagaatggcagttcaaagagtaa

SEQ ID NO: 2578 - DNA, 1521 bp, Arabidopsis thaliana
  Clone ID: AT_T24P15.C1.o7.tg
atgttcatcctcagagttcattccgttgactccgagagaccaatctccgttgaagaagaagaatcaggtttcacttacgcatcgaaaagagctcagcctcctcttaaactcatacaaccatctctcaaactcaccgaccgcaaaggcttgatccatctctatcgcaaatcttcacatagctctctgcctaaccctagctcccgatccaccactctcttcatcgtcgctgttcccaattatctctcctctctcgattttatccgtttctgtgattcccgcatctcccaagtctccgacatcctcttcatcaggaacgatggaatggaagatagatatagtgttcttatcacattttctgatcaatccgaagctgatggtttctacaacaacttgaatgggaaaaagttcgcaccatctgaggctgaggtttgtcatattctatatgtaatgtcggtggaacacacagaatttgatgaggttgctgcagaagcacctactggatttaccgagttacctacgtgtccaatatgtcttgagagattagatcctgacaccagtggtatagttagcactctttgtgatcactcgtttcagtgttcttgcacttcgaaatggacttatctgtcttgtcaggtttgtcgattgtgtcaacagcaagatgagatattaaactgttctatttgtggaaaaactgagaatgtatgggcatgccttgtctgtggcttcgtaggttgtggaagatacaaggaagggcattctattaggcactggaaagaaacgcatcactgctattctcttgatttgcgaacacaacaaatctgggattatgttggtgacagctatgttcatcggttaaaccattcaaaaattgatggaaagtcagtagagatgagcaccagttgtctgtcacaccagggggactgtggcctctgtgagtgtagtgaggatacaggaattagcggagctatctttaacagcaaagttgattcaaatatgaatcttagatcatcagtttgcctcagtggttttatttttgtggaacagattgtaatcgagtataatgaccttcttgcaagtcaactaaagggacagcgacagtactatgaatctctcattgttgaggcgagaagcaagcaagaaagtagtattgccgaagcagtagagcaaattgttgttaacacaatgcaggagcttcagaataagattgaaaaatgtgaagaggaaaaaagtggtatcactgaagttaacacaaaacttataaaagagcaggatacttggcggaagaaggccaaagaaatagaagagagggaagctgcattgctaggatcaaaagacgagatgataactgatcttcaagaacagataagagatattacggtcttcattgaagccaagaaaaccttaaagaagatgtcatcagatacggatggtatacgcgaaggaaccgtcttaccagtgcctatcagtcccgagccagtttcctcagttagaaggcaaaagaagtcaaaccggagaaagtaa

SEQ ID NO: 2579 - DNA, 1290 bp, Arabidopsis thaliana
  Clone ID: AT_T22F8.C1.o40.tg
atggggaatgcgtgttgtgttgctgctcgagacaaaatggtggtgcctaattcatcagctggtgagaatttgcagaggagcaatatcaggcattctccgtcttggagtttccggtgggataatagagggcgtgtagctggtgaagaaacttctctcagttggttatctgatggtattagtcggaacgatggctctgagatcaaatttgaatctgctttcgtatcatctgaagggtcccctttggacagttttcggacacagacattgcaaaaatctcctgcctcagatctatcttttccaagaaattcttccatgaatacagtcttcgaacagaaagaaaatgtttcaacagagtctgcagcaccatcatatctatctcctgcacagttgtctctttcactagcttcacaaccatcatctttccctacgtcaccactttcgtcccaaagctacttgcaccctgcaagttcatctacacttaaactgacacagcaccctcgtctatcaaagcaagtctcagatggtcaaatctatggtcagaactcactaagtagaagctcagcaactgaagagaggcagggaactcctacgagatatgattcgtctcagtctggaccatctgaaggttggtctctacaagccttttctgaaatgatgtcatcttctcgcagcaacaaggctctgtcttatgacaattatgacaatgattgttttgggcttcaacgtgacaagattgaccatcatggcaaccggatgtccaagcatcagcagcatacctgcggtgcttgctctagacccttgtcggagaaatccttgtggagcagccaaaagatctttatgaccaacgagctctctgtatctgcaattctagcttgtgggcatgtctatcatggggagtgtttagagcagatgacgccggaaattgataaattcgacccttcatgcccaatatgtacaatgggtgagaagaaaacagcgaagctgtcagagaaagcgttgaaagtagagatggatttgaaagcgagacacaacaaaagactcagaaaccgagttttggacagtgactttgattgcgatgattttgtaatgtttgaccacagccacaggacagcagcagcagcaagcaagagccctagactcgtctcaagttcgagtgctaaaagctattcagcaaagcctttcttggctcgacacttctctttcgggtccagaagtaactataaatcccctaaagaaaatcttcctgtgaaaaagaaaggcttcttctggaccaaatccagcaaaatatga

SEQ ID NO: 2580 - DNA, 744 bp, Arabidopsis thaliana
  Clone ID: AT_F14K14.C1.o7.tg
atggtagtaagatatctggattggaacagaggtctagtagtaaccgctgacgacgagcatcagcaaagcaacagaatatgtggtctccaagatattggtggacatgttatgaaaattccatttgtgacctttcaaatcatccttttcatgcgcttagagggaacgccagcttctgccaaaaacattccgattttagttctgtttgtacctctttttctgttacaaggagctggggtactttttgctatgtatagattggttgagaaatcagtcttattaataaatagtggtagtggttcttatggaagatattttaccgcaacatcatcagctcgtgaattcctgggattctttcaacatggtgcaagattacttggctggtggtctatcgatgaaggaagtcgggaagaacaagcaaggctctactctggagaagctactggatacaacaccttctcaccagaggttgtgaagaaaatgccaaagtctgatcttgttgaagagatatggagacttcaagctgcattgagtgagcaaacagatatcaccagttatagccagcaagagtacgaaaggcttcaaaacgagaagattctttgtagagtttgctttgaagatccgatcaacgtggttctactcccatgtagacatcacgtcctctgcagtacatgctgcgagaaatgcaagaaatgtccgatttgtcgtgtcctgatcgaggagcgtatgcctgtatacgatgtgtag

SEQ ID NO: 2581 - DNA, 915 bp, Arabidopsis thaliana
  Clone ID: AT_T16H5.C1.o60.tg
atggctgttcaagctcatcacatgaacattttctctcagtttatatcaccaaacagagattgtgttaaatttcaagaaaacatgaaccacggcgagtttgagtttaccggcggtgaagttccgttaataaccggagaatctttcgccgttgagcctttagctgcgaaagccaacttcaacaaagcagaaagtggtctcagttacaatttcactgttcctcctctgtctacaaaacgccagcgagattttcaattctcagactcaaacgctccggttaaacggaggtccgtagcgtttgactcatcatcaccgtcgttgataaacgttgaactcgtatctcagattcaaaaccaacaacagtcagagatcgataggttcgtagctcagcaaacggagaagctaagaatagagattgaagcaaggcaacaaacgcaaacgcggatgttagcgtctgcggttcaaaacgttatagccaagaaactaaaagagaaagacgatgaaatcgtacggattcgaaacctaaactgggttttacaagagagggtgaagagtctttacgtcgaaaatcagatttggcgtgatatcgctcaaaccaacgaagcaaacgctaatactcttcgaacaaacctagaccaagttcttgctcaactcgaaacgtttccaaccgcttcagccgttgtagaagacgatgcggaatcgagttgtggaagttgttgcggtgatggtggtggtgaagcggtaacggcggttggtggtggttgtaaacggtgcggtgagagagaagcgagtgtgttggtgttaccatgtcgtcatttgtgtttgtgtacggtttgtggtggttcggctttgttacggacttgtccggtttgcgatatggtcatgaacgctagtgtgcatgttaacatgtcttcttga

SEQ ID NO: 2582 - DNA, 885 bp, Arabidopsis thaliana
  Clone ID: AT_K17O22.C1.o9.tg
atggctgttgaagcaagacacatgaatctcttctcttctcaatacattaccaacagagaatgtgttaaatctcaaacgaatatgaacaacggacaacaaatcgccggcggtggttttccggtaacaatcggtgatcggaatttacagtacatagatccgattaacagcttcaacaaatcagaaagcgagctcacagctatttcaaaacgtcagagagattcaacgtttgattcagacgctttaatcgcatctcagaaacgcagagcaatcgcgttttctccggcgtcattaatcgacgcagagttagtttcacagatccaacagcaaaactcagaaatcgatagattcgtagcgcaacaaacggaaacgttgagaatcgaattagaagcgagacaaagaacgcaaacgcggatgttagcgtcagcggtacaaaacgcgatattgaaaaagctgaaagcgaaagacgaagagattataagaatggggaaattaaactgggttttacaagaacgtgtgaagaatctctacgtagagaatcagatctggcgtgatttagcacaaactaatgaagctactgcgaataatctcagatcaaatctcgaacaagttttggctcaagttgatgatttagatgcgtttcgtcgtcctttggttgaagaagctgatgatgcagaatctagctgtggaagctgtgacggaggtgatgtaacggcggttgttaacggaggatgtaaacggtgcggtgagttaacggcgagtgtgttggtgttgccttgtcgtcatttgtgtttgtgtacggtttgtggatcgtcggctttgttgcggacgtgtcctgtatgtgatatggtcatgactgctagtgtacatgttaacatgtcatcatga

SEQ ID NO: 2583 - DNA, 1470 bp, Arabidopsis thaliana
  Clone ID: AT_F4P13.C1.o19.tg
atgggaggagggaattccaaagaagagtcgtcatcaccatcttcatcatcatgggcttctcatcaaagttatcctcaatatggacctgatagctacaactatcctcctccacccacttatgctcccgctccatctcctgctcctgctcctgctccggtgcctgctccatctccggcttccagttatggccctcagtatagtcaagagggttatgcatcacagcctaataatcctccaccacccacttatgctcccgctccatctccggcttccagttatggccatcagtatagtcaagagggctatgcatcagcagcatcacagcctaattatcctccacctccttcacagagtcaagttgctgacaggaagaaatttgatcggaggtattccaaaatatcggataactactcttctttactgcaggtgtccgaggctctaggccgtgcaggtcttgaatcttctaatctaatcgttggtattgatttcaccaagagcaatgaatggacaggggccaagtccttcaataggaaaagcttgcatcacttgagcaataccccgaatccatacgagcaagcaattactatcattggaagaaccttagccgcctttgacgaggataacttaattccttgttatggttttggagacgcatcaactcatgatcaagacgtgtttagtttctatccagagggaagattctgtaatggatttgaggaagtattggctcgttatagagaaattgtacctcagcttaagctcgcaggaccaacttcttttgccccgatcattgaaatggcaatgacagtggttgagcagagtagtggccaatatcatgtgttagtgattatagctgatggccaggtcacaagaagtgtcgataccgaacacgggcggctaagtccgcaagaacagaagacagtagatgcaattgtgaaagcaagtacccttcctttgtcaatagtcttagttggggtcggggatggaccatgggacatgatgcaggaatttgatgataacatacctgcccgagctttcgataacttccagtttgtgaacttcacagagatcatgtcaaagaacaaagaccagtctcggaaggagacagagtttgcgctgtctgctctcatggagatccctccacagtacaaagcaacgatagagcttaaccttttaggggtaagaaatggaaatatcccacagagaatcccacttccgccaccggtgcagagtggatcatcattctctagttcccggataccgaattttgaaccgagtgtacctccttatccatttgagagcaagcaaatgagtagtgcagacgatattcagctatgtccgatatgtctgagcaacccgaaaaacatggcgtttggttgtggccatcagacttgttgtgaatgcggaccagatcttaaagtgtgtcctatttgtcgtgcgccgatccagaccagaatcaagctttactaa

SEQ ID NO: 2584 - DNA, 822 bp, Arabidopsis thaliana
  Clone ID: AT_T22P22.C1.o10.tg
atggaatctgtcggatccaatcaaatatccccgtacgtaagtaaccgtgaccaacggcatttcttggctcaaccggtggcagataggatacttcgagctctccgtcaccggatccgtcttctccaccgtcctaatgcaggaacttttcacgttcttggtgcaacgtgtaacgtctacacagtgacgctaatggccacacctacttgcacttgtcccgaccgtaagaagccgtgcaaacacatcttgtttgtcttaatccgagttcttggaattcctctcgacgataagtgtctcaggcaacggagactccggacatgcctcctcttccacctcttctctgccccgacacggcctgactgcctcgccagtttccgcctccaacaacggtttcttcagcttttcccagccaccacttctcaacccggctatactactaactcatcctcctccaccagtaaaatggaaaatgaggtggatgaagagccggcaacatgtccaatatgtctagacgatattatcgcaatagaaaacgtagacggtggaaatggtggagggaaggagaaggaaaccgcggtggtgaagtgcagagtatgcaagaacaaggttcatgatgaatgcatgctggcgtggagaaagagtcgtggacggcggccggccatctgtgtggtatgccgtgcacggtggccagcaaatagatcgagtaagaatcctaatgttggtgataataacgagaactgccacggtaattgttatttgaatttagctccttacgttgatgaggaagtggaggatggggttggcacgagccaacggccatgttga

SEQ ID NO: 2585 - DNA, 1407 bp, Arabidopsis thaliana
  Clone ID: AT_F18O22.C1.o210.tg
atggggacagggaattctaaagaaaactggagacagtcatcgtttaggtcaacttctgcttcatcagcatcaccatcttcatcttcatgggcttctcaacaaagttatcctcagtatggtgcagaaagctataattaccctcctccaccttcttatgcccaacctcctgagtatacgcaacctcctcctcctttatatagtactcagccttactctgctccgtcttattctgcaccgccttctcaaagttatggtagtgataataagaagaggttggagcgcaagtattcgaaaatttctgatgattactcttctttggagcaggtgacggaggctcttgcacgggcgggtctagaatcttcaaatctcatcgttggtattgatttcactaagagtaacgaatggacaggggccaggtccttcaataggaaaagcttacacttcataggcagtagtcccaatccttatgaacaagcgataactatcataggaagaaccttagccgcctttgacgaggacaacttgattccatgttatggttttggagatgcatcaacacatgatcaagacgtgttcagtttcaattcagaggatagattctgtaatggatttgaggaagtactttcccggtataaggagatcgtgcctcaacttaagcttgcagggccaacctcctttgctccgatcatcgatatggccatgaccattgttgagcagagtggtgggcaatatcacgtcctagtgataatagcagatgggcaggttacaagaagtgttgacacggaaaatggacagttaagtccacaagaacagaagacggtagatgcgatcgtgcaagcgagtaagcttcctctatcaatcgtcttagtcggggtgggggatggaccttgggacatgatgagggaatttgacgataatattccggccagagcgtttgataacttccaattcgtgaacttcacagagatcatggcaaagaacaaagctcaatccttgaaggaaacagagtttgccctttctgctctcatggagattcctcaacaatacaaggcgacaatagagcttaaccttttaggaagaagaaatggatatatcccggagagattccctcttccgcctccaatgcgcggtggatcatcgtcctacaacagtccaaagccttcacgtcttccaagtttcaaaccgagtgttcctcctcatccaactgaaggctatcacgtaaggtctagtcccgtcccaccccctacaagctctgcttctgataaccagctatgtccgatttgtttgagcaacccgaaagacatggcctttggttgtggccatcagacttgttgcgagtgtggaccagatcttcaaatgtgtccgatttgccgtgcaccaatccagacaagaataaagctctactaa

SEQ ID NO: 2586 - DNA, 2853 bp, Arabidopsis thaliana
  Clone ID: AT_T12C24.C1.o3.tg
atggatcaaggaaggcaagtgttttcagtagatcttctcgagagatatgcgacaaagaatcgtggcatgattacatgtatggctgctgggaatgatgtaattgttcttggaacaagtaaaggatggattatccggtatgatttcggagttgggagttctaatgatattgatctcgctgttggtcgaactggggagcaatcaattcacaaggtttttgttgatcctggtggtagtcattgcattgctacagtcactggtgttggaggagctgaaactttttatactcatgcaaagtggcttaagccgcgtgtgttgagccgtttgaaaggtttgctcgttaatgccgtggcttggaatagacagcagataactgaagtttctactaaggagatcattctgggcactcaggatgggcagctgtttgagatggccgtggatgagaaggataagagagagaagtacatcaagtttttgtttgaattagaagaacttcctgaagccttcaaggctttgcagatggaaacggccaacataagcagtgggatgaggtactatgtgatggctgtaacccctactcgactctactcgtttacagggattggaacattagaacaacgaagagcggtgcattttgcatggttatcagggacaggaatttatcatggtggcctaaattttggagctcagcacagttatccaaatggcgatgagaactttgtggagaacaaagcactcttggactactcaaaactgagtgatggaactgaagcagtcaagcctggttcgatggcactctctgagtatcatttcttgcttcttattgggaataaggttaaggttgtcaatcggataagtgaacaaatcattgaagagctccagtttgatatcacctcagattcagtttcaaggggcataattggactttgcagtgatgcctctgctaacgttttctatgcatatgatcaaaattcgatattccaggtttctgtgattgacgaaggacgagatatgtggaaggtttacctggacttgaaagtctatgctgcagctttagcaaactgtcgtgaccctctccagagagaccaagtttatttagttcaggcagaatctgcattcaccgacaaggaatatctgcgagcagcatcattctacgccaaagaagctttgaggacgttcttgttgcataagcttgataatctttcaaaggatgataaatgccaaataacgatgatatcaacatgggcaactgagctatatctggacaagataaatcggctgcttttggaagatgacactgctatagaaaatcgtgactcggagtatcactcagtcattcaagaattccgtgctttcatgagcgattgcaaggatgaattggacgaggcaaccacagtgaaaattctggagagttatggtcgggttgaggaattggtatattttgcaaacttgaaggagcagtatgaaattgtagttctccattatattcagtatcaatttgcgccagaacttattatgcttgacgcatatgaaaccgtggaatcatggatggccaacaaaaatcttaatccaaggagattaattactgcaatgatgcgttactcgagcggacctcatgcaaagaacgagacacatgaggtcatcaaatatcttgagttttgcgtccaccgtctgcataacgaggatccagggattcacagtttacttctctcattatatgccaagcaggaagatgacggtgccctcctccgttttctgcaatgcaaatttgggaaaggacgagagaatggtcccgaatttttctatgatcccaaatatgcattgcgcctatgtctcaaggaaaggagaacccgtgcctgtgtccatatatacagcatgatgtctatgcatgaagaggcagtagcccttgctcttcagattgatccggaacttgctatggctgaggctgataaggtcgaagatgatgaagacttgagaaagaagctgtggctgatggttgcaaagcatgtcgtcaagcaggaaaagggagctaaaagggaaaacatacgaaaagctattgcctttctcaaggaaactgatggccttctaaagattgaagatattttgcctttctttccggactttgccttaattgatgacttcaaggttagtcaacgtttcctcttttccagacacacacgctctggcttgggccaaacaagttgcttctgttctcttgtaattttcttcaatacgcttttgcaggaagcgatttgctcatctctcgaggattacaacaagcaaatagaacaactgaaagaggagatgaatgatgccacacgtggtgcagataacattagaaatgatattagtgcgctaactcaaagatatgccgttattgaccgcgacgaggaatgtggggtttgtaaacgtaaaatcttgatgatgagcggtgatttcagaatggcccagggatattcttcagcgggaccattggctcctttttatgtctttccttgtgggcactctttccatgcacagtgcctgatcacacacgtcacaagctgtgcacacgaagagcaagccgagcatatactcgatctgcagaagcaactgacattgcttggaagcgaaacccggagggatataaatggtaaccgatctgatgaacccataacaagcacaacaactgcagacaagcttcgatcagagctagatgatgctattgccagcgaatgcccgttctgtggagaattaatgatcaatgagatcactctgccttttattaaacctgaggattcacagtattctacttcatgggacctccgatcagagaccaacttagcaaaccagaggaccatttctttgcctgtttga

SEQ ID NO: 2587 - DNA, 1302 bp, Arabidopsis thaliana
  Clone ID: AT_F12A21.C1.o7.tg
atgggaggaagtagctctaaagagtcacctagaggaggtggaagtggtcgtaggtatgaacgtagtgtgtctgggagctcatcttattcgtctgcttgggaccagagcagctattatcagacaccaaaccatccatctgcgtctcctgtttcatcctataattctgggagacaaacaccgaagaatcttgagaggaagtattcacggattgctgataactaccgttccattgatgaggttaccgctgctctttcacatgccggtttggagtcctcgaatctcattgttggtatagatgtcaccaagagcaacgagtggacaggggcgagatcatttggtaggaagagtctgcatttcattggaactactccaaacccttatcaacaagctatttccatcattggaaagactttatcggtttttgatgaggataatttgatcccctgttatggatttggagatgctacaactcatgatcaggatgtcttcagtttcaatcccaatgatacatattgtaacgggtttgaagaagttctcatgtgttacagagagattgttccccagcttcgtctctcaggtccgacatcttttgcacctatcatcgaaagggccatgacaattgtggaagaaagtggtggccagtaccatgttcttctcattatcgctgatggacaggtgacaagaagtgttgatacagataacggtggattcagtccacaagagcagcagactattgatgccattgttagagcaagtgaatatcctttgtctatagttcttgttggtgttggagatggtccctgggacaccatgagacagtttgatgacaacatccccgctcgtgcctttgacaatttccagtttgtgaatttcacggatataatgtcaaagaacattgatccagcaagaaaagaggcagaattcgcgctttctgccttgatggagatcccgtctcagtataaagccaccctcgaactaggcttacttggacaaagaaccggacattgtccagacaggattgcgcttccaccaccaacttatgctactcaatctatgcgcaacagcccaagaacttcccgatcaaccagttttcaaaacaaaccatatgataatggtgtttcctctacaccaccttcaactactcataacgagagccagcaacagttttgccccgtatgtctagtgagtgcaaagaacatggctttcaattgtggtcatcagacttgcgctggatgtggggaagacctccatgtgtgtcccatttgccggagctcaatctcggttcgtatcaagctttattaa

SEQ ID NO: 2588 - DNA, 645 bp, Arabidopsis thaliana
  Clone ID: AT_MNJ8.C1.o10.tg
atgaataccaatagatcaatgaaagttaaagcaaaagcaatatttcgacctcaacataaagggttcgttaacactatctacgccaatctatataacgagaccaaagagtttcttgaagatcaaaacggtgcgataacacttttgagatcgtaccgtggtccacacgtttctccaatcaaattgaaaccacattgcttctctccactttacatctctcatctccttcaacaatccatctcccatactcggttttgtcaagatttgggtgaaaagattgctcataattgtgcttatctcagcggattgcctttaatttttgaaatgttcgtcgtcgtagagttgacccaagaagttctaattacgttgccctctgcctctgttgctgtcccgtcaaaagctgcttcgagtgatgtgttacaaagactggtggaagaacagaaggtagagtcaattgatttggaagaagagaagaagacatgttcgatttgtatggagaacttgaattcggaatcatcatcggaaaacatcattagttgtttacatttgtttcatcaaagttgcatctttgagtcggagagttccgttcgaggaaatatcatgaaaccgtgtgaagccttgaagattaggttacgttacggtttttag

SEQ ID NO: 2589 - DNA, 2799 bp, Arabidopsis thaliana
  Clone ID: AT_F5G3.C1.o7.tg
atgtatcaattgagaaaatttgacttcttcgaggagaaatacggaggcaagatacctgaggatgtaaccggagatatacaatgttgttccagtggccgtggcaaagtcgtcatcggctctaacgacggatccgtcagcttcctcgatcgcggtgtaaagttcgattccggtttccaagctcactcttcctccgtcctcttccttcaacacctcaagcaaaggaactttctcgtcaccgtcggagaagatgaacaaatatcgccgcaacagtcagggatgtgtcttaaggtttttgatcttgacaaagttcaggaggaaggtactagttcctcggctcctgaatgcattggtattcttagaattttcaccaatcagtttcctgaagctaagattacttcttttctagtcttggaggaagttccaccaatattgcttatagccattggcttagataatggctgcatttattgtgtcaaaggagacattgcacgagagcgtatcactcggtttaagcttcaagtggatggacggtccgctattacaggcttggggttcaggatggatggccaagcgcttctgttgtttgcagtcactccagagtcagtcaacttgtttagtatgcaggcgcagccaccgaaattgcagactttggatcatattgggggcagtgtgaatactgttacaatgagtgaccgctcggaattaatagttggtcgacctgaggctgtttacttctatgaagttgatggacgtggtccttgctgggcttttgaaggagagaaaaaattcatggggtggttccgtggctaccttttatgtgtcattgatgattctaaaactgggaacactgtttttaatgtctacgacctcaggaatcggcttatagcatatagcattgtcgttgataaagtctccaacatgctctgcgaatggggaaacataatacttataaaggctgacaaatccttattgtgcattaccgagaaggatatggaaagcaagttagatatgctgttcaagaaaaacctgtacacagtagctattaatcttgtccagagtcaacatgccgatgctgctgctactgccaatgtgatgaggaagtatggagatcatttatatggcaaacaggactttgacgaagctatgttacagtacattaacacaattggttatcttgaaccatcatttgtgatacaaaagtttctggatgcacagaggatctacaatcttactaattacctggagaagttgcatgagaagggtctagcatcaaaagaccacacaactcttttgctaaactgttacactaagttgaaggatgtagaaaagctgaacacgttcattagaaaagaagatggcatcggtgagctcaagtttgatgtggaaacagccattagggtctgtcgtgcagctaattaccatgagcatgcaatgtacgttgcaaaaaaggcaggaaaacatgagtggtatttgaaaattttgcttgaagatcttggaaactacgatgaagccctgcaatatgtttcaagtcttgaacccagtcaagctggggtaacaattgaacagtatggtaagattcttatagagcacaagccaaaagagactattgatatactcatgcgactttgcactgagcaagggattcctaatggtgtgttcctgtccatgttgccatcacctgtggacttcatcactgtgtttgttcagcatccacattcattaatgcattttctcgagagatatgctgaaatagttcaggattctcctgctcaagcagaaatcaataacacactcttggaattatacttgtctagggacttgaattttccatcaatctctctatcagaaaatggtctagataaggacttaatagatcattcggtagcagctgcggtgtctaaagccgatcctgaaaagaagacaaatgctgattcgaaggatgcaatggagaaggattgtacggaaagacaacagaagggactggagttacttaaaatggcatggccgtcagacctagagcaacccctctatgatgttgaccttgctgtaattctttgcgagatgaattcgttcaaggatggacttctgtatctgtatgaaaaaatgaaattttacaaggaggttattgcttgctacatgcagaatcatgatcacgagggactgattgcatgctgcaaaagattaggtgattctagcaagggaggggatccatctctttgggcagatcttctcaagtatttcggtgaaattggagaggactgcaccaaagaggtgaaggaggttctcacttatattgaacgggatgatattttacctcctatcattgttcttcagaccctggcaaagaatccatgcctcacactttctgtcatcaaagactacatagctcggaaacttgagcaagagtcaaaaataattgaagaggaccggcgagctgtagagaagtatcaggaaacgactaaaaacatgagaaaagagattgaagatctcaggaccaatgccagaatatttcaacttagcaagtgtactgcttgcactttcacattggatatcccagctgtccatttcatgtgtatgcattcattccatcaacgctgcctcggtgacaacgaaaaagaatgccccgagtgtgctcccgagtacagatctgtgatggaaatgaagagaagtttggagcagaactcgaaagaccaagatctgttcttccagcaagtgaaaggctcgaaggacgggttttctgtgattgcagagtactttgggaaaggaatcatcagcaaaactagagatgcaacatcttaa

SEQ ID NO: 2590 - DNA, 5580 bp, Arabidopsis thaliana
  Clone ID: AT_F15K9.C1.o1.tg
atgagtatagttcaaaagcaagaagagatgaatggatgtggtctcaatgttgacaaagtagaagcctttacagtgtcacctcaggaaaaaggaaggaaaaacaagagaaagttagctgatccttctcaaccaaatgcttcttccctcactgaattccctccatatgagttaccttcgttgaaacctcagaaccatttgagcggaaatggatcggttggggaagtttctaatcagctgcaagttgaagtgtctgaatctgtcgaatgggatgacccatttgcctgtcatcttgaagaattgttgtcgtcaaatttgctcacgctcttccttgatacaatgaagcagcttattgatttaggctacaccgatgacgaagttctgaaagctgtatcacgctgtaggctgtactgtggaggcaataatcttttgtcaaacattgtcaataacaccttgagtgctctcaagactggagacgaaggtgctggttcaggagactatgtgtttgaggatttacaacagcttgtttcctatacgttggtagaaatgataagtcttattaaggaggtcaggccgtccctatcaacagttgaagctatgtggaggcttttgatgtgcgacttgaatgtcttgcaagcctttgaagctgaaggcgatggattggtgagttcaagtaaattatctgattcggaatctcttggtgctgaatctaatcctccaaaatctagtgacccagataacccaaagcctccccaatccgatcctcaaagcaatcggaatgagccactcaaatttggaaacttcccaaatacaccgaactccaaaaaaactcagtctagtggaacaacaccaggaaaagaagtatgctcgggtagcactgtttcttgtcaaggcatgagaagtacatcatttactctagtctctgatgaaaaattggtatcttgtcgaaaaggccgtactaaaaaagagatagcaatgcttcggcaaaaatcatgtgtggaaaaaattaggacttacagcaaaggcagtggctataaggcggcaaagtttgcatcagttggcagcttccttttagagaaaagagtcaaatcatcttctgaatttgtgccaagaaattcttcatcaaagataacagcagagattggagtgaaagtttcattagctgaggatagcggctgttttgtaagaaagaacagtaagttggattcacctgtggtagtggtagatgcaaagggctatataactgccttacctgctaggtcggtaaaatctgcttcaaaaaaaaagactggttctgagtctgtaactctgataccatcagcttcagaaaagaagtctgattcttcgataccatcaacttcagaaaagaagtctggttctgagtctgaagagaaggcatctgtgtctgcaaagctagcaccagattactatgctgggatcccatatgatgcagctctgggtatatatgttccccgggataagaaagatgaattgattctaaagcttgttcctcgagtgaatgatctgcagaatgaactgcaggtctggactgactgggctaatcagaaagtaaaagaggcaactggtagactacttaaggaccaaccagagcttaaggcactaaggaaagagagggaagaggcagaacagtataaaaaagagaagcagttattggaagaaaacactaggaaaaggctatctgagatggattttgcgttgaaaaatgcgaccagccagttggaaaaagcattcaatactgctcacaggctcgagctggaacaatctatactgaagaaagagatggaagctgctaagataaaagccgtcgagtctgctgagagctttagagaagcaaaagagagaggggaaagatcactgaaggatattcactcgtgggaagggcaaaaaattatgttgcaggaagagctcaagggtcaaagggaaaaggtgacagtgctacagaaagaagttaccaaagcaaaaaatcgccagaatcaaatcgaggctgctttgaagcaagaaagaacagccaaagggaaactcagtgctcaggcttcattgataaggaaagaaacaaaggaacttgaagcgcttggaaaagtggaagaagagcggatcaaagggaaagcagaaaccgacgtgaaatattacatagataacatcaagagacttgaaagagagatctcagagctgaaacttaaatcagactactcgagaatcattgcactgaagaaaggcagcagtgagtcaaaggcaacaaaaagagagagtcttgggatgccgaaagtgaaaagagaaagagaatgtgtgatgtgtttatctgaagagatgagtgtgattttcttgccttgtgctcaccaagttctttgctttaaatgcaatcagcttcacgagaaagaaggaatgatggattgtccgtcttgtcgtggaacaatccataggaggattcaagctcgtttcgctcgctccggcgtcggcgagatgaagcttcaggtccgagtcgtggaagcgaggaatctaccggctatggatctcaatgggtttagcgacccttacgttagattgcagctgggaaagcaaaggtcacggaccaaagtagtgaagaagaacttgaaccccaaatggactgaagatttcagttttggcgtcgacgatttgaacgacgaactcgtcgtctctgttcttgatgaagataaatacttcaacgatgacttcgttgggcaggttagagtttctgtttcccttgttttcgatgcagagaatcaatctcttggcactgtttggtatcctcttaatccaaagaagaaaggttccaaaaaggattgtggtgagatacttttgaagatatgtttcagtcagaagaactcggttcttgatttgacttctagtggggatcaaacctctgcttcgaggagtcctgacttgagactagaatcacctattgatccctctacttgtgcctctccttctagatcagatgatgcttcatctatcccccagacaacctttgcgggtcgattcactcagatttttcagaagaatgctatcaccgctacacctacacaatccagtagtaggagcattgatgcatctgacctatctgagatctccaaacctgtcttttcccttgagctgtctgaagatgaatcatcttctacttcctttgaggaattattgaaggcaatggagtcgaaagatcagggtagtgaacctcctagtaatctatcaggaggtgtcgttgtggaccagttatttatgatttccccatcagatcttaacattgtgcttttcgcatcggattcaagtttctatgcatcattgactgaactgcaagggaccacggaagttcaaattggaccatggaaagcagaaaatgatggcgagagtgttaagcgtgttgtaagttacctcaaggctgcaaccaaacttattaaggctgtcaaaggcacagaggagcagacatatctcaaagcggacggagaggtttacgcagttttagcaagtgttgccactccagatgtcccattcggaggtaccttcaaagttgaagtgctttactgcatctctcctgggcctgagctgccatctggtgagcagtgttcacgtttggtagtttcatggagattgaattttcttcagagcaccatgatgagaggtttgatagagaatggagctcgacaaggtctaaaagacaacttcgaacagtatgccaatttgttggctcaaagtgtaaagcctgtagattctaaggatattgggctgaacaaggagcaagctctctcttccttgcaagctgagcctcaatcagactggaaattggctgtacagtattttgccaatttcaccgtgttatccactttcttgattggtatttatgtatttgtccacattgtgtttgccatacccagtgcaatccaagggcttgagtttaatggccttgatttaccggattcaattggggagtttgttgttagtggggttctcgttcttcaatgtgaaagagtattgcaactgatttcccgtttcatgcaggcaagaaaacagaaaggcagtgatcatggcatcaaagcgcatggagatggttggttgctaactgttgctctaattgagggggtcgatctagcagctgtagatccaagcgggcattgtgatccgtatattgtatttacttccaatgggaagacaagaaccagctccatcaagttccagaaatctaatcctcagtggaacgaaatatttgaattcgatgcaatggctgatcctccttctgtactgaatgttgaagtttttgatttcgatggaccttttgacgaggctgtttcattggggcatgctgaagtcaactttgtgagatctaatatatctgatttagcggatgtttgggttccacttcaagggaaactagctcaggcttgtcaatccaaacttcacttgaggattttcttggatcatacaggaggtggagatgttgtcagagactatttaaataagatggagaaagaggtgggcaagaagtgttgttgcgcgttcttatctgctgaatggaaatttcagattaatgtgcggtctcctcaaacaaattcagcttttcagaagctctttggtctcccacaagaagaatttctaatcaatgactttacatgtcacttaaagcggaaaatgcctttgcagggtcgtcttttcctgtctgcaagaattgttggcttttatgcaagcatttttggtaacaaaacaaaattctttttcctgtgggaagatatagaggaaattcaagtgcttcctcccactcttgcctcaatggggagtcccattgtcgtcatgactctcagaccaaatagaggactggacgcgaggataggtgcaaagacacatgatgaggaaggcaggcttaagttccatttccactcatttgtgtctttcaatgtggcacaaaagacaataatggctctgtggaaagcaaaatctttgactccagagcagaaagtgcaagctgttgaagaggaatcagagcagaaactccaaagtgaagagagtggtctgttcttgggtgttgatgatgtgcgattctctgaggttttctctttgactctccctgtcccggtaagtttctttatggagttgtttggtggaggtgaagtggatcgtaaggctatggagagagcgggttgccagagctattcatgcagtccatgggagtcagagaaggatgatgtgtatgagaggcagacatactacagagataagcggatatcacgttacagaggagaagtaacaagtacacagcaaaagtccctagtgccagagaagaatgggtggcttgtcgaagaggtcatgaccctccatggagttccactgggtgactattttaatctccatctaagataccaaatggaagaatcaacttcaaaaccaaagacgacatatgtgcgagtatactttgggattgaatggctaaagagcactagacatcagaaaagggtgacgaaaaacatcctagtaaatctgcaagatcgtctgaagatgacatttggattcttggaaaaggaatatagcagcagacaacagcaacaacaagtaacataa

SEQ ID NO: 2591 - DNA, 2595 bp, Arabidopsis thaliana
  Clone ID: AT_T4I9.C1.o12.tg
atggttgagaagcaagaagaaatgaatgagtttggtgctgtcaatggtgggaaagtggggacgtcttcttcagtgtcaccaccgcaagataaaggaaggaagaacaagagaaagttagctgatccttctccacaaaatgctgcttctttgactgagttccctcgatatgagttacattcgttcaaatctcaaagccctttgtgtgaaaatgactccaacgggcagctgaaagccgaagagtctgattctgtgggatgggatgatccgtttgcttgtcaccttgaaggactattatcgtcaaatttgctcacgctctttcgtagtgcaatgaatcagattatggattgtgggtatagtgaggatgttgttctcaaagctatttcaagcagtaggttctactgtggtggaactgatctcgtgtctaatattgttaacgataccttgagttttttgaagagtggcaaaaaagttgctggttccagagactatgtgtttgaggatttgcaacagcttgttgcgtatagtttggtagagaagataagtcttgttagggaggttagaccatcgctttcaacggacgaagctatgtggaggctgttgatttgtgacttgaatgttttgaaagcttttgaagtggacgcagatggattggagggctcttcggtttccaatgctagtaaatcatcggaatctccagttgctgagtgtaatcctccaaaatccagtgacgcagataacccaaaggctccagtatccaatactcaaagcaagcagagtgagccagtcaaatttgggaacttcgcaaatgtaaacaactccaaaaatcctcatgctagtggagcaacacctggaaaagaggtattttctgtttccactgcttctggtgaaggcactaaaagtgcatccctgacttctgtttctgatgaaaaattagtatcttgtcgaaaaggccgcaccaaaaaagaaatggccatgctacggcagaaatcatgcgtggagaagattagaacttatagcaaaggcggtggctataagacggcaaagtttggtggtttccttgtggagaaaagaggcaaatcagcttctgatttactttccgcacaggcaagaaattcttcatcaaagattacaacagaggttatgaaaattcctttagctgagagtagcagcactctctcaaacagtactaagtcagattcgcctgcattagatgttaaggagcatgttactgcattacctgctaataatgctccagcaccagtagcttcagaaaagaagtccggttctgagcctgaagaaaagccttctgtgtctacgaaaccagcaccagattactatgctgcaatcccatacgatgcaactctgggaatatatattccccggaataaaagagatgaattgattttaaagctagttccccgaatgaaagatctgcagaaagaattgcaggattggactgactgggctaatcagaaagtaaaacaggctactgttagacttcttaaggaccaaccagagcttaaggcactaagaaaagagaaagaagaggcagaagagttcagaaaagagaagcagttattggaagaaaacactattaaaaggagatctgaaatggagttggccttgaataacgcaaccaaccagcttgagagaactaacaacacaattcgcaggctcgagctggaacaatctctgttaaagagagagagggaagctgctaatataagagcttccgagtccgctgagagctgtagagaagcaaaggagagagtgcaaagattgttgaagaattctcaatcgtgggaagggcaaaaaaatttactgcaggaagagctcaagagtcaaagagacaaggtggcagggctgcagcaagaagttgccaaggcaaaaacccgccaaaaccaaattgaggttagctcttttgtaggcaaaatgcctttgcacgttttaggtcttctcgtcttcggagctgtaatttattgtatgacaactgatcatatcatttcctctacaattcttttttcagctatcatcaagatgactaatgaaactaagttgcaggctacttggaaacaagaaaagtcagcgacggggaaactcactgctcaagcagctgcattaaagaaagagagagggaaactggaagaactcggaaaagcagaagaagagcggatcaaaacaaaagcagagaacgatgtgaaatactacattgagaacatcaaaagacttgacactgagatctcaaagctgaaactcaagtcagacagcttgaagatagctgctttgaaaaaaggcatagacggaaacaatgacggtaacaagagtggaatgaatcataccaccaacacaaaggcaaactcgatggcatcagcaaaagtatgggagaataatcagggggcagagtcgaaaatcaaaagagagagggaatgtgtgatgtgtttgtctgaagagatgagtgtgatattcttgccttgtgcccatcaggttctttgctctaaatgtaaccagcttcatgagaaggaagccatggaagattgcccgtcttgtcgagccaaaatccagaggaggattcaggctcgttttgctcgcgggtaa

SEQ ID NO: 2592 - DNA, 1008 bp, Arabidopsis thaliana
  Clone ID: AT_MGH6.C1.o3.tg
atggccgttgaagctcaccatctaaatcctctgttctcttccaacagagaaatgattcatcccgttgaagcaagcggtgtagtctataacacccagatgagatacggcaccgttccgacgtttaaccccaccgtggaatgtcaaacttctctgtttaacccaatctacaacatctcaccagtcgatcgtttggttcatcaatccatgaaaccaacgatacagtccgttgatagttctctcacattcaacagcgacaacaacgtcgattttcttcgtcctgtgtcgtcgagaaaacgttctagagaagaatccgttgttctaaacccttccgcttatatgcaaattcagaaaaatcccaccgatcctcttatgttccttggccaagacttgtcttctaacgttcaacaacatcatttcgatatcgatcgtttgatctctaatcacgttgagagaatgagaatggagattgaagagaagagaaaaacacaagggagaaggatagtggaagccgtcgaacaaggtttgatgaagacactaagagccaaagacgatgagataaatcacatcgggaaactaaacctctttctcgaagagaaggttaagtctttgtgcgtagagaatcagatatggcgtgacgtggcacagtctaatgaagccaccgtaaacgccctacgttctaacttgcaacaagttctcgcagccgtggagcgtaaccggtgggaggagccgcccacggtggctgacgacgcacagtcttgttgcggtagcaacgacgaaggtgatagcgaggaagaacggtggaagttagcgggagaggcgcaggatacgaaaaagatgtgtagggtagggatgagtatgtgtagaagctgtgggaaaggagaagcaagtgtgttactgttaccgtgcagacacatgtgtctatgttctgtgtgtggctcttcactcaacacttgtcctatatgtaaatctccaaagaccgctagtctacatgttaatctttcctcttag

SEQ ID NO: 2593 - DNA, 1146 bp, Arabidopsis thaliana
  Clone ID: AT_T9I22.C1.o13.tg
atggagctaaagaatgtcaaagatgcgtttgatcgtgttaccaaaaagcagaaactatgctatagcaaaacgcatgaagtggtagacaaaatgtctcaagaaatcgacaaggcattgaaaacgatacaggaggataatcatgaatctgttgttgctgatctgaagaaaacttttgaggagattgctccaatcaatctactagaagcgtctcagaaagaaataaatggggttcttaccaaatacccgaaagctcttgacaaaactctgaatccagatatatcgacggcttacagaaacgttaagtttgatactcatacagttcatcagatactagctcagtttttctacaggcaaggcatgtacgacgttggtgactgtttcatttccgagactggtgaggttaagcctgaatcttctgttactaaagctttcatggaaatgaatatgatacttgaagccatgaaagaacgggatctcggaccagctttgaaatgggtagcttcaaactctgacaagctaaaggaagcaaagtcagatcttgagttgaaacttcacagccttcactttttggagatagctaaagacaaaacctccgaagaagctatcaactacgcgagaaaacactttgctacgtattcagcagatagctgctgtttccctgagatacagaaactcatgtgctctctcttatggatcagaaacctcaataaatccccatactcagagttcctctcacctgtattgtggaccaacgctgccaaggaactaacccgacaatactgcatcctactcggtgaatcaccagagagtcctttaagtgtaacagttgcagcaggttcacaagttttaccgacgtttttgaagtatttgaacgtgctgccggagaaaagaaaagagtggcaaacaatggagcaacttcttgtacctgtggaactctctgaagagtatcgcttctactcggtctttgtctgccctgtctctaaagaacactcgagcgaagataatccgccgatgagattggcttgcggtcatgtcctttgcaagcagtctatcaacagaatgtcgaggaatggttcaaggtcgttcaagtgtccttattgtccaacagatattgatgcttcgcagtgtaagcagttatatttttag

SEQ ID NO: 2594 - DNA, 846 bp, Arabidopsis thaliana
  Clone ID: AT_K18L3.C1.o30.tg
atggtgggagttttattgagcgaaagaaatggatctcaaaagagacactgttcttctatatcttccgatgatggaaggaagcgagttgataagacccgctcagcgatgctgacggatcttgatattctcgactgtcccatttgctaccaagcattgaagattcctgtcttccagtgtggaaatgggcatttggcctgttcttcttgctgtcccaaattgaggaataaatgtcctgcatgtgctttgcctgttggacacattcgctgtagagcaatggagagagttcttgaatcagtcttggtcccatgccgatacgcagatttaggttgcaccaagacaatctattatgggagagaatcaacccatgagaagatatgcaacttctctccatgctcctgccctgtacaaggttgcaattatactggctcatacaaggatctatacgagcactatgatcttactcacagtacaggtagcacggcttatagtttcaatggcgtttcctatatagccgcgatgatgttcatcagcgataagatactaattgaaagggtatatgagaagaaactattgtttgtagtgcagtgttttgaggagccgtgtggtgtttatgtatctgtaagctgcattgcaccatctgctccagaagtaggagagttctcatatggtctcttgtacactacttgggaaggagtcactatgacttaccaatcaccaaaggtgaaaaaggttcttaaagtgagctcccaaagacctaaagatagtttcatgttgatccctcacagtttgttatgtggtccattgttagggatgatgctttgcatcaatgagttgaagcaaatgtaa

SEQ ID NO: 2595 - DNA, 1128 bp, Arabidopsis thaliana
  Clone ID: AT_F22D16.C1.o14.tg
atgaagttttgtaagaagtatgaagagtacatgcaaggacagaaggagaagaagaatcttcctggtgttgggtttaagaaactcaagaagattctcaagagatgcaggagaaatcatgttccttctagaatttcttttactgatgcaatcaaccacaattgttctcgtgaatgcccagtttgtgatgggacttttttcccggagcttctcaaggaaatggaagatgttgttggatggtttaacgagcatgctcagaagcttcttgagcttcatttagcttctggttttacaaagtgtcttacttggctcagaggcaacagtcgaaaaaaggaccatcatggtttgatccaagagggtaaagatttggttaattacgctctcatcaatgccgtcgccattcgaaaaatcctcaagaaatatgacaagattcatgagtctaggcaaggacaagcgtttaagactcaggtccagaaaatgcgaatagaaatccttcagtcaccgtggctctgcgagcttatggcgtttcacatcaatctgaaagaatctaagaaggaatctggagctactataacttctcctcctcctcctgttcatgcattgtttgatggttgcgctttgactttcgacgatgggaagcctttactttcctgcgagctctctgattccgtcaaagttgacattgacttgacttgttcaatatgcctggtgttattccactctcctcttgcaggttccacttcaaagactaagtctttagcaatgaatatttttaaatgtaatgctattaataagtctttaacttacggattacaattgattggcgaaaaacaggacacggtgtttgatccaatatctctaacctgcggtcacatatattgctacatgtgtgcttgctctgctgcatcagtaaacgtagttgatggcttgaaaaccgcagaagcaactgaaaaatgcccgctttgccgtgaggatggggtttataaaggtgctgttcacttggatgagctcaatattttacttaagcgaagagactattgggaagaaaggcgtaaaacagagagagcagaaaggttacaacaagcaaaggaatattgggattaccaatgccgaagcttcactggaatatga

SEQ ID NO: 2596 - DNA, 942 bp, Arabidopsis thaliana
  Clone ID: AT_T12I7.C1.o7.tg
atgtccggagaagcttcgaccagccgccgtaagaggcaacgtgttccttccagtgttgaatccgtagaaaatggcggaggcgatgcggtggcgcgatctgggacattgttcgagctagatctactcgattgtcccatttgttgtcacgcactcacgtctcctatcttccagtgtgacaatggacatatagcttgttcttcttgttgtactaaactgaggaacaaatgcccttcttgcgctttgccgattggtaactttcgatctaggataatggagagagttgttgaagcagtcatggtcacatgcccaaatgtgaaacatggttgcactgagaagttttcttatgggaaagagttgatccatgagaaggattgcaggttcgctttgtgctactgtcctgcaccaaactgcaactattcgggggtgtataaggatctctacagtcacttctacgttaaccactatgacacatggaatcaaatcgggtgtggcaatttcgctggtgcatggctacgtatcagtgagaagattttggtccttcaatatggacagggtcccttgattgcggttcagtgtttcaaggagacacaaggaatgtatgtgactgtgaactgtatagcaccttgtgctccaggagttggggagttatcctttgagctctcgtacaagatgccgatgggaggtaacagcactatgatgtttaagtcagaggagatgaataggattcagaaagtgagtttccaaactccggagaaggacttcatgttagttccttattatttcttgggtgatttctctacattgaagatggaaatttgcatacgcaagttaaaaaaagatgaagaagaagctgatgaagatgaagaatctgaagaagaagaagatgatgatgatgatgatgatgatgatgatgaagaagaagatgctgatgaagaagagtaa

SEQ ID NO: 2597 - DNA, 2670 bp, Arabidopsis thaliana
  Clone ID: AT_MQL5.C1.o29.tg
atggcaatttattacaagtttaagagtgcaagggattatgataccattgccatggatggtccttttatatccgtcggtattctcaaagacaaaattttcgaaactaagcatttgggcactggtaaagaccttgatattgtcgtctccaatgcccaaactaacgaagagtatctggatgaagcaatgttaatcccaaagaatacatctgtccttattcgtcgggttcctggacgtcctcgcatcacagttattaccacacaagagcctagaatccagaataaagtggaagacgttcaggctgaaaccaccaattttcctgttgctgatccatctgctcctgaagatgagtatgacgagtttgggactgatctttattccattcctgatacccaagatgcccagcatattattccacgtcctcatcttgcaaccgcagacgacaaagtagatgaagaaagcaaaattcaggcgctgattgacactccagcacttgactggcaacaacaaggtcaagatacttttggagctggtagaggttatgggaggggtatgcctggaaggatgaatggacgtggttttggaatggaaaggaaaacgccacctccaggttatgtgtgccatcgttgcaatatccctggacattttattcagcattgccccacaaatggagaccctaactatgatgttaagagagttaagccacctactggtatccccaagtccatgttgatggcgaccccagatggttcttattccttgccaagtggcgcagttgcagttctgaaaccaaatgaggatgcttttgagaaggaaatggagggattgccatcaacaacacgttctgtaggagaacttccacctgagctaaaatgcccattatgcaaagaagtgatgaaagatgctgcgcttacaagcaaatgttgttacaagagcttctgtgacaagtgtatcagagatcacattatttcaaagtcaatgtgtgtttgtggaagatcagatgtacttgctgacgaccttctaccaaacaagaccctcagggataccataaaccgtattttggaagctggaaacgatagcactgagaatgtgggcagcgttggccatatcccagatttggagtctgcacgctgtccacctcccaaggctctatctcctactacatctgttgcatctaaaggcgagaagaaaccagtacttagtaacaataatgatgcttcaactttaaaggcgccaatggaagttgcagagatcacaagtgcccctcgtgcatctgcagaagtgaatgtagaaaagccagttgatgcatgtgaaagcactcaagggtccgtgattgtgaaagaagcaacagtgtcaaagttgaatacgcaagcccccaaggaagaaatgcagcagcaggttgctgctggagagccagcaggaaaaaagaagaaaaagaaaccaagagtgcctgggaatgacatgcaatggaatcctgtgccagatctagcaggccctgactatatgatgcaaatgggaccaggtccgcagtacttcaacggcatgcaacctggcttcaatggcgtacaaccaggcttcaacggtgttcaacctggcttcaatggctttcaccctggcttcaatggatttggaggcccgtttccaggcgcaatgcctccatttatgggttacggattaaacccaatggacatgggatttggtgggggtatgaatatgatgcatccagatccattcatggcacaaggatttgggttccctaatataccaccaccccatagggacctagctgaaatgggaaaccgaatgaatctccaacgtgctatgatgggcagagatgaagccgaagcccgaaacgctgagatgttaagaaaacgtgaaaacgagagacgacctgaaggtgggaagatgtttagggatggagagaatagcagaatgatgatgaacaacggtacttcagcctctgcatcatccatcaaccctaataaatctagacaagcacctccaccaccaatccacgattacgatcgccggagacgaccggagaagagactatccccagagcatccgcctacgcgtaaaaacatttccccgtctcgcgactccaagagaaaatccgagcgttatcctgatgaacgagatcggcaacgcgaccgtgagaggtcacgtcaccaagacgtagatcgtgaacacgaccgtactcgcgaccgtcgcgatgaagacagaagccgagatcatcgccaccaccgtggtgaaaccgaacgcagccaacatcaccaccgcaagagatcggaaccgccttcatcggagccaccagtccctgctactaaagcagagatcgagaataatcttaagtctagcgtattcgctcggataagttttccggaggaagaaacatcttctggtaaacgaagaaaggtgccttcctcttcttctacttctgttacggatccatctgcttccgcctctgccgcagccgccgtgggaacatcagttcaccgacacagtagtcggaaggaaatagaagtagcagattatgaatctagtgatgaagataggcatttcaagaggaagccgtcaaggtacgcgcgatcaccaccggtggtggttagtgatgtgagtgaagataaactccgatactcaaaacgtggaaagggggagagatctcgagcttga

SEQ ID NO: 2598 - DNA, 1050 bp, Arabidopsis thaliana
  Clone ID: AT_K18L3.C1.o90.tg
atggcgagattctcagtttgcggaggagacgacggagaaggaccaagtaacaacaatcaccaatcccggaaaaggcaacgacttccttcaatcgatgaaaatgaagaagacgccgagacctccgacgccggaagttccggtgaagaagacgaagacgaaactcagaatcaaggaatgagaccagaatctgaggatcgaggatcaacgagcgatgatagcgatcgtgaagttgtgattgaggagagacgatttggtaaatttgtaaatagtcagagttcttcttctagcaaagattcgcctctttctgtaacgttattggatccagatgttcttgattgtcctatttgttgcgagccattgaagattcctatctttcagtgtgataatggtcatctggcttgtactttgtgctgcaccaaagtgaggaacagatgcccgtcgtgtacattaccgataggttatgttcgttgcagagctatggagaaggttatagaagcatctagagtctcgtgtctaaatgccaaatacgggtgcaaggagagtacctcctatggaaaccgttttagtcatgagcaggtatgtgttttcaccccttgttcttgccccatacttgactgccactacactgggtattacaaggatctcaacaatcacgtccgtgctgaacacaaagatgatctgatctcgttcgtgtggaatactcgtttaaccattagcttggacctcaataagaagaccacaattcttcaggaagaaaacgatgggcatgtgattgtagtccaagttttcagggctttgcatgctgtgtatgtcagtgtgagctgtattgcacctttgacaccgggagtgggtaggttatcatgccgtcttgcgaagataaccgttgatagcttactgaagcaaggatttatggtgaagaacatacaaaaagtgacgaatgaacatcccgaagatggtttcatgttgattccttcctatttgttctctggtaatgacaacttgaatctgcagatttggatcggccatggccggatctttgttcattcgtga

SEQ ID NO: 2599 - DNA, 3003 bp, Arabidopsis thaliana
  Clone ID: AT_T23G18.C1.o5.tg
atggctgcggttccgcctgaaaacggcgtggacggagatgacgaaagagaggaagaagaagaggacgaggaggaggaagaagaagaagaagaagaagagaacggagatgaggctgaggaggagccacgtctcaaatatcagaggatgggtggcaacgttcctgcgttgctatctaacgatgctgcttcctgcatcgctgttgctgcgaggatgatcgcgcttggtacgcacgacgaatttcgtgcccacactgctccggttaatgacatcaactttgacactgagggagagtatatcggaagctgttcagacgatgggtctgttgttataaacagccttttcactgatgatgagaagatgaaatttgattatcatcgccccatgaaggccatttccttggatccagattatacgaaaaagcaatctaagagatttgtagctggtggcttggctggtcacttgtatatgaactccaagaagtggttcggtaataaagatcaggtttgtgagaatgtgctgcattctggggaaggtccaattcattctgtgaagtggagaggaagtctcatcgcctgggctaatgatgttggtgttaaagtttatgatacagccaaagatcagcgtgttacatttattgaaaaaccgcgaggaagccccaggcctgaggctttactaccccacttggtttggcaggatgacactctccttgtgattggttggggaacatcagttaaaattgcgtcgattaaatcagaccagcaacaaactggaacttttaggcagattcagatgtctagtctaacccaagtagatattgtggcatctttccaaaccagctattacatttcagggattgctccctttggtgattctctggttattcttgcttatatacccattgaaggagatggtgagaaggaatttagcagcaccactactctatcgcgtcagggaaatgcccagaggcctgaaatacgcattgtatcatggaacaatgatgaactcacaatggatgctcttcctgtacacggctttgagcattacaaggcgaaagactattcccttgctcatgctcctttcccaggtagtagctacgctgggggacagtgggcagctggtgatgaaccactgtactatattgtttcgccaaaggatgttgtgattgccaaacccagggatgctgaagatcacataaactggcttttgcaacatggattccacgagaaagccctagcagctgttgaggctagtgaaggacgaaccgaactaattgataaggtgggagctgggtatcttgatcatttgattgtggaaagaaaatatgctgaagcggcatctttatgccccaaattgttacgaggatctgcttcagcctgggagaggtgggttttccattttgctcaactacgccagctgcctgttcttgtcccatatatgcctacggataacccaaggcttaaggatactgtgtatgaggttgctctagttgcactagcaaccaatccctcataccacaaggagcttttgtcagcggttaaatcttggccacgttctgtatattctgctttgactgttatctcagcaatagagcctcaactgaacacatcttcaatgacagatgccctcaaagaggtcagcattgtctgtcatgcgctggcagagctgtatgtaattgatggacagtatcagaaggccttctccctatatgctgatcttctcaaaccagaagtgtttgacttcattgagaaatacagcttgcatgaggcgattcgcggaaaggtggtccagttaatgttgcttgattgcaagcgtgccactgtcttatttatccaaaatagggatttgattcctccatctgaagttgttccacaacttctgaaggctggcaaaaatccacaagttctgaaagctggcaaaaaatgtgattcaagatattacttgtacttatatctgcatgcattatttgaagttagtcatgataccgggaaggattttcatgatatgcaggtagaactctatgcagaatacgatactaagatgctgcttccgttcctacgtagcagtcaacattacaagttagaaaaggcatatgaactttgtgtcaagaaagattttttaagagagcaagtgtttgtcctgggaaggatgggaaatgcaaaacaagctcttgcagtcatcataaataaactgggagatatagaagaggtgattgttactgctgtggaatttgtgtccatgcagcacgatgatgatctatgggaagagctgattaaacaatgtctaaacaagcctgagatggtaaaagctgtatttgtgatgcaaatcacaacacaaaccagtcttgattctgggaaacttgtgggcttgctgttggagcacacagttggcaacctcgaccctctttacattgtaaatatggtcccaaatggcttggaaatacctcgattaagggatcgattggtcaaaatcgtaacagattacagaactgagacatctcttagacacggttgcaatgacattctcaagacggatattgttaatcttctggtcaaatgcttcaacgaggctaggcgtggggtctgcctgagccatgaagacgacgattcccgtgcgaagagagaagacaataatcgctcatcattctcgcagagaatggtagtagataaatctttgagcataaagatgacagaagtgaagtcgaagacacggggggacacacggtgttgtatgtgcttcgacccggtctcgataagaggggacactgtagtggtcttcttctgctgccatgcttaccacgagacgtgcctcatggatgcagccttcagtaacaacaatcacaagacaaccaaaggttcttcggggtatgaatatagctacgataacggtgtggatgaggaggaagaggatgaggaagaagatgaggatggtgatggagacagacctgggcggtcgcgtttacggtgcatattatgtactactgccgccgctgcgtccgctcggtag

SEQ ID NO: 2600 - DNA, 1023 bp, Arabidopsis thaliana
  Clone ID: AT_F8A5.C1.o13.tg
atgttgggaggcaacaatgataaccctgtgccgcaggttctaatgaacgacagccagtttcggtatcaatcaaacacatcgttgaatcagcttcacttgcttgggacgatgagagctggttgtactattgatcctgtaaactactttgctaatgataaccttgctcctatgatgcggcttaatagcacacgcggaagggaaactgaaaacaacaatattatgcagagacagcagaagctgcagatctctttgaattataactacaacaacaataatactgttgttcaagatgaagtcccaaagcagaacttagtgtcaactggtctgagactatcttatgatgatgatgagcgcaactcttctgtaacttcagcaaatggaagcataacaactccagtctatcagtcactcggtgacaatatcagattggacctcaatagacagaacgacgagcttgatcagtttatcaaattccgggcagatcaaatggcgaaaggtgtgagagatattaaacagagacatgtcacgtcctttgtcacggccttagagaaggatgtgagtaagaagcttcaagagaaagaccatgagattgaaagcatgaacaagaagaaccgggaactcgtggataagataaaacaagtggcagtggaagctcagaactggcattacaaagcaaaatacaatgaatctgtggttaatgccttaaaggtaaatttgcaacaagtgatgtcacatggaaacgacaacaatgcagtaggaggaggagttgctgatcatcatcaaatgaaagaagggtttggggatagtgagattgatgacgaagcagcttcttacaattacttgaacatcccggggatgccaagtactgggatgagatgtaagttgtgtaacgtaaagaatgtttcggtcttgctcgtgccatgtaggcacttgagtttgtgtaaagattgtgatgtgtttactggtgtttgtcctgtttgccagtctttgaaaacttctagcgttcaggtcttcttcttctga

SEQ ID NO: 2601 - DNA, 1101 bp, Arabidopsis thaliana
  Clone ID: AT_T12I7.C1.o6.tg
atggtgaaaggcacgaacgccgagcaagccctcgccagagaagaagcttcgagcagccgtccaaaaagacaaagagttccttccattgttgaagaagaaggcgaaaatggtggaggagatgtggtagtacgatctgggacgttgttcgagctagatcttctcgattgtcctatttgttgtaacgcactcaccattcctatctttcagtgtgacaaaggacatatagcttgttcttcttgctgtactaatgtaagtaacaaatgcccttactgctctttggcaattggtaactatcggtctagaataatggagagagttgttgaagcattcattgtccgatgtcccattgttgctggagaagcgtcgagtagccgccaaaagaggctacgagttccctccattgatgaagaaaacggcgagaatggtggaagagatgtggttgtgccatctgggacgttgtcccagctagatcttctcgattgtcctgtttgcagtaaagcactcaagattagtatctttcagcaatcattgttccttgccaaacgccaaaatggctgcaccgagacattctcttatggcaacgagttagtccatgagaagaaatgcagcttcgctctgtgctattgtcctgcaccaaactgcaactacgcgggtgtgtacaaggatctctacagtcactacgctgctaaccacaaaaaattatggacacgtttcagttgtggctattccatgcatgtatgcatggacttcgagtcgaaaagtttggtacttcagcaatattcagatggtccattggttgtgcttcagtgtttcaaggaaccaccacaaggattgttttggactgtgaattgtatagcaccttctgctccaggagttggaaagttctcctatgagctatcctactcgacggcaggtaacactttgacgtttagatcgtcggagatgaatcggattcagaaagtgagcttccaaactccggagaaggacttcatgtttattcctgaatatatcttgtgtccgatgggtttgtataagggtacttatatttgtatccgcagcctagaagaagaagaagaagaagaagaagacaatgaagactaa

SEQ ID NO: 2602 - DNA, 723 bp, Arabidopsis thaliana
  Clone ID: AT_F17K2.C1.o6.tg
atgcaaagtagctccagctccggtggtgacgaccttgaaaagcagcagcagcagcagcagaaggacaagtctccccagaagcagagcgagtcagccaatgaatcgaaccacctcacaatcgttgtctgcaatggagattctagtcgggaagaattggtgggtcagatcccaccggaaaaggaggttagcttatccagaaacggaagctcgcacgagcagtgcagggtttgtctacaagacaaagaagaggttttgattgaactaggttgtcaatgtcgtggtggtcttgctaaagctcacaggtcttgtatagatgcttggtttcgtactaaaggctctaaccagtgtgagatctgtcaagttgttgctgttaatgtcacacctcctgagactcaaccaactacaaactattgggtttggaggattgatcctagctatagacaagaagagcgtgagagaggatgctttagtccgctttgggttgcattttcgattctgatcggtggtttaatgcttgatgtgttgatatctatcacacttggggtctctgcgcttccggtgaacatcattattggagtcatagttgtgcttgggctaggaacagctctaaggctgactttggagttctgttatgagtggagcttgagaagagcggttcacagggcggtgcagagggcggaagcgaacaacttcagtaatattgcgtacccacctgccttgtag

SEQ ID NO: 2603 - DNA, 1083 bp, Arabidopsis thaliana
  Clone ID: AT_F7J8.C1.o140.tg
atgcttcaaattcgtcttcggagggattccccgacggaaactggaaatggtgcgaggccttctccgacggagacggttactgtagcctgtcccgaccatctcgtcctcgccgatcttcctgttgcgaaaggaatcggttccgtgactcccaccaccgtaatcaagcccgtcggtcgtcgttctcgccgtcagctaggcgagagagttcacttctgcgttcgttgcgattttccgattgcaatctatggtcgtctgattccttgtgatcatgccttttgccttgaatgtgctcgcagtgattccatctgctatctatgtgatgagcggattcagaagattcaaacaatcaagatgatggaagggatcttcatctgtgcagctcctcattgtcttaggtctttcctgaagaaacttgactttgaagcccatgtccatgacctccatggaagcctattacaagccgatgcagagaaagaagatggtaaccagtcagatgttcagagcacaatgcagcagtcttcagcttcagaatccaccttgcgagctcctttaagatcccagctgcaacaatcccgtgaactaaacaggtcggcgtcatttgcaaagtcacagtctggatttagtcaagtccagaattaccctccagatagcgataactctcgccctcctggattcgaaaccgctagtcctaaaccaggaatccggttcccagactacccccagcctatgaatcttatgcaaccgcccagcttgcccgttccaatgaatcaaaacccgggtttaccacagcagtttggttttccttcgtatccaacaacagagagtggatcatctcaacaattctttaacggtgctcagtacgagatgacaagaacagagagcggcggatcagaacaaagttcattgctcgggtatcccccgccttcaccaatgacgaatctgaatttccaaggatcgtatcctcctccatcatggaatcccggaatggcaccgcctcacacgacccagcaggttaaccggggtagagacggtcaaagttttgggtggccacaagagaaccgtgatggctttgggcaggagtaa

(The sequence listing continues in the following parts.)

1-7. (canceled)

8. A substantially purified nucleic acid molecule comprising a nucleic acid sequence wherein said nucleic acid sequence:
(a) hybridizes under stringent conditions to a nucleic acid sequence selected from the group consisting of SEQ ID NO: 1454 through SEQ ID NO: 2906, a complement thereof or a fragment of either, or
(b) exhibits a 90% or greater identity to a nucleic acid sequence selected from the group consisting of SEQ ID NO: 1454 through SEQ ID NO: 2906, a complement thereof or a fragment of either.

9. The substantially purified nucleic acid molecule of claim 8, wherein said nucleic acid molecule encodes an Arabidopsis thaliana protein or fragment thereof.

10. A substantially purified nucleic acid molecule comprising a nucleic acid sequence that shares between 100% and 90% sequence identity with a nucleic acid sequence selected from the group consisting of SEQ ID NO: 1454 through SEQ ID NO: 2906, a complement thereof or a fragment of either.

11. The substantially purified nucleic acid molecule of claim 10, wherein said nucleic acid sequence shares between 100% and 95% sequence identity with a nucleic acid sequence selected from the group consisting of SEQ ID NO: 1454 through SEQ ID NO: 2906, a complement thereof or a fragment of either.

12. The substantially purified nucleic acid molecule of claim 11, wherein said nucleic acid sequence shares between 100% and 98% sequence identity with a nucleic acid sequence selected from the group consisting of SEQ ID NO: 1454 through SEQ ID NO: 2906, a complement thereof or a fragment of either.

13. The substantially purified nucleic acid molecule of claim 12, wherein said nucleic acid sequence shares between 100% and 99% sequence identity with a nucleic acid sequence selected from the group consisting of SEQ ID NO: 1454 through SEQ ID NO: 2906, a complement thereof or a fragment of either.

14. The substantially purified nucleic acid molecule of claim 13, wherein said nucleic acid sequence shares 100% sequence identity with a nucleic acid sequence selected from the group consisting of SEQ ID NO: 1454 through SEQ ID NO: 2906, a complement thereof or a fragment of either.

15. A substantially purified polypeptide, wherein said polypeptide is encoded by a nucleic acid molecule comprising a nucleic acid sequence, wherein said nucleic acid sequence:
(a) hybridizes under stringent conditions to a nucleic acid sequence selected from the group consisting of SEQ ID NO: 1454 through SEQ ID NO: 2906, a complement thereof or a fragment of either, or
(b) exhibits a 90% or greater identity to a nucleic acid sequence selected from the group consisting of SEQ ID NO: 1454 through SEQ ID NO: 2906, a complement thereof or a fragment of either.

16. A substantially purified polypeptide comprising an amino acid sequence that shares between 100% and 90% sequence identity with an amino acid sequence selected from the group consisting of SEQ ID NO: 1 through SEQ ID NO: 1453, or a fragment thereof.

17. The substantially purified polypeptide of claim 16, wherein said amino acid sequence shares between 100% and 95% sequence identity with an amino acid sequence selected from the group consisting of SEQ ID NO: 1 through SEQ ID NO: 1453, or a fragment thereof.

18. The substantially purified polypeptide of claim 17, wherein said amino acid sequence shares between 100% and 98% sequence identity with an amino acid sequence selected from the group consisting of SEQ ID NO: 1 through SEQ ID NO: 1453, or a fragment thereof.

19. The substantially purified polypeptide of claim 18, wherein said amino acid sequence shares between 100% and 99% sequence identity with an amino acid sequence selected from the group consisting of SEQ ID NO: 1 through SEQ ID NO: 1453, or a fragment thereof.

20. The substantially purified polypeptide of claim 19, wherein said amino acid sequence shares 100% sequence identity with an amino acid sequence selected from the group consisting of SEQ ID NO: 1 through SEQ ID NO: 1453, or a fragment thereof.

21. A transformed plant having a nucleic acid molecule which comprises:
(a) an exogenous promoter region which functions in a plant cell to cause the production of an mRNA molecule; which is linked to;
(b) a structural nucleic acid molecule, wherein said structural nucleic acid molecule comprises a nucleic acid sequence, wherein said nucleic acid sequence
(i) hybridizes under stringent conditions to a nucleic acid sequence selected from the group consisting of SEQ ID NO:1454 through SEQ ID NO:2906, a complement thereof or a fragment of either; or
(ii) exhibits a 90% or greater identity to a nucleic acid sequence selected from the group consisting of SEQ ID NO:1454 through SEQ ID NO:2906, a complement thereof or a fragment of either,
which is linked to
(c) a 3′ non-translated sequence that functions in said plant cell to cause the termination of transcription and the addition of polyadenylated ribonucleotides to said 3′ end of said mRNA molecule.

22. The transformed plant according to claim 21, wherein said nucleic acid sequence is a complement of a nucleic acid sequence selected from the group consisting of SEQ ID NO: 1454 through SEQ ID NO: 2906 or a fragment thereof.

23. The transformed plant according to claim 21, wherein said plant is selected from the group consisting of soybean, maize, cotton and wheat.

24. A transformed plant having a nucleic acid molecule comprising a nucleic acid sequence encoding a polypeptide having an amino acid sequence, wherein said amino acid sequence exhibits a 90% or greater identity with an amino acid sequence selected from the group consisting of SEQ ID NO: 1 through SEQ ID NO: 1453, or a fragment thereof.

25. A transformed seed comprising a transformed plant cell comprising a nucleic acid molecule which comprises:
(a) an exogenous promoter region which functions in said plant cell to cause the production of an mRNA molecule; which is linked to;
(b) a structural nucleic acid molecule, wherein said structural nucleic acid molecule comprises a nucleic acid sequence, wherein said nucleic acid sequence
(i) hybridizes under stringent conditions to a nucleic acid sequence selected from the group consisting of SEQ ID NO:1454 through SEQ ID NO:2906, a complement thereof or a fragment of either; or
(ii) exhibits a 90% or greater identity to a nucleic acid sequence selected from the group consisting of SEQ ID NO:1454 through SEQ ID NO:2906, a complement thereof or a fragment of either,
which is linked to
(c) a 3′ non-translated sequence that functions in said plant cell to cause the termination of transcription and the addition of polyadenylated ribonucleotides to said 3′ end of said mRNA molecule.

26. The transformed seed according to claim 25, wherein said nucleic acid sequence is a complement of a nucleic acid sequence selected from the group consisting of SEQ ID NO: 1454 through SEQ ID NO: 2906 or a fragment thereof.

27. The transformed seed according to claim 25, wherein said seed is selected from the group consisting of soybean, maize, cotton and wheat seed.

28. The transformed seed according to claim 25, wherein said exogenous promoter region functions in a seed cell.

29. The transformed seed according to claim 25, wherein said exogenous promoter region functions in a leaf cell.

30. A transformed seed comprising a transformed plant cell comprising a nucleic acid molecule comprising a nucleic acid sequence encoding a polypeptide having an amino acid sequence, wherein said amino acid sequence exhibits a 90% or greater identity with an amino acid sequence selected from the group consisting of SEQ ID NO: 1 through SEQ ID NO: 1453, or a fragment thereof.

31. A method of producing a genetically transformed plant, comprising the steps of:
(a) inserting into the genome of a plant cell a recombinant, double-stranded DNA molecule comprising
(i) a promoter which functions in plant cells to cause the production of an RNA sequence,
(ii) a structural nucleic acid molecule, wherein said structural nucleic acid molecule comprises a nucleic acid sequence, wherein said nucleic acid sequence
(A) hybridizes under stringent conditions to a nucleic acid sequence selected from the group consisting of SEQ ID NO:1454 through SEQ ID NO:2906, a complement thereof or a fragment of either; or
(B) exhibits a 90% or greater identity to a nucleic acid sequence selected from the group consisting of SEQ ID NO:1454 through SEQ ID NO:2906, a complement thereof or a fragment of either,
which is linked to
(iii) a 3′ non-translated sequence which functions in plant cells to cause the addition of polyadenylated nucleotides to the 3′ end of RNA sequence,
(b) obtaining a transformed plant cell with said structural nucleic acid molecule that encodes one or more proteins, wherein said structural nucleic acid molecule is transcribed and results in expression of said protein(s); and
(c) regenerating from said transformed plant cell a genetically transformed plant.

32. A method for reducing expression of a protein in a plant cell comprising growing a transformed plant cell containing a nucleic acid molecule wherein the non-transcribed strand of said nucleic acid molecule encodes a protein or fragment thereof, and wherein the transcribed strand of said nucleic acid molecule is complementary to a nucleic acid molecule comprising a nucleic acid sequence selected from the group consisting of SEQ ID NO:1454 through SEQ ID NO:2906, a complement thereof or a fragment of either, and whereby said transcribed strand reduces or depresses expression of said protein.

33. A method for increasing expression of a protein in a plant cell comprising growing a transformed plant cell containing a nucleic acid molecule that encodes a protein or fragment thereof, wherein said nucleic acid molecule comprises a nucleic acid sequence selected from the group consisting of SEQ ID NO:1454 through SEQ ID NO:2906, a complement thereof or a fragment of either, and whereby said nucleic acid molecule increases expression of said protein.

34. A method of producing a plant containing reduced levels of a protein comprising:
(a) transforming a plant cell with a nucleic acid molecule comprising a nucleic acid sequence selected from the group consisting of SEQ ID NO:1454 through SEQ ID NO:2906, a complement thereof or a fragment of either, wherein said nucleic acid molecule is transcribed and results in co-suppression of endogenous protein synthesis activity, and
(b) regenerating said plant comprising said plant cell and producing subsequent progeny from said plant.

35. A method of growing a transgenic plant comprising
(a) planting a transformed seed comprising a nucleic acid sequence selected from the group consisting of SEQ ID NO:1454 through SEQ ID NO:2906, a complement thereof or a fragment of either, and
(b) growing a plant from said seed.

36. A method of producing a genetically transformed plant, comprising the steps of:
(a) inserting into the genome of a plant cell a recombinant, double-stranded DNA molecule comprising
(i) a promoter which functions in plant cells to cause the production of an RNA sequence,
(ii) a structural nucleic acid molecule, wherein said structural nucleic acid molecule comprises a nucleic acid sequence encoding a polypeptide having an amino acid sequence, wherein said amino acid sequence exhibits a 90% or greater identity with an amino acid sequence selected from the group consisting of SEQ ID NO: 1 through SEQ ID NO: 1453, or a fragment thereof.
which is linked to
(iii) a 3′ non-translated sequence which functions in plant cells to cause the addition of polyadenylated nucleotides to the 3′ end of RNA sequence,
(b) obtaining a transformed plant cell with said structural nucleic acid molecule that encodes one or more proteins, wherein said structural nucleic acid molecule is transcribed and results in expression of said protein(s); and
(c) regenerating from said transformed plant cell a genetically transformed plant.

37. A method for increasing expression of a protein in a plant cell comprising growing a transformed plant cell containing a nucleic acid molecule that encodes a protein or fragment thereof, wherein said nucleic acid molecule comprises a nucleic acid sequence encoding a polypeptide having an amino acid sequence, wherein said amino acid sequence exhibits a 90% or greater identity with an amino acid sequence selected from the group consisting of SEQ ID NO: 1 through SEQ ID NO: 1453, or a fragment thereof, and whereby said nucleic acid molecule increases expression of said protein.

38. A method of producing a plant containing reduced levels of a protein comprising:
(a) transforming a plant cell with a nucleic acid molecule comprising a nucleic acid sequence encoding a polypeptide having an amino acid sequence, wherein said amino acid sequence exhibits a 90% or greater identity with an amino acid sequence selected from the group consisting of SEQ ID NO: 1 through SEQ ID NO: 1453, or a fragment thereof, wherein said nucleic acid molecule is transcribed and results in co-suppression of endogenous protein synthesis activity, and
(b) regenerating said plant comprising said plant cell and producing subsequent progeny from said plant.

39. A method of growing a transgenic plant comprising
(a) planting a transformed seed comprising a nucleic acid sequence encoding a polypeptide having an amino acid sequence, wherein said amino acid sequence exhibits a 90% or greater identity with an amino acid sequence selected from the group consisting of SEQ ID NO: 1 through SEQ ID NO: 1453, or a fragment thereof, and
(b) growing a plant from said seed.
